United States Patent Application Publication US 2019/0348154 A1 - sequence listing, part 71

SEQ ID NO: 267640 - DNA, 1119 bp, Klebsiella pneumoniae
atgatgagcaatagtgttggttttttttcaaaatttacccgaggaacgggcaatctttccttcgcggtgaaagacaccattgatgtgtctggttatcccacccaggcgggcagtcgggttttcctgcatgcaccacccgcagcccgcaacgcccgcatcgttcagcagtttctcgatgatggctgtcagttattgggtaaaacgatgctgcatgaactggcgtttggcgtgactgggatcaaccactggggtgggacaccggttaattactctttcccggatattattcctggcggatcatcaagcggttctgcaacggtagttgcggcaggttgtgttgattttgccatcggtactgataccggcggttcggtgcgtatgcctgcggcctgttgtggcgttgtcggccttaaaccgacgtggggtttgataagccgtgtcggtgtcacgccgaaacacagttcacttgattgtgtggggttttttactcagacgtgcggaaccctgttgcaggtgatggagaaggcacagggaaaagtggcagaccgctcaatctccctgcctgctattggagtgatgaaaggccatgccactgaagcgatagatgctctgttggcacagcgactgcagcctctcagtgcagcagccacaacagtggatttgacctatttcacggaagctcaccaggccggattgaccctaatcagccatgagaactggcaggcttacgcttccatcattgacgcagagggcatttcgccagatgttgttacgcgtattcgggcagggtctgccgtcaccgctgcggagctggcaaatgcggaagccgtgcgggaaaaattttctgaagctttggaccaccaattagccgaaacgccgctgataattttaccgacattgccagaattgcctcctacgttaagtgaagcttccgatccattaaatgtggtgaatctgactcgattaatcagaccttttaaccttagcgggcacccggctatgagtttacccattggcgtaattgatggccgtccggtcgctatgcagcttatcacgcataaaaaccatgatttgaatttatgtgtttatgcaaagaagctggttgaatcttttacctga

SEQ ID NO: 267641 - DNA, 1155 bp, Klebsiella pneumoniae
atgttacagacacgattagctatgaatgctgaaaatacccactgcgatatgagtattttactgcaggaattaaaatccagaggggaggagtttgaaaatcagaaatatattacccatgacataattgagaagttcaaagaactcggtgtttatcgggcattagtacccaaaaaatatggcggtacagaaatgacaccggcgcaattctgtcagctgattgaaactatttcaatcgctgatgggtcggctggctgggttgcaagttttggtatgaatcctttttatcttggaggattaccgctctcaacgctggatgaaatttatcgcaatggcccggatgtggtctttgcgggcggaatttttcctcctcaaaaagccatggttacagacaaaggttttgttgtttctggccgttggggttttgccagtggatgtatgggggcgagcttgattggcgtgggtattgtgccggaaaacggtgaggaaaaatcgttgccacgtattgccgtattgccaaaaaatcagaccaccattgatcccgtatggaataccgtggggctggcaggcacaggcagccatgatgtggttgtggacaacgtcgttgtacccgaagaatggacgtttatccgaggtggaaaacttaatcttcagggcgatctctaccgttatccggtgttgtcactggcgactcaggtactggcggtggtaagcgccggagtggcccgtgcggcactgaatgaaatatacaccattgccggtcagcagcgttcggtaacaggggcgccgcggctggcggatcggcagtttgcacaacgggatgtggcgcattgcgaggcagaacttaattcggctcgaagctggttttatgacgctatcgacaaggtgtggcaaaccctttgccgtggcgatgcaccccaggatgaggacgtcaatttgctgcgcctctcagcaacccatctgacacgcgttgccgcaaaagtcacttcaaaaacgttgatgttggccgggatgccgggcatctccatgcgcagtccattacaacgttacgcccgcgattccatggtcatcactcaacacgccttcatgggtgagctgacctacatcaacgccggcaatatgttttttgggcagtcacctttgcccggttacttataa

SEQ ID NO: 267642 - DNA, 360 bp, Klebsiella pneumoniae
atgagccagacagattcaattcgggtgctgttttgtattggtgtgaaccagaatttttttgatgctacgccggaagtagcaaaacaggtttgggcagcctttggcgaaatgatgaaagggattgaaaacatgccaggcatcaccgtgctgggcaatatggacgatgacaaagtgatggtgggaccttccgcaggttggccatggaccacgtatgtcctcgctgatgtacaggattttgcaaccgtcagcgctgcctgtaacttattccgcaccgtcatcgtgggcgaaggaccgtatcgactgtggaaattttgcaaagtcgaagcacgcaccggacgtgagttaattatccaacagtaa

SEQ ID NO: 267643 - DNA, 531 bp, Klebsiella pneumoniae
atgcagatgtctgagcaacaacaccttttatcaagactggatacgctggagtctgaggcggaaattcgcagagttatcagtcagtatatgcatttatgtgatgacctgcgttctgaagatagcgttacacaaattgggcaactttttacctgcaatgccgaatgggcaggcattggtgaactctatgccgaacggctggggaattataaagggcgcgcggctatagaagcgatgatgagaaagtatgtcactcatccggcccattttagaatcaacacgcactatttaagttctgagtttatttatctaaatgagataaatgaagccactggccgctggaagatgttgcaattgtcaaccttcaataatggccagtcacatttaaacggtgccgaattaattattgagtttcgccgtgaaaacaaaatctggttaataaaccatttcactacgcgaaacctatttagtcgcccgatcgattattggcattcccccagtggattgcccataccagaaaccaaacgggcctga

SEQ ID NO: 267644 - DNA, 1305 bp, Klebsiella pneumoniae
atgcaagatatcccggtaaaaaatattgattgtacgcccagttcacaggagctggcggctctggtgaagtcggaccgtgttcatacctctctctatacttcagccgaaatttttgatgtagagatcgataaaattttttccaatacctggatctgggtggctcacgaaagtgagataccggatgccggtagtttcaaatcctcatttgtcggtactcagccggtcattgttgtacgtgacagaaaaggcaatatcaatgtgttgttgaaccgctgtcgtcaccgcgccgcaacagtttgcgaacaccagagtggcaaaaccaataacttcgtttgtccttatcacggttggggttacgggctggatggtgcgttgcgtggagtacctcatccagaaagctatgccgatacgctggataaagccaaccttggcatgattcgtctacgtacagaaagttatgccggtatggtctttgccacttttaaggacgatatcgagtcgctggtcgatttccttggacccgcgaaaaaatggatggatttatttatgaagcaaggtggcggctacccgatccaggccacgacggctcaccgtttccgtttcccagggaactggaaaatccagctggaaaacactaccgacggttatcattttcccatcgttcataagtctttccttagctcagtggataaacagactgaagaaatgctgaattttgttgatggcagtggctttgttgaagacctggggaacggccatagcgtgatggtaatgattccggagttgattgatcttgaagagaatcttgatgcgccgattcccgatcgttttgttgaactggcccaggtattacgtgacgaaggccatgcagaactggaggtccgccgcatagtccgcgccgtaggcggctgcggttttaacctcaaccttttcccgaatgtggcctgttcgatggcctttttccgtgtactccagccgatttcagttaaagaaactgaaattcaccatgtagtgatcaccatgaaaggcggaccggaagcagccaaccaggcacgtctgcgtatgcacgaacatttccagggaccgatgggttttggtacgccggatgattccgaagcctgggaacgtgtccagcgcgggtcatctgccggggatgatctgtggatcatgctaaaccgagggttgccgggggaagtgaccaccgaagatggcctgcgcagtgacgtcagcgcggaaaccgggatgcgtgccgcctatcaaaaatggaaagagtacatgacagcagaaacacgggggcagcaatga

SEQ ID NO: 267645 - DNA, 480 bp, Klebsiella pneumoniae
atgaccgagcaacaggctttattttccgccatcagttttatcaattatgaagctgatgtgctggatcaggaagagttcaaccactggctgacgctgtggaaaccggaagggttgtatgtcatccctatcgatcagaaaacggaagatttcgctaacacgctcaactatgcctacgacaaccagcatatgcgggaaaaaagggttaaccggctttacagcggggaatcgatatccactacgccacgcgccagaaccattcgcatgctggcacgttaccgcctgctgcatgccagcgaggaacgggtagaaatccgctgtgcgcaatcgttgtgggaataccgcaagggtaatgcccagcattatgtcgccgatgtcacctatacattggtgccagagggcgaaagctttctgatcctgaagaaagtgattcgggtgatcaatggacaggatttcctgcgcagcattggctacatcatgtga

SEQ ID NO: 267646 - DNA, 741 bp, Klebsiella pneumoniae
atgaaaaatgttgccctggtgacaggtgctgcttccgggcttggggcggtgataagtcgctatttgtggtctcaggggtacgcggttgtgctggcggatatttcactatcaagtgcacaacaaatggcccgtgagatcgatgttaaaggtcagcgcacggtgggtgtacagctggatatccgtgacagtgatgcattttcccatgctattgaccattgcgtggcgcactttggcggactgcatgtgctggtcaacaatgcggcgttgacacttgctacgccagtcatgtcaatcacggtggaagagtttgatcaggtgatgaccacgaatttgcgcggcacctttcttggttgtcagctggcagggggttatttcgccacacagcaatatggtcgcattatcaatctggcctcactggcgggacagaatggcggcacggcctctggcgcacattatgcggcttccaaagggggaattctgacactcaccaaagtgtttgcacgggcgctaagtcacgatggcgttacggtgaatgccattgcaccggggccaatgaatctcccttcggttcatgcaatggtcccggacgataagatgcaggcgctgcttcagatgatcccggttgagaaattaggggaaccagaatttgtcgcgcaggcggttgccctgttggcctcacccgctgcgggctttgttaccggagcgacctgggacattaatggcggaatttacatgcgctaa

SEQ ID NO: 267647 - DNA, 975 bp, Klebsiella pneumoniae
atgtcagaaatattaagagtacgcgtcagcgaacgtgatgtgcagggagccgaggtggtcgtgctgtcgcttcaggcgattgatgggactaatttaccggcttttaacgcaggtgcccatatcgatttgcatcttgccgacggacttattcgccagtattcattgtgcagcagcccgcaggaacgtcattactatcgtcttggtatccttaaagatccagcttcgcgcggtggctcgctggctgcacaccaattacagattggtgatgaagtaaccatcggtgcgccacgcaacctttttgctctggacatgagtgctgaacataccttgttgtttggcggtggtattggggtgacaccgatgctagctatggcagatgaactgtaccgggcagggaagtcattcgaattgcactactgtggccgtgcgcgcgagcgtctggccttcctcagtgaactcgccacctgttgctgggcgcaggcagtgcatatccatgcggatgacgaaggtgaagaacaaaagttgaatctcagcgccgtattgccccgtcatcatattgatgggcaagtgtatgtttgtggcccggaaggttttatggattgggtcatcacctcggcacagcgagcaggttatgccgatgaacgtattcacagggaatatttcaatcgcgaactcgccatcagtggtaaagcctttgaagtggaagtgcctgagctggatctcactgtcaccgtcagtgagaaagagtcaattgtcgctgcattggcgcgagcaggtatcaaagtaaaggtttcctgcgaacagggggtatgtgggacttgtctggccaatgtcgccagtggcatcccggagcatcgggatgaatatctcaccgaagaagaacgtttggataacgatcagattctgctctgctgttcacgttcgaagagtgagcgtctggtaatcgaaaactttgaattcgtgaaactaaaatag

SEQ ID NO: 267648 - DNA, 489 bp, Klebsiella pneumoniae
atgaatcttatgaccgactttcgtaatgcgatggcgcagctgggaagtgctatcacgattattaccaccgatggccctggtggaaaatatggctttaccgcctctgcagtttgtagtgtaacggatgaacctccgacattattaatttgtatgaatcgttcatcctttgccaacagcaaatttaaagagaatggtgtgctgtgtgtcaatattctatcggcacagcatcgtgaattgtctggggtgtttgccaatggcaaattgcgttcggatgagcgttttcttcatgataactggcagactctgaccactggcgcaccggtgctgacgtcggcaatcgccagctttgattgtacaattggtgactgtcatgaggtcggcagccacagtattttttattgcccggtacaagacatcggttttggtcagggggagcagggattagtttattttaatcgtcagtatcatacgctggctgccagcctataa

SEQ ID NO: 267649 - DNA, 1320 bp, Klebsiella pneumoniae
atgagcaatgacgttaccaacggtgatttcagccgaaaaaatatgcgcaagttaattattggttctttccttgggaactcactggaatggtatgatttttttctttatggtactgccgctgcattagtttttgggtcattattctttccggttcaggacgatccgctcatcagcacattgctggcattttctggctttgccgtaggttttattgccagacccttaggtggcattttattcggtcatattggtgataaatatagccggaaaacaaccctgattattaccctgaccctaatgggggcttccacatttctcattggattactcccgacctggcaccaggttggcgtactggcaccgattgccttgattagcctgcgctttttgcagggcgttgcatccggcggcgaatggggaggaggggtgttgatgttgagtgagaacgcgccggaagagaaaaaaggctactataccgcatggagccaggtgggtgtttcgggtggttttgtcctctcggcgttggctttctggctggttcagctgctaccggaaaacgcgttcatgacgtggggctggcggatcccatttctgatgagtgtgttcatttttctggttggtatttatattcgaaaaaacatacgcgagaataaagaatttacgcagctgaaacaggccagtgatacagaaccggaagcaaacgtacctgtaattgagatttttaaaaaatatcccaaacaacttctccaggccattggtctgcgtttgccggaaaacggcgcagtctatatatttttcaccttttcagtggtgttctgtaagcacgttggtatcgccagcgacaaaattatcgcggttgtgacattggcaatgatgctggagattttctctatactgttctggggatggttatccgatagaatcgggcgtaaaactatttattatattggtgtcattggtcttcttctcaccgcctttcctttcttttcattattggccagcgggaacttttcattgatgatgctggcaatgatgctcggcttaccactgtgccatggtgcgatgatcgcagcacaaccctgcatcatgagtgagctgtttccggtggaagttcgttataccggtctggctctgggacacgaaatcggcgcggtaatttctggcggtatcagcccaatgattgccgtggcattgttattaaaatatgaccattggtggccaatttcagtaatgctgctgggctttgcgctggtagcccttatcgcattgctaagtattaaagtttcacctcgtgctttatcttcacgcacagcttcatga

SEQ ID NO: 267650 - DNA, 1635 bp, Klebsiella pneumoniae
atgtcgaactggcaaaccaggattacattattaccttttattttgatgtgttccgaaccggtatgggcgcaatcattatccgtggagcaacgactgagcctgcttgaacaaaatgcaaaaaatacggagggtaaattacaaactaccgaagataaactccaaaaagcattacatgaactcgccatttataaaaagaaagagaagaaaacgaaccacgttactgcggcaaatcccgcgctgctaaacccggccgtggatacccatgcacaggttgctcgtccaattgataagattcagcaacagaaagcagaggcaaaaccaaagaccaaaaacagtacccggcgaccagcagatatgaatatcaaagaactgtcgaaagccatcgaagacgaaattggtttttcatttcacggctatttccgatccggttgggggactgccagcaatggcagcccgcagagctgggccattggttctctggggcgttttggcaacgaacacggcagttggtatgacttactgtttagtcagaaattatatgaccaggatgggcgaacagcaaaagctattgtgttgatggatggtaacgttggtgaaacttatgtcaaagaacccttcgattcaaccagtgaaaacatgatgcagttttcagatatttatgtgacaacaaaaggatttatcagcgctattcccgatgcaactttctgggtaggacgccacaaattacgcgctcaggaatttaagatgctggacttctcttaccacaaaggcgcaatcgcttctggtgtagggatcgaagatattccactgggtaaagggacactggcaattggtttgggtcgggaagacttagataattattccaaagatcgcaccaccacccaggcggtaaacaccaacagtcttgatgttcgccttcggaaatttccactaacaacgaatacgacctgggatctgtatggtcgctatgcgatggcgaataaaagcgacggacagagttcatcacaaaatgacggtgaatattataagatgaaggatgcatggcttctgaccggtatcatcaataataaactctctcgtgacggattcactgaatatagtatgcaggtggctaacaactccttcgccagtagtttcgctaaaatctatgatgcgtcatctaattttggtactggacgttattattatggcgatcataccaatggtattgcctggcgtttcggtgaacagggagagttttaccctgtcgataatgttatcgttgcacatactttattattctccggtggtaatgacgtctacagttatgaaaccggtgcacataccgatttcaaaagtgttcgggcggtagttcgccccgcgtacattttcaataagtacaaccagacaggtatcgagttaggttattttaaccagcaaaacaataataatggtttaaaaacccacgagtcaggggttaaaaccactctttaccacgcattaaaattaggaagcagtgcgtttaactcgaagtttgaaatacgattctacggcacgtggttaaaagtactggataacggtattgatgaatttaccttcacagatgaaaagaaagatcaatttagcgtgggcgtgcagacggaactgttctggtaa

SEQ ID NO: 267651 - DNA, 1464 bp, Klebsiella pneumoniae
gtgaaaacaggatttgatgtagattttttatttggtggcgctatttcagctgcacaagccgatgggggttatgcgcaggatggtaaagggttagatacgcagaacattcgctattttaaccccaactggaatcgtgcggaacgtgatcataatcgtaatattaatatgacgtccgaacgtttcaatgccgctttacacaacattgaagcggtcaactatccgttcacacggggtattgatttttataatcgctattctgatgaccttgcattgatggaagagatgggaatgaagattttccgcacttctattgactggtcacgcatttttcctaacggagatgatgaacacccaaatccacagggaattaagttctatatcgatctgtttgatgaatgtcacaaacggggaatgaaagtcttcgccaccatgctccattacaatattccggtaaatctggtgacagaatatggtggctggaaaaaccgcatactggtcgacttctacctgcgctatgccagggttttattcgaaaaactgggtgatcgggtagatttttggttaccgttcaatgagatcaatgcgggaaaattcaatccttataatggtgtctgtgtcatcaaagaccaggaagatcattatgaatccgcgatcttccagtgtctacaccatcagtttattgctaacgcgctcactattaaactggctcgggaaattctgccgcaagcgcggatcggcgggatgatcgcccgctttaccacttatccggcaacctgtaagcctgaagatgtattggaaacaatgcacaaagaacaatacgcaaactatttctacaccgatgttatggtccgtggagaatatccggcatatatgcagcgctacttcaacgacaacggaatcaggatccacaaagaatcggatgatgatgaaattctccgcaacaatactgtcaatttcctgagtttttcttactatatgtcgatggtagccacaacagacaaaacatgggaaaccacgggcgggaatctggtcagtggtaataaaaatccgtatctgaaagccagtgactgggggtggcaaattgatcccatcgggttacgtatcacgctaaaccaattttacgatcgttaccgtatcccactgtttatcgctgagaacggtattggtgccaccgatattctcgaaagtgatcatcgcattcacgacccttaccgcatcgaatacttacgtcagcatgttttgcaaatgaaagaagccgtcattgatggtgtagaacttcttggctacaccatgtgggggatcatagatattgtctcctgtggtacgattgaaatgtctaaacgttatggtgttatttatgttgatcttgatgatgagggtaaaggaagttatcagcgttacaaaaaagattctttctattggtatcaaaagtgcattgcatcacacggtgaagatttaacttaa

SEQ ID NO: 267652 - DNA, 1404 bp, Klebsiella pneumoniae
atgaattatcagcagctcgcaaaagatatcattgagagaattggtggtctgaataatgtcaaagatgtcacgcattgtgctacgcgtttacggtttacactcaatacaatggatccggtagataaaggaacggtttccgctctgcctggtgtgttgggggcagtagaaagtagtggtcaatttcaagtgatattaggacaacaggttggccatgttttctccgctattacgcttttaaaaaataacaagagtaacgccacacccgctgaagtaaggcaagatcctgcggacgtgcagaagatgaaaaaagagaatgttgtctcacaagctcttggcatcatctcggggatatttaccccgatcctgcctgcgatcagcggcgcagcaatgctgaaaacgctattgattatcctgaccatgaccggtctgatggaaaaaacctcccagacatgggtcgttcttaattttgcagcggatacaaccttctactttttaccgatcatgctggcgtacacctccgccatgaagtttggtatgaacccgtttgtcgccatgacacttggcgggatgttattgcaccccaccttcacagcaatggttgccactcgtagcccgcttagtttccttaatgttccggtttcactggttcattatggttccacggttatcccggtcattctgatggtatggatcgcttcatgggcggaaagcttgtcagaaagattgtcaccacgcgctattttgttctttatgaaaccctttctgactctgctgatcatggtgccactcgggttaaccattattgcgccctttggtgactttgtcggcaaaggtattggcgtcggcataacttatgttaatgaccattgtatctggctgttgccctttattatggcggtcttctcacccatttttatcatgaccggaatgcattatgccgtgaccatgccgataaccttccagtcgcttgccaccaatggctttgacatgatcggcgcaggcttcctggtgtcaaatattgctcagggggcggcggcactggcggcggcaagattcagcaaggacgcggattttcgtgctctggcgagtggtgccggatttaccgccctgctgggtatcactgaaccagccctttatggcgtgaatctgaagctgaaaaaacctttctacgcggtgctggttgccggtgctgtcggtggattatttgttgggattatgggggtcaaacgcatgactctggccccaacaggattaaccacccttcccgtgtttatcgaccccaataattcaatgaatattgtttttgcgataagcggggcggcgataagtttctgcgtagcttatttgctgaccgtggtcttgctacgcattgagtcaggtaataaaacaggagatgttaagtga

SEQ ID NO: 267653 - DNA, 999 bp, Klebsiella pneumoniae
atgcataaccaggatctcgacactcagctacggcagattaccgaaagtgagcgattttatctcaataatcccggcgaaatcagccctaagtataagaatataaataagaaaaatgtcaatggacagcaggtgtaccgtttcgaacatccacgtgtcagtcagacggagattgagataagtaaggattctcgcttcacttctgtgccgctgcatacccacaccaatgtcaatatgaactatatctattctggatcatgcacctatgtggttgacggtaaggaaattacgttaaatcagaatgatgtttgtatttttgatactgatgttattcgcagtaaaaagaccattggtgagaatgatattgtgataaatattagtcttagcaacagctttttctccaactattttcttagtcgcctaacccagcaaaatattctgaccggttttatactgactgccatttctgcgaccaggcagcatgataactatctcatcttcaacactcaaaatagtcaaaagatacgggagttatttatctttaccatggaggagtacggcagtgataatctctattcacgcgaactgattgactcatatctgtcaattattttcattgagttgttacgtatttttcatgccaataaaaacaaacaaactattcagctgtcaactgataaaacgggtgagataatcagcatcatcagctatatagagaagaactatctgacatgtagtctgactacgctggcagaaaaatttaactatcatcctaaatatctctctcatctgattaaagaaaaaaccgggaagtcattcaaagagattcagttactgcaaagaatgaaggtggcggctacctacctgactaactccgcttatccaatacatgagattgcagaaaaggtcggtttttataataaaaactccttctatgaaaagttccgggaacactttggtatgacgccgaaactgtatcgggatagcaaccatcatgggtag

SEQ ID NO: 267654 - DNA, 1431 bp, Klebsiella pneumoniae
atgagcttactttataatgttaaatgggtttctctctctcaagttatacgtgttttatgccaagtattagcaatggtctttttttctcgatatcttactcctattgaaattggcatcatggcaatgactgttattgttgttaattttgttaatgtgttacgagatatgggatcttccgctgcgattatacagaaagataacgttacagatgagctaatatgtagcgttttttatctgaatttattaatgggggctggtttatttttcttggtttatttttgttcaggtttgattgctgctttcttcaaggagcctcttgttagctcaaccttaagtctggtagctatagccttccctataaatagtgtgactagtgttcatttggcattgctagagagagattcgaaatttaataaaattgcagccgtagaaatcttttcatctcttctgtcgttatcaatagctgtgttatatgcaatgaatggtggcggggtctatagccttgttttgcagacacttttatattcggtgttaagttcacttggcttttggttttattcaaaatggttgcctaaattcaagtttagtcttattgatataaaatcaattttttcatttagctctaatctaatagggtttaatataataaattatttttctaggaatagtgatcaaattataataggacgttttttctctgctgatctcttaggtcagtactctctagcttatcgcataatgttgtttccagttcaaaatattacatttgttctgacacgttctctttatcctttacttagcagattgcaaaatgatcctaaagaagcatataagatatatttaaaaacactccgggctatttcatttataataccgccgttaatgttgggggtttgtgctgttagcgatgagtttgttttatttgtttttggtaataagtgggctcagatttcaggtatattagtatggcttgctcctgttgcgatcatgcagtcgttagttagtacaacaggcgctgtctttatgtctcatgcaaaaacaaatgttttgttaagaatttcaatatataacgcatttttgcaaattagcgctttcttgataggtgctttttatagtctgaaagtacttgttttattgtattgtgttgcaaatgttttaatgtttgtacctaatatgtatttggctttttcggtaataggtggacgctttgttgagttattccaaactatctggaagccacttttttcagcatttgtaatgtattctgtcttgcgttatttttctgaggattttgtttctcataatgttttggttttatcattgataatgaaaattataatgggcatattggtttatttcttttgcgttttagtccttgagcttaaaacgttattgaaatttctatcgagacaaaaaagcctttcaaattaa

SEQ ID NO: 267655 - DNA, 819 bp, Klebsiella pneumoniae
atggttattgtgaatttaacgacaacatctgagcgtttagagctttgttccgctaccgtttggtccttgatccatcaaagttgtctgcctgataaaatttttttatggatatctagagatgcttatatggcagacaaaggcatatttgctatcccgagctgggttgatgagataaatagtctgtatgatattcttaatataaaatacactgataataccgggccttatcgaaaaatatttcctatgttaaaggaggcttctgataaagatgttctggtctatgctgatgatgatgttatttattcttccaattggctggagcttttgttgacttctttttatgcctcggaagaaaaatatgcagtagcatctagaataaggcttatgaacagaaatctctttggttactatcaaagctacaatagatatcctttagctaatatttgtagtgtttatagtgatgatttcattattactggtgtcggggggtgtgtaattaaaaagaaaatgataaatgataagtttattaacgatatttcttatcttgaggttgcccccaaaacagatgatctatggataagtaagattttgaggttgtcgggtactgctgttaagagttgtcctcaagcactgtgttgtgttcaagaaatccagcactcaagttactcgctaaatcatgaaaatacgagtaaattttcaggtggcatttttttacgtttaatgtacaaattcaagttggctgtttttggatatgttgggattagtctttcgaataatgataagacacaaaaaaacattgatcgctattttaaaatataa

SEQ ID NO: 267656 - DNA, 264 bp, Klebsiella pneumoniae
atgcatttatcaggtgaatttatcttcgcgcccatggatggcagcgccccggtcagctacagcaatgccgtagcagttatcactgaatcgccgtccattttcgtcaacggtctttataaatcggttgtggcgttttatttggacggagccaaatcgaccgtcattttctcaacagatttattttctgaggatggcacggaggagacggcgttagacgctgccaaagcgcaatatgcgcggaacatggtcttaaaccgcgaataa

SEQ ID NO: 267657 - DNA, 678 bp, Klebsiella pneumoniae
  misc_feature (20)..(29): n is a, c, g, or t
  misc_feature (410)..(419): n is a, c, g, or t
atgtggcccgcgccctgttnnnnnnnnnntttacgactgggtgcggtctatctgccagtggatccggtgctaccgccacagcgtcgccagcttttgctgacggtgggcgaggtgcgggtacaagtaacgcagccgggtctcacgcaattggagccgtcgctgcccgtgctgatcatcgacgacggaatgctggacacgcctgctgcgccgttgcctgaagtggctggggatgtcacggatctggcctatatcattttcacttccggctccaccggtaccccgaaaggagtgatgatcgaccaccgtgcggccatgaacacgctggaagacatcaacgaacgctttggcctcaatgcgcaggatagggtgttcgggctgtcatcattgagctttgacctgtcggtttacgnnnnnnnnnnacgatgcctttgcgccttttatggtgggtgcagcgctggtactgccggaagcaggacgggaaaaagatccgcgtcattggcagacagttatggtacacggtcatgtaagcgtctggaatgcagtgcccgcactgatgcagatgctgtgcgaataccacagcggcgatcggatgagttatccgacgttgcgtctggcactgttgagcggcgactggatcccgctaacgttaccggagcagatgcgcgagcggctcaatga

SEQ ID NO: 267658 - DNA, 342 bp, Klebsiella pneumoniae
atgagaattaacaagatcctctggccgtcaattgcgctcttggcagggttgaatagtcaagtatcagtagccaaatcctacgacgataacgacgagaccttggtggtggtagccaccgcagagcaagtactaaaacagcagcctggcgtgtcgattattaccagcgaagatattaaaaagacccctccggtcaacgacctctccgatattattcgcaaaatgccaggtgtcaatctgaccggcaatagcgcctcgggtacacgcggtaataaccgccagatcgatattcgcggtatggggcctgtctcttatacacatctgacgctgccgacgaaggcttag

SEQ ID NO: 267659 - DNA, 231 bp, Klebsiella pneumoniae
atgtatggttttcgctttacctaccaggaatgtaccttctgtaacgtacgtgccatacagcgggtcatcttccggatactctacctgaccagttacgtatacgaagaaggggtactgcctttccctatgacggacaataaatcgttcgcgttttgccatagcctctttctggtaataacgcagcggctgaaccgaccatggcacgatttgcttccaccagtctggggctaa

SEQ ID NO: 267660 - DNA, 675 bp, Klebsiella pneumoniae
atgccaccagcgccctctgaagcggttaaacaggcgttgctgaaagccgtgggtactgggcatggcaaactgccagccgccgcccgggacgtccgccccatcatcgtcagtattaaaaatatgtgcgcctccgcctgttattacgcagcctcaccggctgatgcgatctatgcggatcccaacgccatcattggcagtattggcgtacgtatggaccactgggatgtgtccaggatcatggaccgtcttggtgtggctaacgaaccgttgacggccggagcctggaaggcctcacttgacccctggcgtccgattgatgacgaaaccaaggcctttctgcatagtgagttactcaacaaaatgcatgaccagtttatcaatgatgtcgaagccggtcgtaaaggaaagttactttcgcgtgaacaggcggacaaagaacagctctacacggggcgtttctggctgggggaccgtgcgaagcagtttggccttatcgatgatacagccaccagcacagaggtgcgtgaacgcctgagtattgtctacggcaccacgcgttttcgcgactacaacgcgccaaaagcatcgttaagcagcatgttaggattgtcactggacgtgaaccttaaagaggctttatccagtgcgcttcacaccaccagcacagtgaggtag

SEQ ID NO: 267661 - DNA, 276 bp, Klebsiella pneumoniae
atgcatggcgtttcctgccagctcagactgccgcagcatcagttgataaacaaatggcaccacgacaaaaccgcccccaaaaccaaagagcaccgtggtgataccggtagtaaagcctgccagtgcaataattgcgatatcgttcaagagaatatccccgacctgaaaatgagcgagcagcttataccggtagcatcctgcttcccatttgcgcagcgctcaattacctttgtaaatcgttcagacggagaccggtgtgcgcaacgtaaaaattga

SEQ ID NO: 267662 - DNA, 267 bp, Klebsiella pneumoniae
atgaatatcgtatttctgggtattgatctggctaaaaatgtttttcagctctgcgggttaaaccaggccggcaaaccggtttatacgaaacgaactggccgaaaagaattgctccagacgctggcaaatattcctgcatgtctgattgggatcgaagcgtccaccggggcattttactggcagcgtgagtttgagaaactggggcacaaagtaaaggtcatcagtcctcagtatgtaaaactctttgtccgcgggcaaaaaaaatga

SEQ ID NO: 267663 - DNA, 294 bp, Klebsiella pneumoniae
atgctgacccaaacgcgcagtgcgcaactaatgtgcttcagcgcggcggaataccgcgaaacgctgcacccggccatgataaaccaaatcctgatggcgaagtatgtcgcttccaaagctgcggtggacgtggccgggaaggcggtgcaactgctcggtgcgaatggttgccatgccgattatgccgtcgaacgttactaccgcgacgccaaaatcatggaaatcatcgaagggacatcgcaaattcatgaaatccaaattgcgatgaattacatgatggggagtgaagcatga

SEQ ID NO: 267664 - DNA, 648 bp, Klebsiella pneumoniae
atggcgggaatacagcgtgaacaggcccagcagttcgtagaacgcctcccagccgtacggcaccacgaagtcctggccggtgatcagcaggtgcagacggggcgtggtgtaccaggcccccgggcgttctccggggggctggccgtcaatgcggatatcaaggcgcagggtgccggccccgatggtttccgttacggcagaaataaccgggcgcagctcctgcgccagagcggtggccttctgttctgtccagcccagcccgcgcaggaccagagggaatatggtcttcagccgcggcagggtgaaaatttcagacaggttagcgtcgggaatgtcagccagctcaaaacagtcgctctccagcggacgcaaaagatgctcggcatacatctgatccacgaccgggcgcagcgctgcccggaaccggtcaaactcttccatccagttttcgccggccaggcggaagatccccttcaggtagtggtcatccaccggacggtcatgctccacctgccaggccagcaggtcacgggtgatgtcgagcagcgtgcccagggccggcagggttgccagcctgttatgcccgcgcaggaaggcctccctggtatgaaccagcataaagcgcagctcgtcgcgggagagcactga

SEQ ID NO: 267665 - DNA, 318 bp, Klebsiella pneumoniae
atgaagcaccgcgacagcacgaagcttgatgaactgaacgctgtcggggatgagattgagcgcgttttttcgaccgaagggttttacatccaccgtaacagcaacaacattgcctggttaccctgcccggtagaaaaagggctggccgtttcatggttgctggagaaactgcgtcaggagcgcggggttttcccggtgatggggctgggtgacagcctgagcgaccatcggttcatgaaactctgcagctggtttggtcttccacgccagagtcagtttgccgaggccatttcacagcgtatttttggagagcaataa

SEQ ID NO: 267666 - DNA, 645 bp, Klebsiella pneumoniae
atgggttgtgatgtatcacatatatggggaatccctgcatgtaagatttcaaatggaatcgatctttccagcttaaagcttttgagatcttgtaaaccaaaatttcgtgatacaattaactttgttgcggtagcgaggttatctttctggcatgggcttgatcgtctcatacattcaattgcaaattatgaaggtgattatgaggtacagcttaaaattgttggtgcaggggaaccagagttaagtcggcttcaaaatattgttgcagaattaaagttggataacttaatttctttcactgggccacttcatggagataaacttattcaaatctatgaagaaagtgatattgccgttgactcattaggtcgccatagaacaggaacaaatcaaaatagttcgcttaaatcaaaagaatatacagcgttgggtttgccatttattaaaagtcacgatgatgtcgttttcgataatcagtttttttcattaactgtatctccggatgaaaacgatattaatattgaaaatgttatcaaatggtatgttgaattaccagttaatacaccttttttaatgcgtgagtttgctgtggaagaattatcttgggaaaaacaattgtcttaccttctgtcttttattaaataa

SEQ ID NO: 267667 - DNA, 246 bp, Klebsiella pneumoniae
atggtgggcttcgagatacagccacggagtgaacatcatatcttcgtagcgccgcccaacgtgaaaacgacgctgattaatgagctcgtggcgatagatacggctccagatatgccagtgggaacgacggaagatttcataaagcgcatcatggttaacttgtgtgatatcggtgcgttttacaagcgttggtacgctggaagttggagggtgctgggcaaaatagtgatactggaagtcgattaa

SEQ ID NO: 267668 - DNA, 426 bp, Klebsiella pneumoniae
  misc_feature (145)..(154): n is a, c, g, or t
atgcctgcaatgcattttgtggtgtgctggcctgacggcagcaaagaaacctgttattcgccatcaacggcgattgagaaatacctgttggttaaccatccctacgcgctgaacgagtttgtgcaggtgaccacgcgcgcgctgnnnnnnnnnncaggatcaatcggcggcgattgtgcaaaaggcggcgcagttcagcccggagcagagagttacggtagaaaaaatcacccccattacagcctgacgttaaccgagaaaacgatgaatacaaactcctatcctgtcgtcattattggcggcggtcaagccggtcttgccatgagctggagcctgacgcaaaaaacatccgtcatattgtgctggaacgccatcgtctggcctgggcctggcgggagcagcgctgggataacttctgcctggtga

SEQ ID NO: 267669 - DNA, 609 bp, Klebsiella pneumoniae
atgcttattgtattgatttttttattttctcagtttttggcaagcaaaccaaaactcatttacgcattatcaatcatcactacctcattacttcttgtttcttattttatcaatttcgattttatcaacatgctcattggtaaaatgagcttcatttcatctcttggcggtggtattggcaatgttgatataaatagtaaatttggcgcataccttggtggcgatgtggaaggtgctttattttacgatggtaatatttttaggcgtatctactcttcgttagagttaatatatttttcagtgatatcgttcttttttatgtgggtttttcggaaaaagaatatagtaccttcagtatctttttaccagttatatactctacaattaggcatcgtactttattctactttgctaatttccatggtgtggtttattagaaatttttattggtgtgctcttttaaatccaattgttttatatgaagcaatagcgagttatgattccaccgtaaaaagaagatacatagtatcgctttgctactctatatttatattactatatttatctctttggttttggcggcatcccttggttatcggttcttattaa

SEQ ID NO: 267670 - DNA, 288 bp, Klebsiella pneumoniae
ttgctggatgagtttaagcgcctcggcgccatccttcgcttcatcagcagcgtagcccaaggtatcgagctggcggcgaagcagctggcggttggcggggagatcctcggcaatgagaatacgaattgcctgcggaactgccttaacgttcccaggcagggtatcaacgttcaaaccaagcaaagactgagcggtggcatacgccagtttaaggcactgctgatcttcttctgctgtttgtcggcgggggaagataagttcaagaaaccccaggatagcacttactga

SEQ ID NO: 267671 - DNA, 132 bp, Klebsiella pneumoniae
atggatttaaaactgactggaaaagtggctctggtaactggagcccatgccggaattggtttcagcatttgtgaagaattggccgtgaatggtgtgcatttagtcatggtgctgtctcttatacacatctga

SEQ ID NO: 267672 - DNA, 294 bp, Klebsiella pneumoniae; identical to SEQ ID NO: 11834

SEQ ID NO: 267673 - DNA, 255 bp, Klebsiella pneumoniae
atggcgagcgatcagcgcattcaccgcatgggtaaaatgcgtaacattaaagtgttctacgtcaaattcatggtagatgtgggtcgcgatcgaggtagcacccgtctgtcgtccaagccagtaggcgcgctgaacatccgtcaatgggaacggttgatgacgatgctcagggtcgtgcactatcacccagtcatcctgagacgcggcagcgtccgtgatagattgctgtgcaatacgcgcactcagtgcccgtag

SEQ ID NO: 267674 - DNA, 387 bp, Klebsiella pneumoniae
atgatgcgcgccggtggctggcagaaatcccgcatggagcagcaaatgcatgaatggttcggtcgcataccgaagttcatcatcaccctggctgccgactactgcgagcaatgcaacgatctggagttctgcgcactggttgagcatgagctttaccacatcgcccaggctaccgatgactatggcgcgccgaagttcaacaaagagaccggaatgccggtgctcaaacttcgcggccatgacgtcgaggagttcgtcggagtggtccggcgttacggcgctagcaaagacgtgcaggaaatggtggatgcggcgaacaggccggcggaggttgctcatatcgatgttgccagagcgtgtgggacgtgcatgctgaagttggcataa

SEQ ID NO: 267675 - DNA, 186 bp, Klebsiella pneumoniae
atgatgaacagcggcggcagcatggcggtaccggctgtgagattaatggcggtgttcatcatctgctgcacgctggcggaaccgaagccgttaacaatcaacatcagaaagacgaacaggaactgccaccaggcggcgcgtaccggcacgccgtgggcgttcagctcggtggttttctggccgtag

SEQ ID NO: 267676 - DNA, 336 bp, Klebsiella pneumoniae
atggatataggcggcaggaacatggttccgggccagaggcgcatgaaacagaacgggtttgccgaatcccagtttatagccgcttgccttgttgacaataatctcatcccccttaactgccacagtcgccgacatgcccagcggctgcgtgagtcgttccgcaatgacctctgtaaaggtttttcccgtcacattttcaatcaccgcgcccaacacatcataattggcggaggcatagctaaacttcgcacccggcgcaaacagcagattctcgttgcgcagttgctgtgccacagcgctcccaggcatagggttttccagccgagccagtgttga

SEQ ID NO: 267677 - DNA, 252 bp, Klebsiella pneumoniae
  misc_feature (16)..(25): n is a, c, g, or t
atgcagaccaaacacnnnnnnnnnncgatactctttctctgggcgcgttggcgcccgaactggcaaagtatcaacaagagccaccgcaaatggccagcggcgccgtcggcaaacatggctatttgcggctacgttttgccgatcgtggcgccaaaagcaccctccatgaaatggaaagaaaggtgccattgctggttcaaaaagccctctactgggatgaggaaatgccattcctgccctgcgtacccatga

SEQ ID NO: 267678 - DNA, 225 bp, Klebsiella pneumoniae
atgctgacgcagtgtgagcgaaaaatctttaagaatggcattcactggcagggtcttctgccaagggagtccggggtgactccggtagcgggaaatcctgtcgacctgaatgaaggagtcggatgccatctgcaggggaatactcatccggcgagcacctcacgggtgtgtgttaacaacgtctgttcagcggctcgcgcggcccgtaccaatttgcgggtgtaa

SEQ ID NO: 267679 - DNA, 297 bp, Klebsiella pneumoniae
atggcacgcagttctgccgggaggtgcaactccataaaatcccgggctatttccggctgcgtcaggaactgcctgaatgtcgcatcgtggggtgtaggcgtggtggttttctttttcatcggcccatgctctgaaaataacgttgtcataatatcacaggcaaaaaatgctaacattcgcgtggaggggactttctgtttcttccgggggggcagtgccggggtggttctgtccccctatcctcttccctggcataccattcacattaaagttacagacgtctctgaagacatttaa

SEQ ID NO: 267680 - DNA, 351 bp, Klebsiella pneumoniae
atggaacgtattattgaattttcggaactgggagaactcatagacgagccaatcagagtgtactcaagcggaatgctagctaagttaggtttttcggtcatcagtcaggttgaaccggatattttaattattgatgaagttctggcagtaggtgatatcgcttttcaggcaaaatgtattcagaccatcagagattttaagaaaagaggcgtgacaatattgtttgttagccacaatatgagtgacgttgaaaaaatctgcgacagagtcatttggatcgaaaatcataggctcagagaagtggggtctgcagagcgaatcattgaactgtacaagcaagcaatggcttaa

SEQ ID NO: 267681 - DNA, 318 bp, Klebsiella pneumoniae
atgttctacttcccgtgcatcttcttcgggcttttcttcggcatgggtcagcacagagcgcagaaaggcctccgtctcttcaacctgactcagtttctggtctttctgacggagggcttcaccctgctcagagagcagcctttccagctcagcgatgcgaatgaggtatttctgactcatgaccgtttttataatgcggtcatgagttttttacaacattgtcagtacattaaggtgggggattttcggggccagcttatagaggtgcattgtagtggatcacaaaatcaagacacctgcatagcctctttccattga

SEQ ID NO: 267682 - DNA, 204 bp, Klebsiella pneumoniae
gtgaacagagagcgcgttttctctaagccgcagctggagcgtcgggacatagtgattgaagaactgaacgtccagataggctattctggaacccttgtcccattcaggatcaacggtgtcgatgatcgccggttttttggcatgtcgggatgtgcctctctcgacactgttgaatatgccacagagtttttgacccagcagtag

SEQ ID NO: 267683 - DNA, 228 bp, Klebsiella pneumoniae
atgaatatgacgaaaaaaggcgacaagcatctgcggacactttttattcatggtgcccgcgctgtcgtcagagttgccacgaataaagatgatggccatatgaatcagtgggttaaccagttaaaggaacggcgcggatttaataaaacgaccgtggcggtcgctaacaaaaacgcgcgaataatctggtcgatgctgagaaatgagaccgaatatcaggtagtgtga

SEQ ID NO: 267684 - DNA, 222 bp, Klebsiella pneumoniae
atggtctttctcaccttctcttttcgccatatcggatgctttcccgtaaagttgattccaggaaacgcctatatagggtgcaaactcacggcgtatttcatagcgcagccggagccccagctctgtgtcagtcagtcccctgccgcgaccccgcgattcatcatcctgactgtagaaattcacctcataggatggctggagtatgagccggttagtcagtaa

SEQ ID NO: 267685 - DNA, 126 bp, Klebsiella pneumoniae
atggcctccggcagcgaagccgcgactctgcccgccaccgcgccgaggatggcggaacctaacagcaccggctcgcggctggcggtgctcacgacgctaacgccgcaggcgtcggccaacagctga

SEQ ID NO: 267686 - DNA, 201 bp, Klebsiella pneumoniae
atgttgtttggcaaacaggactgcctcttgctgagccagctcataattttcagtgcacatagtttactccaggcctgtttgtcgctgaatgagctccactattttattgacggtagcaatctgttctgttttcaactcactcacttccagctcaacctgaaaatttttttctataaacagtatgatttgcacagtaaataa

SEQ ID NO: 267687 - DNA, 225 bp, Klebsiella pneumoniae
gtgtgggaagtcgaactctttaattgtccggtatcccgcaggctcaaggtggcggaacaggcgctggttatcggcgcgtggctccagtacggtgcgctgcgtgcggggctcatccagcaacaggtaatgtgtcagccctcgcagccagctttgtacgtagtgggctccgcgccattgctgttcaccaaccagcagatgcaggccacggtcaaagggttgccatga

SEQ ID NO: 267688 - DNA, 213 bp, Klebsiella pneumoniae
atggctataacgttcacgccactgtcccgttggcagcataaaccaatcaccttgggcctcttctaccagaactttataataaccggcaaaacgggcctcaagaacagtatattcaccctgttgcctgagtttatcgcatgcgaactggcgcatggtttccagcaggcggaaacgggtctctggtacctgagtactgacctgaatcagggataa

SEQ ID NO: 267689 - DNA, 147 bp, Klebsiella pneumoniae
atgagagcctgtccgaccaaagcccggctggacttcatcggcgataaacagtccgccccgggcctgtacgcgggctaccgcctgagccagaaatcccggcggatcggcgaaaacgccgtcgctggaaaaaatggtatccaccagtag

SEQ ID NO: 267690 - DNA, 171 bp, Klebsiella pneumoniae
atgttctccttattgctgccagcagccaccacggattctggcgatatccagcagcagcgatttcatggcattactgacggcacagagttcgtttatcaccgactcatcccgcagaagtttatccggctgccgcagccattcatccaggcggatctgtattacggtgagtga

SEQ ID NO: 267691 - DNA, 285 bp, Klebsiella pneumoniae
atgatgaagcgcaatattctggcagtggtgatccctgccctgctggtagccggtgcagccaacgctgcagaaatctataacaaaaacggcaacaaactggacttctatggaaaaatggtcggcgagcacgtctggaccaccaatggcgacaccagcagcgacgataccacctatgcccgtatcggcctgaaaggcgaaactcagattaacgatcagctgatcggctacggtcagtgggaatacaacatgtcagtgggaatacaacatggacgcgtccaatgttga

SEQ ID NO: 267692 - DNA, 129 bp, Klebsiella pneumoniae; identical to SEQ ID NO: 244880

SEQ ID NO: 267693 - DNA, 330 bp, Klebsiella pneumoniae
atgttttttaataacgcgtcgaaaccaaaggaagagaaacaggaacgtctgcctgacccacgttttccgcatgccagcgaaccctggcgggaagaggaagggacgatgctgcttgatgccctagaatccgtaccggacgaagcggtgggcgttcatctgttctggctggccgaaaagctggggcgtaccccctgtagtgtggccagtaagatagcggctatccgggacatgccagaagagtggaaagatcagtaccgcaaggtttcggatgatattcgcaagtcagacctgagcatcaacggttatgttcagcataacgggctgaattaa

SEQ ID NO: 267694 - DNA, 195 bp, Klebsiella pneumoniae
atgaacaaaacagcacatgaagtacagacccgctggcttgagagcaggcagcctaatgagcgtaacggtaatgaagcggaaaaattttcggatgagtgttggaagaacggtctgcggctggataaaatcccgtctgtgcactatcaactcctgatagaaaccatccgctggacgctgatcccgcggcaaaagtga

SEQ ID NO: 267695 - DNA, 174 bp, Klebsiella pneumoniae
atgcctatcgaaaacgtcacaggctggttattcaggctgatcccggaacgcgtttttgacgcgttatccgggatcgtatgcgcagaaatggatggtattgtgcatgatcctctgccggaagagacagagcggaaggccacacgccccgcaacaggacagacgcggcgaaaatga

SEQ ID NO: 267696 - DNA, 996 bp, Klebsiella pneumoniae
atgtttccagtcggcattgacgtaagtaaaaacacccttgatctttgcatactgtatgacggtatcaaaggacgcataaaaacccgtaacatcccaaataacagacattcagttgaaaatattcttcgctggctcaggctccagcactgcggtcctgaggatgttcatgttgtgatggaagctaccggtgtttatcacgaacggctggccactgagttacatgatgccggtttccgggtttctctggccaaccctcaccgcagtcgggagtttgcacgcggcatgggaataatgacaaagacggataaggtggatgcgtatatgcttgcctgttacgcattccttaagaagccacaccactgggagccgccggcacccgaaatcagatatctcggtgcactcctgcgacggcgtgatgttctgctgggtgatgccctgcgtgaggagaacaggctggaaaaatacctgtcgacagacacacctgcagatattatcagttcctgcaggcgtatggcgcagcttctgcgcgaggaggtaagtaatatcgagcggcagattaaagcacatatcaaagccagccctgcactgaggcgtgattatacactgctgaactcaattaaatcggttggtccccagttggggatgcatatgctggtcgtgcttcgcagccataactttgcatcagctgagcaggctgccgcctttctgggcgtggtgccgatcgagaaacgctcaggcacatcggtccggagccgaccgcggatgtcgaaaatcggcccccctcagttgagagcgaagctttacatgtccgccctgtgcggaaaaatctacaataagcgaatgcgtaatatttacgatgagatgtgcctgcggggtaaacctaaaatggtagccattggcgcgctgatgcggaaactggtgcactggtgttatggcgtcctgaagaccggaaccgtttttaatgacgaaggtctgaaacaagtactgtcaacctga

SEQ ID NO: 267697 - DNA, 1764 bp, Klebsiella pneumoniae
atgagtgtggaaagtaaaagtgttcagaacttgttttctatgtacaagaatggggagtttatagttaaccgtcgatatcaaaggaaactggtgtggctaatggaagaaaaagaaaagttcattaattcactgctacacaactatccgatcccgatggtattaacatcaagattcatagatactgaatataacggatatgaaatacttgatggccttcaacgattgaacgccataacgtcatttatagaaaatgagttttctgtaggaggtaaatattttgatttggcatcaacagcacaaactcttgagcttctaaaaagtgggtcagttcagcaaaaaaaccccactcttagcatagaggaatgctctaacatcctgaactatccagtgcctatttctgtaactcaatacaagaatagtgaatttatagatgaaacctttagaaggattaatacaggaggaaggaagttatctaatcatgacattcgtcaggctggtgcccttggagaatttccaatgcttgtcagcgagttggcatcttttattagaagggataagtcaagaactaatttggttaacttatccaatataaaatcgataagcattagcaacaaaaaaatgaattatggtataaatattaatgatgtgttttgggttaagcacggaattataaatcatgagaatatcaggtgttcaagggatgaggagttggttgcttacatcactagttatgttctcgataaagataattcttccacgtcatccgtttaccttgataaggtatatgactctaattcaagtgcggctgcatcattaacaaccaagataaatgcttatgggaaagaagagttaacaaacagaataaaacacgtatttgaacagattggaaaaatattatctttggacttaaactctccttttaataaactctgttacaaaggaaaggctttaaattcctcaatgactttccagatagttttcctgtcattttatgatttaatagtaaatgagaatatggaggtgtcagactgtaaaaagatacatgattcactacgcaactgttatgacaccttgttcagtaaaactctggaagggcaaaacaagtggtcaaacaaggatagacaaactttgataaatgcgctgtccggacttcttgttaaaaacatgagaaaatctggggaggagaaattccctcacggtaaaaaagtagagagtttagaagggatactgaacgaatcatcagttgaacagacatattatgattttaaggccggattagttcaaacaagtccgcccaaaaattacatcaatcaagaaaccttcagcaaagtggttaaaactttaactgccatgataaacacttatgatcaagagtgttcggtgataataggagtggcggaatcaaaggaaggcgcagaaaatcacaaggcggcgtacggaaataattacatacaatatagtaatttctacattgtaggtattggtgatgaagctataaaaagtcataaatccatagatgcatatttaaataaaataatatttatgataaaaaatgaacctattagcgatgaaatgaaaaggcaattggttgataaaataaagccatttaactatcatggaaaggaagtgttaatactcaatgccgaaagaacaaagaaaccagaaagctacggaacatccttgtatattagagagggatcaagcttatcccctgtagaaataggaacgcctgagttttattccttacttgataaattcaaataa

SEQ ID NO: 267698 - DNA, 885 bp, Klebsiella pneumoniae
atgagtgaaccgatggtgatccgttttcaggaaatggcaatgaacagtgaaacgcctatagcctcgttgctgagaatggccaaagccatcgcggtgaaactggatctcaaagatgttgatgaatggatgactcatgagttgaacggctatcccagagacgcctccattcctgagtaccgaataattaggtgtgagctgaaagccatacatcctcatcacgggcttgtacaggcacctgtacctaactggcaacaggaacaaaagctgactacggttttcgtaagagaagcggcaggtgcacttgaagcaggagctgcagataaagcaacgctatccttccgccttcctactgaatatgcgcatcgtctgcagtcaaatcagcctgaatttctgcgttttgacttagtcaggattgctggttatcacaccatgctcaacattgttgaccaggtacgcaatcgcctgcacgaatggtcacttgaactcgaacagcagggaatacttggtgagcatctgcagttctcacagagagaaaaagaaagggcccccatgacaacgaacaacttcaatttcaacggtaatgtcagtaacgctggcgtgattggtgctgataaccatgcttttacgcagcagaatacactgcatattacagccggtgattttgacgcgcttaaggccaggctggagtcgctgggttttgcgccccaggacgtgcaggagctgaaaatggtgctggacagcgagccagcgccgaaagattctggccgagtgctgcccaaggtttatgcctggattggcaaggctggtgaacgtgtactggacgctggacttgataaggccgcaccgctggccattgaggctatcacgaaatatctcggggcctga

SEQ ID NO: 267699 - DNA, 123 bp, Klebsiella pneumoniae
atgaagaagcgtttttccgacgaacagatcatcaatatctccgcgaagccgaagctggggtacccgcccgtgaactatgccgcaagcatgccatttccgatgccacgtttacacctggcgtaa

SEQ ID NO: 267700 - DNA, 675 bp, Klebsiella pneumoniae
atgcacctgctaggcttccgcttcgcgccgcgcatccgcgacctcggcgaaaccaagctgtacgtgccgcagggcgtgcaagcctacccgacgttgcgcccgctgatcggcggcaccctgaacatcaagcacgtgcgtgcccactgggacgacatcctgcgcctggccagctcgatcaagcagggcaccgtcaccgcctcgctgatgctgcgcaagctcggcagctacccgcgccagaacggactggccgtagccctgcgcgagctgggccggatcgagcgcacgctgttcatcctggactggctgcaaagtgttgaactgcgccgccgcgtgcatgccggcctgaacaaaggtgaggcgcgcaactcgctggccagggcggtgttcttcaaccgccttggggaaatcagggatcggagcttcgagcagcagcgctaccgggccagcggcctcaacctggtgacggcggctatcgtgctgtggaacacggtgtacctggaacgcgccacccaggggttggtcgaggccggcaagccggtggacggcgagctgctgcaattcctgtcgccgctgggctgggagcacatcaacctaaccggcgattacgtctggcggcagagccgcagactggaagacgggaagtttcggcccttacggatgcccggaaaaccttag

SEQ ID NO: 267701 - DNA, 1092 bp, Klebsiella pneumoniae
atgaatagttggatttctatgctgcaagatgccgcagagatgtttttgtttttggccgtcgagctatctttgctgtttattgtcatcagtgccggtgtgagcctgataaggcaaaaggtcccggaccataaaatccagcaattgataggggcgaaaaaaggaaaaggctacctgctggcctcgttgttgggagccgttacccctttctgtagttgctcaacaattccaatgctacgagggttgttgtcggcgaaagcagggtttggtccgacactcacttttttgtttgtttcaccgttgcttaatcccattatcgtggggttaatgtgggttacctttggctggaaagtaactttgttgtacgcgatcatcgctgccggtgtctcagtccttgccagtatcgtattggatttactaggatttgaacgtcatattgttgatcacaaaaactcagcatcaagtggttgcaccacgaaatgcgatgattccgaagcttcggtaaaaacgtcggcgggttccagttgttgcagcactagctcgactcaattgcctttaaaaacgagttgctgtacttcatcagcgaaccccataattaacttaaggacggtaaagaacgagcagaacgtatcagcgtgttgttcatcaatatcatctgaacaaccagctgttagctgttgcagcagcgagaatctgggcaatgtgaatctcacaacgaataccacctctggcccaataaagttagctatgaaagatgccttacagcagtttaaggatgttctgccttatcttttgttaagtgtattaataggttcatttatttatggctttatcccttcagagtggattgcagctcatgccggagcagataatcccttagccataccgctgagtgcagttgttggtattccgttgtatatccgcgcagaggcagtgataccacttgcatcagtgctgatgactaaaggaatgggcctgggggcattaatggccttgataatcggtagtgctggagcgagtttgacagaagtaatactgcttaaatcaatgttcagaatgcctatgatagtcgcggtaatgactccaacttattga

SEQ ID NO: 267702 - DNA, 441 bp, Klebsiella pneumoniae; identical to SEQ ID NO: 7727

SEQ ID NO: 267703 - DNA, 1005 bp, Klebsiella pneumoniae; identical to SEQ ID NO: 31749

SEQ ID NO: 267704 - DNA, 270 bp, Klebsiella pneumoniae; identical to SEQ ID NO: 249713

SEQ ID NO: 267705 - DNA, 675 bp, Klebsiella pneumoniae; identical to SEQ ID NO: 267700

SEQ ID NO: 267706 - DNA, 960 bp, Klebsiella pneumoniae
atgaacacgcaacctgtcattgggatcagcggatgtttaaccggctcagccgtgcgattcgacggcgggcataagcgtatgggctttgtgatggatgagctcgcgcagtgggtggcgtttaagcccgtctgcccggagatggcgatcggcctgcccgtaccccgcccggcgctccgcctggtgcagactccggtcggggagatccgcatgcgcttcagccacgccccgcacgaggatgtgacggagaagatggccgattttgccaacgcccatctggcaacgctgggcgagctgtcgggctttatcgtctgcgccaaatcgccgagctgcgggatggagcgcgtgcggctgtatgacgaaaaaggcaatcgcgggcgtaaggaaggcgtggggctgtttaccggcgccctgatggcgcgctacccgtggctgccggtggaagaggatggccggctgcacgatccgctgctgcgggagaattttgtcgagcgcattttcgccctgcatgaactcaacgccctgcgcgcccgcggcctgacccgccacggcctgctggcctttcacagccgctacaagctgcagctgctggctcaccaccaggcgggctaccgcgagatcggcccgttcgtcgcctcgctgcatgaatgggaggatctggaggctttcttcgaggtctaccgtgagaagctgatggcgatcctcaagcggcccgtctcgcggaaaaaccacaccaacgtgctgatgcatattcagggttatttccgcgaccagctgaacagccgccagcgcggcgagctgcgggaggttatcctcaactatcgcgccgggctgctgccgatcctcgccccgctgacgctgcttaagcactatctggccgagtatccggatcgctacctgcaggcgcagaactattttgacccctatccgcaggatctggccctgcgcctgacggtgaactga

SEQ ID NO: 267707 - DNA, 660 bp, Klebsiella pneumoniae; identical to SEQ ID NO: 7726

SEQ ID NO: 267708 - DNA, 483 bp, Klebsiella pneumoniae; identical to SEQ ID NO: 212253

SEQ ID NO: 267709 - DNA, 2202 bp, Klebsiella pneumoniae
atggccgaacttaacccgcctttgggaacgacgacgcctgaaattttcctggataacgtcaagcgcgctgacgagctggttaacggtccggcaggtacggttaacgaccgcggcggtgaaccgctggatacgtggcgccagatgatggcgaaaaacgatgaggtcaggcagaacctgatcccgcttagtaaacagtatgcgacgctggcggcggcacaggcggacatcgctaatattccggtaggctctaccacgtattaccgtagccctgatgacagcgctcttgcggttgaggttattaacaacgccgggacgctgcagcctaccgggcggaaaatgccgtcacagaaaaccgttgatgatttacttaagcatgttgaaaccacaaacctaattttccagctcgttgacatcctcgggtatcgccagttttatgccctgacatcaggtgaattcgggactgcaaaaacgattattaaaccagatggcattgaactggagggctattctctgaccgtatctgatgacaatggaatatatatcgaaaatattctcggtcaacgcgtcgtattagttgatgaatatgggactgtggcaccaaggagtttgcgcgctgcgcgagatggttcgttcggcacagatgcggcaatggtatcaggcaatggccttaattttaactcaggtggctctcgaattgatattacaggtcctgagtttttaaaggtctctgattttcttggccggtctaaaacaattattgatgcgagcgggaatctggtcggcggcggtagcggtggtggtataacgctgcaggacagaattaacattctgaacgcggaaaacctgaactattacagtaaagttcgcagtcggtataacgctgacatagagcgactggtgttcactctgtcgatgatcatctggtacgggcagtctctttccaccaaccaggaaggttaccctgcgctcagcaaaacgccgtacagcaatctgggcaatctgatgctgggaaactcacctcgaccaaatacccggacaggggcaggattcaccccggtggggtcagccatcctcaacccgctaaaggccgtcgttcagtcaggtgacgggtcttatgtgatgagcgatgccgatgttgctgcactgcctgccgggtcgggtaatgagggtgaaggggccgttgctgcggttaacatgctgcgcacgctgtttcttcgtcaggtagcattgctaaccgacccttctcgcctgcttgttctggcaagttgtggagtcaacggtaggaccgttgaggcgctgtccaggggggccgatccggagctgtataatcgcattcgtgaagctgtgtctaaaataaaggccatcgcggatggcgaaagcaagacattcggcatcggtgctttctgtttcctgcagggagagtggaattacaaccctgggtacggcggggactatacgcgggagggctataaagcgaaggtgcgtcaactttatagcgatgtgattgccgatttttgcgcaggacagagaccgcctgcgatgttcacctatcagactggcggcacttacaccattgatacctatgagctggcgatcggcatggcgcagctggatatggcaacggagggtgggaacatctatggcgtctgcccatcgtatccattccccaataaggatagcgggcacctgaccagtaatggttatcgctggatggacatgtttttcggcaaggtcatgttcagggttctggttcttggtgagggatgggagccgttacactgcacaggcgttgaagttcaggatgattatgcactccttaactatgcagttccgtatccgccactgcagtgggggacaccatatgatgggcgaacagctaaaacgtatgctgataaagggtatcgggcgactgatgcaaatggagcgctggacgttactgctgcagagattgtcgccgacactgtggtaaaactgacattctccagacgtgtctccgggacaatcaaaatctggtacgcagataaaacatcacataacgggaatggctgcctcaaggacagcgatccattcctggcaactgaaaattacgtgtataccgcaggcagcggccaatatgcggacgaaaatattcctgaacttgtagacaaaccatacccgctggaaaactgggcatgggcacaaattatcgagacaactgtatag

SEQ ID NO: 267710 - DNA, 129 bp, Klebsiella pneumoniae
atgactaaagagtttgactatgctaccgtaagtaagcttttggctgaaatgcgcggatgtgtagagcgcgtacagaagctgcgccgcaactttgaagctcaaatcagtcattcacagaaagctgcttaa

SEQ ID NO: 267711 - DNA, 363 bp, Klebsiella pneumoniae
gtgacccaaaatgttcagccaatcaaccaacgcttgcatgatcaggctgttgatgaatttaatcgcctgcatggaacaatgattggcgaaattagcgcaatgttaaaaacggccaaagttgccccactggtagatcttaggaagaaagaccctacctttttaaacgttgtcgcagaattaagagttttcagagacgtatgctgcgctctggcaccgcattttgatgtggataaatctggcgaaatcgccgacatcgacaaattactgacactggctaacgacctggctcaagccatcgacgctgatgaccctgacgctttatgcgcagctatagcagccctcgatgtagagccttatatatga

SEQ ID NO: 267712 - DNA, 144 bp, Klebsiella pneumoniae
atgaatttaaccgaatcccaaaggtacgaagccgaaagcgtagccagagccaatctgccgccaatagcaaagcacagccagaccaaagctaatcagccaaagaatttcgttcgcatctatcagaccctgggagagacagcatga

SEQ ID NO: 267713 - DNA, 429 bp, Klebsiella pneumoniae
atgaagagttttttaaatggttttatcagtaacgctatatcctggtctctccttgccttgcttgtatacgcggcgtggacaggcagcgaggcgctatcaagaatctcagcagttgcttactggatgataatcatcctgatggtgttcatgtccgttatcgttacgtttgctgtgttcttaatcaagagggaagatagcccgcaaaagaagaatgcggcaatcgaaagcctcagggtggtattcaagcactcgggggtgttaagcaaaatagtgggatggtttcgtcttatcgcaatagtgatgctcctggcatattccggctgggtatttactgctgttagctatgcgctctgcgcgttattttctcgcttcattatctctgtagggcgtgatgagtacgagaaagtaacctccggtctgcaggcgtag

SEQ ID NO: 267714 - DNA, 507 bp, Klebsiella pneumoniae
atgaacctgagcgcaatgatttatcctgatacttttattattgagggagagattttcaaaggtaaaagaaactcccaaaagaaacaggtgttaattccatacactaatgaacccgaagtaattattggtcagcatattattcaaagtgtcggaaaaaatgagatcaagttgaaagtattagatatgaagatggttcaaggtggaacgctcaaaagaggtacaaaacatccaaatatgctcactctcagcattgaaaacatgacagaaaatgaacacaagtcacctactaaaagcagcacattccacattggctcgattaacggtgagcaggttcaagtaggtgaaagcaaccatatgcttgttaatatcagtattactgaactggttgagaaggttgctaaatctggagatccacaggctaaatccgtgttgaaacaattgctggaaaatagcactgttgccagcattgttggtgcaggtgcctcagcgttgttgaatttactgtaa

SEQ ID NO: 267715 - DNA, 189 bp, Klebsiella pneumoniae
atgcgtaaggtcaaatggtcagaaattgatattgaagacgagttgcgccggcttgaagcgatgctctccacctcgctgtatatgaatttagatgatgaaaaagagtgcagcattgtagtggatttaatcggcctgtcgttgacgtgcgttcgggaactgaaagcagccagtgaggtgagcaatgtctga

SEQ ID NO: 267716 - DNA, 189 bp, Klebsiella pneumoniae; identical to SEQ ID NO: 231064

SEQ ID NO: 267717 - DNA, 249 bp, Klebsiella pneumoniae
atggcgtattatgttggcagtacagaagattacctaatcaagaccactgaaccggaaggcagcgtctggcgaaaattattcaaccctgcgactgaatgcccagcgtcaggcatttaccgctgccgcaattgtggcgacgaagtgacctgcaataaaggtgatcctcttccccctcaaaatcacgcacagcataacccttcggcagggaacatccgttgggaactggtcgtgatgacgaaaacaaaataa

SEQ ID NO: 267718 - DNA, 1131 bp, Klebsiella pneumoniae
atgttaaagatatttgaggtttgcgggtttagaggttttgaagataacttcattttagatttgactcaaagaaagaactacgagtttaatgatgaggctgtaagtaacggtgttattaaaaccagcataatttacggtaaaaatggaacaggaaaaagcaatctaactcatgcaatatttgatcttgtttctcaattaagcgaagctgcaaagttagctagttttttttcaaaaaactatttaaacgcgaagaactcaaaaggagtggcatctttcaaatatcactttaagtttggtgaggatgaagtaatttattcttatgataagaaaagtgcaagaaagatagtgatggaatctctggatataaacggagtgaactacgtaaaaatagatagaagggttagtaatgttgcgaagattgaaataccgggaactgaaaacttaaataatgactttacagaagcggaagattcagtatctgtaatatcctatataaataacaatactatattccctgaagggcgagtaacgtccgcatttagaaaatttacggcttatgttaaagggatgttgttttttagatcgttacttgaaggtaattcttacataggggttgaagcgacaggaaagaaaatatgcgaggatatacttgagcacaataacatagaggaatttgagaattttttaaatgcaaatggtgtagagtgtaagcttaaagaaattaatgggcagaatgggaaggatattgctttcgatttcgatggaataactattcctttctatgagattgcatcaacaggaactaagtctttggggctttttttcttttggatgcagaggatggagcagatttcccttatatgtattgatgagtttgatgcattctatcatcatgaattatcagaagctttagtaagaatccttaaagagagtcctgcgcaagttatattgacaactcataataccagtgtaatgagtaatgatatattaagacctgattgctattttgttatggatcataggaatgttaaggccctcccttatctaacagataaagaaattagagttgcacataatttagagaagatttacaaggccggtggttttaaaaagaaagaagagaaatcataa

SEQ ID NO: 267719 - DNA, 732 bp, Klebsiella pneumoniae
atggctgaaaaaatactttttgttttcgaaggagaaaagacagagcatgtcttaacaaagaaccttattggaaactatatccaaagtgaggataacgcggttgtcaaagtttcattttgcggagaaatatatcagctttataggaaaatgattgcagatgattttggtatagagtatgtcgatgtttttccttttcttcaagagcgagataaaaacctctctcagtatgaaagaaaggatttttcacaaatatatctattttttgattatgatccacacgcaactgatgcgaatgcagagaatttgatgagtatgttgagtgtttttaatcaggaaactgaaaagggaaagttatttattagttatccaatggttgagtctctacgttgcttcaacggaaataagcaagatttttttgatcttaaagtattactgagtgatgtgtcctcttttaagtcgtacgtacaaggatatgctcataaggtctacaatgatgtgcctaagtggagtaaaggtttatggaaagaggttattgagcttcactgtgaaaaggctgagcgtttaattagaaatgagctttgttacccagaaagtgtcatcgatcaggattctattttaaccaaacaggttgaaatagaatctcagcataatgctgtcattgtcttaaatgcattccctttgatgctatggtatcacttcggtataaaattacctgatctattaatgcgttaa

SEQ ID NO: 267720 - DNA, 360 bp, Klebsiella pneumoniae
atgcgtgatctgatccttcaactcagcaaaagttcgatttattcaacaaagcccagcgccaacgtactgccattttgcgctccggcccacacggtcattcttaacgtgccgccagttacgggacagctgcaattgctgatagggcagtgtcctgagttcaaatacaaagagcccgaataccatcatcatagttattactccaaattaatcgttatcccggaacgaaccccgggcagcgcgttgctgtttgtcaatttccgcgcggacagcctcaccaacaagtcgcgccagttcgcgcggattgctgctctgaatgccatgcagatggatgtgaatatcaccggaaaagctattatctga

SEQ ID NO: 267721 - DNA, 405 bp, Klebsiella pneumoniae
atgcgctggaggcgacggcgaaaaaatgatatcaccgtgaccagcgtggaagggcgagtggaaatcacggcggcggaggaactggtggtgaattgtgcgggagcgtatatcaggctaagtggtggcaatatcgagctgggctgccctgggaatattctgctgaaatcggccaatgtgcagaaaatgggcgcagctgattatgatgcaaacaaacctgagcttcccgtcggtttcagtgagttttttactgcaaaagatgaagagtccggggagattttaccttttacccggtacaggataacaaccggtgaaggtaaagtatttgaaggcaggaccgatgcggaaggtaaaactgttgcagtttatactgccctgcctgatgccctgcatatagaattactttaa

SEQ ID NO: 267722 - DNA, 309 bp, Klebsiella pneumoniae; identical to SEQ ID NO: 39571

SEQ ID NO: 267723 - DNA, 288 bp, Klebsiella pneumoniae; identical to SEQ ID NO: 182627

SEQ ID NO: 267724 - DNA, 633 bp, Klebsiella pneumoniae
atgggtatgcgtaaaccagcacgtcgtaaatgtgcccactgccgcgaatggttccatcctacccgggaagggcaggtggtatgcagttttgaatgcgccagcgcgatcggcaaaaaacaggcggcaaaagcccgagaagctgcaaagaaaaaggcgctacagcgtcagcgcgaatcggagaaagagggccgtcaacgccgccgggataagcgtattgagttgaaaacaaaatcgcaatggcgcagcgaagcacagacagcgtttaacaaatacgtacgtctgcgcgacgccgggaagccctgcattagctgtgggcgactgccagagcagaagttgggcggaactatggattgtggacactaccgcacccggggcgccgctcgtcacctgtcgttcaatctgcataacacggcagcgcaatgcgtctattgcaaccgtgaccgggctggcgcgcaaaaggcattcgagcaggggcttattcagagaatcggtccggaggccgtcgaggcgctgaacaacgacaacaccatccgtaatttcgatatcccatacctgcagcgcatcaaatccatattcacccgcagagcccgcgcgctggagaagcgccgcgcccgccatcaggaggcagcatga

SEQ ID NO: 267725 - DNA, 489 bp, Klebsiella pneumoniae
atgactgccgaagccattctggctctggtgaaaaggttctggttgccggtgctggttggtttgctcggtggcgcactggccatcgctgccagccattacaaggaaaaggctgagcacgaagcaacccgtgccgataacgcagagctcaacctgaagctggcgaacgccaccatcaccgacatgacaacccgccagcgtgacgtcgctgcgctggatgccaaatacacgaaggaattagccgatgcaaaagctgaaaatgatgctctgcagcgcaagcttgataatggtggtcgggtgctcgtcaaaggcaagtgtccagtgtcagccgcaacccaaaccgccggcgccgccagcatgggcgatgatgccaccgtcgaactctctgcagttgctggacgaaacgttctcggtatccggtccggaatcgtcagcgaccaaacagccttgaaggcgctgcaggaatacatcaccacgcagtgcctgaagtaa

SEQ ID NO: 267726 - DNA, 768 bp, Klebsiella pneumoniae
atgagcaatatcgatgaactgaaattgcttcaaaagcaatctttagcagccgctagactcagaggagaaaagcactatcgtggttatgctccatgcaagcatgggcatgtttctgaccgactggtatcaacccagcaatgctgcaagtgcctcgaattaagaaagcgtggcatgcgtaaatcagatgggattcctcagtctaaatcatcaagagtgaagaagaatacagctatcaacctggggaaaacacactatttcacaggagttccatgtaagcgtgggcacattgccccgaggttagtgtcgacaaggcaatgtactgaatgcctgtccctacgtgatcgcaacgattccccgcagatattaagtgacgccgcgaaaaacagactaaacgcagctaggcgtagtcgagttgggcgagccaagaacagggcatactacagcaacgttttaagacacgatccttgctttaagctccgccgtaaggcttatgacgaaatcaataatgctctcgcctggaacagcggaaaggtgaaaatggcgattggctacacctctgatgaactgcgcgagtgtattcagtctcaattccagccaggtatgacatggagcaataggggcgaatgggagattgaccaccgtaagcccatatcagcttttatagctgaaggggtgaccgatctaatggtcattaatgcgctggataatctccagcccctctggaaagaggaaaatgccttcaagggcagtaaatacataccagactaa

SEQ ID NO: 267727 - DNA, 810 bp, Klebsiella pneumoniae
atgggtgcagtaattattgggaaaaatgtaaatgctcagtctttttcaatgggcattaatgttcctgttatggatggcctgctgggagtatggtttggcggttctaaggggttgtgggttaaccaagttgctggggggacgccgtcgacgttagtgggaaatccggtacatgtgacggagtacagctcgcggatggacatcaacaactacgttgatacgaatattcgcgaaaccgcaaacatgacccaactggtcatttcaaaaatttacgcgccgactactgcaggagtcaggcttccgttatttaccaacttcaataacgtgataaccgatggtggtgtatcagtgactgcgcaaggttccggcttggttttcgaacctgctggcacacagcagatggtgggggcgtcgtattccggcgtcgccggttcggcttccaacgcgaacgtggccgttctggccgccgagagtggactgccaacttcccttgccgcagcagatgatacctggtggagagcgatgctggggaaaatcgacggaacaggtgtttccggacctgcagggaatcggtatgtaaaaaacctgaccaaaggaacgcaggcatcacaggctctggtctcaggtaatgtccgcgatctgcgtaatacagctactcagcgcatcggaactcgggggccttcaggaactacggttgctacaactgaggttatgctggcaatgctctggaacagagcgctgacgaatgcggaagaggcctccatgtacgcatatattcagagctatgccgggcgcagaggcataactgtttaa

SEQ ID NO: 267728 - DNA, 150 bp, Klebsiella pneumoniae
atggaaggctgtatcgtgattaccgcgaagcagccggagccggaactggtggagtctctgcgccagctgcataagctgtcggcgcgtaagcaaaaacaggtgcaggcgttaatcgacgccatcgccgggcaaaagcagaagctggcatag

SEQ ID NO: 267729 - DNA, 138 bp, Klebsiella pneumoniae
atgaccaccccgcattctattgcagaattcaccgatccagaagtctccccggaaaataaccgtaaaggcaccgtcagttatgcgagccgctttgaagatcgccaacgtatcccggcaattatcatgaaaggccagtag

SEQ ID NO: 267730 - DNA, 1758 bp, Klebsiella pneumoniae
atggcggtggaaaaactgattgtcgaccatatcgacacctggaccacggcgctgcaaacccgctccacggccgggcgcggcagctcgggcaagattgacctgtacggcattaagaagctgcgcgagctgattctggaactggcggtgcgcggcaagctggtgccgcaggatccgaacgatgaaccggcgtcggtgctgctggagcgtatcgcagcggaaaaagccgagctggtgaagcaggggaagattaaaaagcagaagccgctgccggagattagcgaggaggagaaaccgtttgagctgccggaggggtgggagtggacaacactcaatacgcttgcagaaataaatcccaaaatagatgtgtctaatgatgagcaggacatatcttttgttccgatgcctctcatatcaacaaaatttgatgggtctcatgattttgaagtcagaaaatggaaagaggtaaaaaaaggttatacccactttgccaatggtgatatagccattgcaaaaattacaccctgctttgaaaatagcaaagcagcaatattttctggattgaaaaataatgtcggtgttggaacaacagaattgcatgttgcgcgcccatacagccaagctgttaatcagcaataccttcttttaaactttaaatcaccaagtttccttaaaactggtgaatctcagatgacaggctccgcaggccagaagcgtgtgcctagaaatttctttgaaaactacccgctaccataccctccattacaagagcaagagcgaatagtaaacaactttactcaattaatgatcctctgcgaccacctggagcagcactccctgaccagtctggacgcccatcaacagctggttgaaaccctgctaaccacgctaaccgacagccagaacgccgatgaactggccgaaaactgggcgcgtatcagcaagcatttcgacactctgtttactaccgaagccagcattgacgccttaaaacagaccattctacagctggcggtgatgggtaaactggtgccgcaggacccgaacgatgaaccggcttctgagctgctcagacgtattgcgcaggaaaaagcgcaattggtaaaagacgggaaaatgaaaaagcaaaaaccgctgccgccgattagtgatgaagaaaaaccgtttgaactgccggaggggtgggaatggtgtagattaggtcatgttgcatcaaagattaccgatggtgatcataaaactccaccacgcattgctgaaggttataaattactttcagccaaaaacattcgcgatggttttttagactatgaaaactgtgactatatttcggagtctagctatataaaatcccgtgaaagatgtttacctgaaaaaggtgacctattaatcgtttcagttggtggaacaataggaagatcatcattaattactggcaactctgaatttgcactcgtgcgtagtgttgcaataataaagccattaattattgaaccaaacttcttaaaaatagccatggactcgcagttattgcaatctatgattcactcgcacaaacgcggtggagcacaaccttgtttgtatcttggcgaaataagcaagtttctattcccggcacctccattaaatgagcaaagaagaatcgttaaaactgttaatatattcatgggaatgcttgaaacattaactttagcattcaattccgcccaacaaacccagctccacctcgccgacgccctcaccgacgccgccataaattaa

SEQ ID NO: 267731 - DNA, 969 bp, Klebsiella pneumoniae
atggaaattattcaagtatggaggaagttttttcagcattttaaacggaaagaattggatgctgcggtggttgtttacggcataatcgcaatctatttaattccctataagtttcctttaaaaagttacttggttgcatttctttttatatctattttaatattctcttgcactcaagaaattcgaattagggaatatatcagtttctttgtacgcacaggcaatgatcacttattgactcgatgtgctggcattctatcgctatctgcatggtcaattttcttgctcttattgttgtctgctaatgtgtttgccaacgccataacattttggctagcaattttatattcgatctttatcctcattagcagtattttgacagttttagatattgccagaaataatacagtaaaaaccctcaaaataatcgggctggctgttaccgttttttcaggtgtttttgcatttaccagtagctattcagcaagtgttttctggcaaatcagtaatctagcgctatcttcttcaccatggttagaatatttctggaaagctacggcgttccttatgttgctcttatggctctcacaaccaatttgttatggattgtttctggtttatggtgataaagcaaaggggtatcgaatttttacattgactggcgcttttattatgtcaattttcttgtttttacttgttcctaaattgatcggcgatgccgcttactatgtgttaaaaatcgccatcaattatgaatggcgtgacgaagcaaagtgtggcgatctaaaaatcaataataaaaatgaaaaatactttggctttaatactgacaaatatactgttttttattcggataaaaatgataaatggggtttctatgagcttacttgccaaaagggcagtaacaggaaagatttttatgcagtcgagtatttacctgaatataatattcccgcatggttaaaataa

SEQ ID NO: 267732 - DNA, 1509 bp, Klebsiella pneumoniae
atgcttaatcagcagtacgtgatgccgaatggactgacatcttatgccggcgtaacggcgaaaagtccctggctggcgagtgagagcgaaaagcgccagcgcaaaatctgcgattcgctggaaacggcaatccgtcgctccggcctgcaaaacggcatgaccatctcgtttcaccacgcgtttcgcggcggtgacaaagtcgtcaatatggtagtggcgaagctggcggaaatgggttttcgcgatctcaccctggcgtccagttcgctgatcgacgcccactggccgctgatcgagcatattaaaaatggcgtgatccgccagatctacacctccggcctgcgcggcaagttgggcgaggagatctccgccggtttaatggaaaacccggtgcagatccactcccacggcggtcgcgtacagctgattcaaagcggcgagctgtcgattgatgtcgcgtttctcggcgttccttgctgcgatgagtttggcaacgccaacggctttagcggtaaatcacgctgcggttctctgggctacgcgcgcgtcgatgccgagcacgctaaatgcgtggtgctgctgaccgaagagtgggtggattatcctaactatccggccagtattgcccaggatcaggtggatctgatagtccaggtagatgaagtcggcgatccgcaaaaaattaccgcgggtgccatccgtctgaccagcaacccgcgcgagctgctgatcgcccgccaggcggcgaaagtcgttgagcactccggttactttaaagagggtttctcgctgcagaccggtaccggcggcgcctcgctggcagtaactcgcttccttgaagataaaatgcgccgtaacggcattaccgccagcttcggcctcggcggtatcaccgggacgatggtcgatttgcacgaaaaagggttgatcaaaacgctgctcgatacccagtccttcgatggtgacgcggcgcgttcgctggcgcagaacccgaaccatgtcgagatctccaccaatcagtatgccagcccgggctccaaaggcgcctcctgcgagcgcttaaacgtggtgatgctcagcgcgctggaaattgatatcgactttaacgttaacgtgatgaccggttctaacggtgtgctgcgcggggcgtccggtggccatagcgataccgccgccggtgcggatttgaccattattaccgcgccgttagttcgcggccgtattccctgcgtcgtggaaaaggtgctgacccgcgtcacgccgggggccagcgtggatgtgctggtcactgaccacggcattgcggtcaacccggcacgtcaggacctgatcgacaatttgcgcagcgcaggcattccgctgatgaccattgaggaactgcagcagcgtgctgagctgttgactggcaagccgcagccgatcgaattcaccgatcgggtggtggcggtggtgcgctatcgcgacggttcggtcatcgatgtgattcgtcaggtgaaaaacagcgactaa

SEQ ID NO: 267733 - DNA, 909 bp, Klebsiella pneumoniae
atgagcgacgtgttaattaatcctgcgcgtgtgcggcgcgtgaagccactgagtgccgaagaggtggtcagcgcggtagagcgcgcgctgttgaccgaagttcgcctgaccccaaagcccgggttggtggatattcgtaacgctggcgcgcactgggatatggatctggcctcgtttgaggccagcaccgcggtggtggctccgtggatggagaaatttttcatcatgggccacgatactgcggcggtcgcgccggagcaggtattgatgatgctgcgcccggtagggatggcctgtgagaacgatatgctggaggccaccggcggggtgaatacccatcgcggggcgatcttcgcttttggcctgctcagcgcggcggcgggcaggctggtgtcgaaaggtgagccgatagagcagcaccggctttgcgaccaggtggcgcgcttctgtcgcggcatggttatgcaggagttgtcttctgctggcggggaacggctcagtaaaggcgaggctcattttctgcgctatggtctctccggggcccgcggcgaggcggagagcggtttcctgacggtgcgtacccaagccatgccagtctttacccgcatgatggaagagaccggcgacagtaatctggcgctactgcaaaccctgctgcatctgatggcgtggaatgatgacaccaacctggtctcgcgcggcgggcttgccgggctgaactttgtccagcaggaggcgcagcgactgctgtggcagggcggcgtgctggcggacggcgggctggaggcgctgcgacagtttgacgatgagctgattgcccgccatctcagccccggcggcagcgccgatctgttggcggtgacctggtttttatccgcgtttcccgccggcgcgcttttcccgctgtaa

SEQ ID NO: 267734 - DNA, 822 bp, Klebsiella pneumoniae
atgcatgatgcacaaatccgcgtggccatcgccggcgcgggcggccggatgggacgccagttaattcaggctgcattgcagatggaaggcgtggcgctgggcgcggcgctggagcgcgaagggtcaagcctggtgggcagcgacgccggcgagctggcgggcgccggcaaagcgggcgtcgcggtgcagagcagcctggcggcggtaaaagatgatttcgacgtgttgatcgattttacccgcccggaaggcacgctgaaccatctggcgttttgccgcgagcacggcaaagggatggtcatcggcaccaccggttttgacgacgctggcaaacaggcgattcgcgatgccgcgcaggacattgccattgtcttcgccgctaactttagcgttggcgtcaatgtcctgttgaagctgctggagaaggcggcgaaggtgatgggcgactataccgacatcgaaattatcgaagcgcaccaccggcataaagtggattcgccgtcaggcaccgcgctggcgatgggcgaagcgatcgctggggcattgaacaaagatcttaaggactgcgcggtctacagtcgtgaaggctacactggcgaacgcgtcccgggcaccatcggcttcgcgaccgttcgcgcgggcgatatcgtcggggagcatacggcaatgtttgctgacatcggtgagcgtattgaaatcacccataaagcgtccagccgcatgaccttcgcaaatggcgccattcgttcagcattatggttgaaagacaagaaaaatggcctgtttgatatgcgtgatgtgctggatctgaatagtttataa

SEQ ID NO: 267735 - DNA, 1149 bp, Klebsiella pneumoniae
ttgattaagtcagcgctattggttctggaagacggaacccagtttcacggtcgggccatcggggcaaccggcacggcggttggggaagtcgttttcaatacttcaatgaccggttatcaagaaatcctcactgatccttcctattcccgccaaatcgtcactcttacttatcctcatattggtaatgtcggcaccaacgccgccgatgaagaatcttctcaggtacatgcgcagggtctggttattcgcgacctgccgctgattgccagcaacttccgcagtactgaagacctctcttcttatctgaagcgccataacatcgtggcgattgccgatatcgatacccgcaagctgacgcgtctgctgcgtgagaaaggggcgcagaacggctgcatcatcgcgggcgacagcccggatgcccagctggcgctggaaaaagcgaaagcgttcccgggcctgaacggcatggacttggcgaaggaagtgaccaccgcagaaacctatagctggacgcaaggcagctggaccctggcgggcgacctgccggaagcgaaagcggaaagcgagctgccgttccacgttgtggcatatgacttcggcgcgaaacgcaacatcctgcgcatgctggttgaccgcggctgccgcctgacggtggtgccggcgaagacctccgccgcggacgtgctggcgctcaatccggacggtatcttcctctccaacggccctggcgacccggcgccgtgcgattacgctatcgaggcgattgaaaaattccttgagaccgatattccggtattcggcatctgccttggccatcagctactggcgctggcgagcggtgccaagaccattaagatgaagttcggccaccacggcggcaaccacccggtgaaagatattgataacaacgtggtgatgatcactgcccagaaccacggtttcgccgtagatgaggcgacgctgccggccaacctgcgcgtgacccataagtcgctgttcgacggcaccctgcaggggatccatcgtaccgacaaaccggcgttcagcttccaggggcaccctgaagcgagcccggggccgcacgatgccgcgccgctgttcgaccactttatcgagttaattgagcaataccgtcagtccgcgaaataa

SEQ ID NO: 267736 - DNA, 3225 bp, Klebsiella pneumoniae
atgccaaaacgtacagacataaaaagtatcctgattctgggcgcgggcccgattgttatcggtcaggcgtgtgagtttgactactccggcgcccaggcctgtaaagcgctgcgcgaagagggctaccgcgttatcctggtgaactctaacccggcgaccatcatgaccgacccggaaatggccgatgccacctacatcgagccgattcactgggaagtggtgcgtaaaatcatcgaaaaagagcgcccggatgcggtgctgccgaccatgggcggccagacggcgctgaactgcgcgctcgagctggagcgtcagggggtcctggctgaattcggcgtgaccatgattggcgccaccgccgatgcgattgataaagccgaagaccgtcgccgtttcgatatcgcaatgaaaaaaatcggcctcgacaccgcgcgctctggtatcgcccacacgatggaagaggcgctggcggttgccgccgacgttggtttcccgtgcatcatccgtccgtccttcaccatgggcggcaccggcggcggtatcgcctataaccgcgaagagttcgaagaaatctgcgaacgcggcctggatctctctccgaccaacgaactgctgatcgatgaatcgctgatcggctggaaagagtacgagatggaagtggtgcgcgataagaacgataactgcatcatcgtctgctccatcgaaaacttcgacgccatggggatccacaccggtgactccatcaccgttgccccggcgcagaccctgaccgacaaagagtaccagatcatgcgtaacgcctcgatggcggtgctgcgtgaaatcggcgtcgaaaccggcggctctaacgtgcagttcgcggtcaacccgaaaaacggtcgcctgatcgttatcgaaatgaacccgcgcgtctcccgctcctcggcgctggcctctaaggccaccggcttcccgattgctaaagtggcagccaagctggcggtaggttatacccttgacgagctgatgaacgacatcaccggcggccgcaccccggcttcctttgaaccgtccatcgactacgtggtcactaaaatcccacgctttaacttcgaaaaattcgccggcgccaacgaccgtctgaccacccagatgaagtctgtcggcgaagtgatggcgattggccgtacccagcaggaatctttgcagaaagcgctgcgcggtctggaagtgggcgctaccggctttgacccgaaagtgagcctcgacgacccggaagcgctgaccaaaatccgccgcgagctgaaagatgccggcgctgagcgtatctggtatatcgctgacgcgttccgcgcgggcctctcggttgacggcgtcttcaacctgaccaacatcgaccgctggttcctggtacagattgaagagctggtccgtctggaagagaaagtggcggaagtgggcatcaacggcctcgacgctgacttcctgcgcaccctgaagcgtaaaggctttgccgatgcgcgtctggcgaagctggcgggcgtgcgggaagcggaaatccgcaagctgcgcgaccagtatgacctgcacccggtctacaagcgcgtggacacctgcgctgcggaatttgctaccgataccgcctacatgtactccacttatgaagaagagtgtgagtccaacccgtccgttgaccgcgataaaatcatggtcctcggcggcggcccgaaccgtatcgggcagggtatcgaattcgactactgctgcgtacacgcctcgctggcgctgcgcgaggacggttacgagaccatcatggtcaactgtaacccggaaaccgtctctaccgactacgacacctccgaccgtctgtattttgagccggtaaccctggaagacgtgctggaaatcgtgcgcatcgagaagccaaaaggcgttatcgtccagtacggcggccagaccccgctgaagctggctcgtgccctggaagctgccggcgtgccggttatcggtaccagtccggacgctatcgaccgggcggaagaccgtgagcgcttccagcacgcggttgaccgtctgaagctgaagcagccggcgaacgccaccgtcaccgccattgagcaggcggtagagaaagcgaaagagattggctacccgctggtggtgcgtccgtcttatgtgctcggcggccgggcgatggagatcgtctatgacgagcaggatctgcgccgctacttccagaccgcggtcagcgtctccaacgacgcgccggtgctgctggatcgcttcctcgacgatgcgattgaagtggatgtcgatgccatctgcgatggcgaaatggtgctgattggcggcatcatggagcatatcgagcaggcaggcgttcactccggcgactccgcctgttccctgccggcctacaccctgagcaaagagattcaggatgtaatgcgcgagcaggtgcagaagctggccttcgagctgcaggttcgcggcctgatgaacgtccagttcgcggtgaaagataacgaagtttatctgattgaggtcaacccgcgtgcggcgcgtaccgtaccgttcgtctccaaagccaccggcgtcccgctggcgaaagtggcggcgcgcgtgatggccggtaagacgctggcgcagcagggcgtgaccaaagagatcatcccgccgtactactcggtgaaagaggtggtcctgccgttcaataaattcccgggcgttgacccgctgttagggccagaaatgcgctccaccggggaagtgatgggcgtcggccgcacctttgccgaagcgttcgccaaagcgcagctgggcagcaactcgaccatgaagaaacagggtcgcgcgctgctctccgtccgcgaaggcgataaagagcgcgtggttgacctggcggcgaagctgctgaagtttggcttcgagctggatgcgactcacggtacggcgattgtgctgggtgaagcgggcattaacccgcgtctggtgaacaaggtgcatgaaggtcgtccgcacattcaggaccgcatcaagaatggcgaatatacctacatcatcaacaccaccgcaggtcgccaggcgattgaagactccaagctgattcgccgcagcgcgctgcagtacaaagtgcattacgacaccaccctgaacggcggctttgccaccgcgatggcgctgaacgctgacgccaccgagaaggtgatttcggttcaggaaatgcacgcgcaaatcactaaataa

SEQ ID NO: 267737 - DNA, 234 bp, Klebsiella pneumoniae; identical to SEQ ID NO: 136472

SEQ ID NO: 267738 - DNA, 534 bp, Klebsiella pneumoniae
atgattctgataatttatgcgcatccttatccgcagcattctcatgcgaataagcgaatgcttgaacaggcagggacgcttgaaggcgtagagatacgctccctctatcaactctatcccgactttaatatcgatgtcgccgccgagcaggcggcgctggcccgtgccgatctggttatctggcagcatcctatgcagtggtatagcgtaccgccgctgctcaagctgtggatggacaaggtgctgtcgcacggctgggcctatggtcacaacggtattgccctgcgcggtaaatcgctgatgtgggcggtcactaccggcggcggtgaaagccactttgatatcggttcgtttcccggtttcccggtgctggcgcagcctctgcaggcaaccgcgctttactgcgggatgaaatggctgccgccgttcgctatgcactgcacctttatctgcgatgatgaaacgctgcaggcgcaggcccgccgctatcgtcaacgcttaatcgactggcaggaggcacaccagaatggatag

SEQ ID NO: 267739 - DNA, 1866 bp, Klebsiella pneumoniae
atggatagccatacgctgatacaggcgttgatttacctcggcgccgcggcgctgattgtgcccatcgccgtccgtctggggctggggtcagtgctgggctatctcatcgccggctgtattatcggcccgtgggcgctgcggctggtgaccgatgccgaggcgattctgcactttgccgagattggcgtggtgctgatgttgttcgtcattggtctggagctcgatccgcagcgcttatggaagctgcgcgcctcggtgtttggcggcggcgcactgcagatggtggcctgcggggtgttgatcggcctgttctgcatgctgctgggcctgcgctggcaggtggccgagctgattggtatgactctggcgctttcttccacagccattgctatgcaggcgatgaatgagcgcaatctgacggtgtcgcagatggggcgcagcgcctttgcggtgctgctgttccaggatatcgccgcgatcccgctggtggcgatgatcccgctgctggcggccagcggcggcgccacttcgctgatggcttttgccctctccgcgctgaaagtggccgcagcgctggcgctggtggtggtccttgggcgctatctgacccgcccgctgctgcgctttgtcgcccgttccggcctgcgcgaagtgttcagcgccgtggccctgttcctggtcttcggctttggcttattgctggaagaggtggggctgtcgatggcgatgggggcgtttctcgccggggtgctgctggccagttccgaatatcgtcatgcgctggagagtgatattgagccgtttaaaggactgctgttggggctgttctttatcggcgtcggcatgtcgattgatttcggcaccctggtcacccatccgctgcgtattgtgattttgctggtcggtttcctggcgataaaaatgctgatgctgtggcttatcgccaggccgcttggcgtaccgcgcgcccagcgccgctggtttgcggtgctgctggggcaggggagtgagttcgcgtttgtggtgtttggcgccgcgcggatggcggatgtactggacggcgaatgggcaaaagcgttgaccctggcggtggccctgtcgatggcggcaacccccattctgctggtgctgctgacccgtctggagaaatcgtccagcggccaggcgcgtgatgctgacgagattgatgaagagcagccgcgggtgattgtcgccggctttggccgcttcgggcagattgccgggcgattgctgctctcgagcggggtgaagatggtgatcctcgatcatgacccggaccatgtcgataccctgcgcaaatttgatatgaaggttttctacggcgatgccacccgggtcgatctgctggagtcggccggggccgaaaaggcggaagtgctgatcaatgccattgacgatccgcacgtcagcctggagctggtggcgagggtaaaagagcattttccgcatctgcagatcatctcccgcgcccgcgatgtcgatcattacattcagctgcgccaggctggcgtcgaggccccggagcgtgaaaccttcgaggcggcgctgaagtccggccgaatgacgctggaggcgctggggctcggcgcctatgaagcgcgcgagcgggccgatctgtttcgtcgattcaacctgcaaatggtcgaagagatggtggcgatggcggaaaacgatgccgcgtcgcgggtggcggtcttcaagcggaccagcgatatgctgaccggcatcatcaacgaagatcgtcatcatctgtcgctggtgcagcgtcatggctggcagggtacggaagagggcaggcacaccggggatatcgccgatgaaccggaaaataagccctcagcctga

SEQ ID NO: 267740 - DNA, 480 bp, Klebsiella pneumoniae; identical to SEQ ID NO: 136469

SEQ ID NO: 267741 - DNA, 849 bp, Klebsiella pneumoniae
atgtcaacataccttattggcgacgttcatggttgctacgatgaactgatcgcattattagcgcaggttgaattcgatccgcggagagatacgctgtggctgaccggcgatctggtggcccgaggcccgggatcgctggaggtcctgcgctatgtcaaatctctgggcgacagcgtacgactggtgctgggcaaccatgacttacacctgctggcggtctttgccggtatcagccgcaacaagccgaaggatcgtctgaaatcactgctggaagcgccggatgccgatgagctgctcaactggctgcgtcgccagccgctgctgcaggtggatgaagagaaaaagctggtgatggcccatgccggcattacgccgcagtgggatctggagaccgcccagcagtgcgcgcgcgatgttgaagcagtgctctccagcgactcctatcctttcttcctcgatgccatgtacggcgacatgccgaaccactggagcaacgagcttagcggcctggcgcgcctgcgctttatctctaacgcctttacccgcatgcgctactgtttcccgaacggccagctggatatgtattcgaaggaagcgcccgaggacgccccggcgccgctgaagccgtggtttgccattcccggcccggtcagcaatgcctacagcattgcctttggccactgggcttcgctggagggacgcggcacgccggaggggatttacgccctggataccggctgctgctggggcggggaactcacctgcctgcgctgggaagataagcagtacttcacccagccgtcaaaccggcagaaaagcctcgacgaaggcgaagccgtcgcgtcctga

SEQ ID NO: 267742 - DNA, 378 bp, Klebsiella pneumoniae; identical to SEQ ID NO: 136467

SEQ ID NO: 267743 - DNA, 822 bp, Klebsiella pneumoniae
atgaataatcgagtccatcagggccatttagcccgtaaacgcttcgggcagaacttcctcaacgatcagtttgtgatcgacagcatcgtctcggcgattaacccgcagaaaggccaggcgatggttgaaatcggccccggcctggcggccctgaccgagccggtcggcgaacgccttgaccagctgaccgtcatcgaactggaccgcgatctggcggctcgcctgcagacgcatccgttcctcggtccaaagctgaccatctatcagcaggatgcgatgaccatgaactttggcgaactggcggagaaaatgggccagccgctgcgcgtcttcggcaacctgccgtacaatatctcgaccccgctgatgttccatctgttcagctatactgatgccatcgccgatatgcactttatgctgcagaaggaagtggtgaatcgtctggttgccggaccgaacagtaaggcgtatggtcggttaagcgtgatggcgcaatattattgccaggtgatcccggtactcgaagtgccgccgagcgcgtttaccccgccgcctaaggtcgactccgcggtggtacgcctggtgccgcacagcaccatgccgtatccggtcaaagagatccgggtgctgagccgcatcaccaccgaagcgttcaaccagcgccgcaagactatccgcaacagtctcggcaatctgttcagcgtggaagtgctgaccgagctgggcatcgacccggccatgcgcgccgaaaatatttccgtggcgcagtactgcctgatggccaactggctgtctgacaatctgccaacgaaggagagctaa

SEQ ID NO: 267744 - DNA, 990 bp, Klebsiella pneumoniae
atgcctgaaacccgtaaagttgttatcactcccggcgaacccgccgggattggccctgacctggtcgtgcagcttgcccagcgcgactggccagttgagctggtgatttgcgccgatggcgccctgttaactgaccgagccaagcggctcggtcttcctttatctctcctcccttacgatcccgcgcaacctcctgttcctcagcgcgccggtaccctgacgctgctgaacgtgccgctaaacgtcccggcggagcccggcgtgctgaatgtgcaaaacggcgcctacgtagtggagacgctggcgcgcgcctgcgacggttgccttagcggcgagtttgcggcgttagtgaccggcccggtgcataaaggcaacatcaacgacgccggtatcgcctttaccggtcataccgagttctttgaagagcgcgcgaaggccagcaaagtggtgatgatgttggcgaccgaggagctgcgggtggcgctggtcaccacccatctgccgttgaaagccatcagcgaagcgattacccccgagctactgcgcgagatcatcaccattctcgatcacgacctgcgcacgaaatttggcattgcccagccgcatgtgctggtttgcgggcttaacccgcacgctggcgaaggcggccatatgggaacagaagagatagacaccatcattccggtgctggaagagatgcgcgcaaaggggatgaacctcagcggtccgctgccggcagacaccctctttcagccaaaatatcttgatcatgccgatgcggtactcgcgatgtaccacgatcagggcctgcccgtgctaaaataccagggctttggccgcggcgtgaacattacgctcggtttaccttttattcgaacctccgtcgaccacggcaccgcactggaattagcgggccagggaaaagcggacgtcggcagttttatcacggcgcttaatctcgccatcaaaatgattgttaatacccaatga

SEQ ID NO: 267745 - DNA, 1287 bp, Klebsiella pneumoniae
atgaagaactggaaaacgctgcttctcggtatcgccatgatcgcgaataccagtttcgctgccccccaggtggtcgataaagtagcggccgtcgtcaataatggcgtcgtgctggaaagcgacgtcgatggtttgatgcaatcggttaagctcaatgctggtcaggctggccaacagctgccggatgacgccaccctgcgccatcaaatcctcgaaagactgatcatggaccagatcgtgttacagatggggcagaagatgggcgtgaagatctctgacgaccagctcgatcaggctatcgccaacatcgccaaacaaaataatatgaccttggatcagatgcgcagccgtctggcgtatgaaggcatcaactacaacacctaccgtaaccagatccgtaaagagatgctgatttcggaagtgcgtaacaatgaagtgcgtcgtcgcatcaccgtgctgccgcaggaagtggaagcgctggcgaaacagatcggcgaccagaacgacgccagcaccgagctcaacctgagccacatcctgatcccgctgccggagaacccgacctctgacgaagtcgccgcggcccaggagcaagcaaactccatcgttgagcaggcgcgcaacggcgccaacttcggcaaactggcgatcacctactccgctgaccaacaggcgctgaagggtggccagatgggctggggccgtatccaggaactgccgggcattttcgctcaggcgttaagcaccgcgaagaaaggggatatcgtcggtccgattcgttccggcgttggtttccacattctgaaagtcaacgacctgcgcggtggtacccagaatatctccgttaccgaggttcacgcccgtcatattctgctgaaaccgtcgccgatcatgaacgacgcccaggctcaggctaagctggaacagatcgcagccgagattaagagcgggaaaatcacgtttgctcaagcggcgaaaacctattcggaagatccgggttcggcaaaccagggcggtgatttaggctgggccacgccggacatctttgacccggcgttccgcgatgcgctgatgcgtctgaacaaagggcagaccagcggaccggtgcactcttcctttggctggcatctgatcgaactgctggatagccgtcaggtcgacagaaccgacgccgcacagaaagatcgtgcttaccgcatgctgatgaaccgcaaattctctgaagaagcggcaacctggatgcaggaacagcgcgccagtgcgtatgttaaaattctgagcaactaa

SEQ ID NO: 267746 - DNA, 2349 bp, Klebsiella pneumoniae
atgaaaaaacgtattcccagcctcctggctacgatgattgccagcgccttgtatagccaacaaggcctcgctgccgatctcgcaacgcaatgtatgcttggcgtgccaagctatgatcgtccgctcgtggaaggtcgtcctggcgatctgccggtgacgattaacgccgatcatgcgaagggcaactacccggacaacgccgtctttaccggcaacgtcgatattaaccaggggaatagtcgcctccgcgccgacgaagttcagctgcaccagcagcaggccgcgggccaggcgcagccggtgcgcacggtggacgcgctgggcaacgtgcattacgacgataaccaggtgatcctcaaagggccaaaagcctggtcgaatctgaataccaaagataccaacgtctggcagggcgattatcaaatggtcggacgccagggacgcggcaccgccgacctgatgaaacagcgcggtgaaaaccgctataccattctcgaaaacggcagctttacctcctgtctgccgggctccgacacctggagcgtcgtcggcagcgaagttatccacgatcgcgaagagcaggttgccgagatctggaacgcccgcttcaagcttggctctgtgccgattttctatagcccctacctgcagctgccggtgggcgataagcgtcgttcaggcttcctgatcccgaacgcgaaatacagcaccaaaaacggcgtggaattctccctgccgtactactggaacatcgcgccaaacttcgatgccactattactccgcactatatgaacaaacgcggcggcgtgatgtgggaaaacgagttccgctatctgacccagctcggcagcggcttaactgaattcgactacctgccgtcggataaagtctacgaagacgaccactcgagcgacagcaacagccgccgctggctgttctactggaaccactcaggggttatcgatcaggtatggcgtctgaacgctgactacaccaaggtcagcgatcctgactacttcaacgacttcagctcgaaatatggttccagtaccgacggctatgcgacgcagaaattcagcgccggttacgtcaaccagaactttgacgccacggtatcgaccaaacagttccaggtctttgaccgcgaatcgagcaactcctattcggctgagccgcagctcgacgtcaactactaccagaatgatgtcggtccgttcgatacccatctctatggacaggttgcccattttgttaactcgaataacaacatgccggaagcgacccgcgttcacttcgaaccgacgatcaacctgccgctgtccaacggttggggcagtctgaataccgaagccaagctgctggcgactcactaccagcagagcaacctcgataagtacaatgccgccaacggcactgactataaagagtccgtcagccgcgtaatgccgcagtttaaagtcgacggcaaaatggtctttgaacgcgacctgcaggagggattcacccaaacgctggaaccgcgcgtgcagtatctgtacgtgccgtaccgcgatcagagtgaaatcggcaactacgactccacgctgttgcagtcggattacaccggtctgttccgcgaccgtacctatagcggtctggaccgcatcgcgtcggctaatcaggtcaccaccgggctcacctcgcgcgtgtatgatgccgccgcggtggaacgttttaatatttccgttggtcaaatctactatttcaccgagtcacgcaccggtgatgacaacatcaactgggagaacaacgataccacgggttcactggtctgggccggcgatacctactggcgcattgccgatgaatggggtctgcgcggggggatccagtacgatacgcgtctggataacgttgccactggtaacggcaccattgaataccgtcgcgatgagaaccgcttagtccagcttaactatcgttacgccagcccggaatatattcaggccacgctgccgtcatattccaccgcggcacaatataaacagggtatttcgcaggtggggatgaccgccagttggccgattgtcgatcgctggtccgtggtcggggcctactactacgatactaatacccggaaagcagcaaaccagatgttgggtgtgcagtataactcctgctgctacgccatccgtcttggctacgaacgtaaagtcaacggctggaacagcaacgacaacggcggcgagagcaaatacgataacaccttcggaatcaatatcgaattgcgcggtctgagctctaactacggcctcggcacccagcagatgctgcgctcgaacattttaccgtaccagagctccctgtga

SEQ ID NO: 267747 - DNA, 828 bp, Klebsiella pneumoniae
atgcagtatttgggtaaagtgattggcgtggcagtggctttgctgatgggtggtgggttctggggcgtggtgcttggctttctggtcggccatatgtttgaccgggcgcgcagccgccggttaaatctcttcgccaatcagcaggagcgtcagtcgctcttcttttccaccaccttcgaagtgatggggcacctgaccaaatccaagggccgcgttaccgaagcggatattcatgtcgccaatgtgctaatggatcgcatgaacctgcatggcgcctcgcgcaccgcggcgcagcaggcgtttcgcgacggtaaggccgacaactatcccctgcgcgagaaaatgcgtcagctgcgcagcgtctgctttggccgtttcgatctgattcggatgtttctggaaattcagctgcaggcggcgttcgctgatggcgaactgcatcctaacgaacgggaagtgctgttcgtcattgccgacgagctcggcatctcccgcgcccagttcgatcaattcctgcggatgatgcagggcggcgcccagtttggcggcggttcgcagcagcgctcttatggtcagcatggcggcaacgccggctggcagcaggcgcagcgtgggccgaccctcgaagatgcctgcaatgtgctgggagtaaaaccgaccgacgatgcggcgacggtgaagcgcgcctatcgcaagctgatgaacgaacatcatccggacaagctggtagcgaaaggtctgccgccggagatgatggagatggccaaacagaaggcccaggagatccagaaggcctgggagctgatcaaagagcagcgcggcttctga

SEQ ID NO: 267748 - DNA, 699 bp, Klebsiella pneumoniae
atgcatcatgacctggtcgatgtgctaatcattgaagatgagagcgaactggcgcgcctgcacgccgagcttgtgcaaaaacacccgcgactgcggctggcaggcatggcggcctccctcgcccaggcgcggcagctgcttcacgccacgccgccgcagctggtgctgctggataactatttaccggacggcaaaggcgtcacgctgatgaccgacccggcgctggcgaccagccaatgctcggtgatctttatcaccgccgccagcgatatggaaacctgcagccaggccatccgcaacggcgccttcgactatatccttaagccggtatcatggaagcggctgagccagtcgctggagcgctttatccagttctacgatcagcaacgggagtggaaaatcgtcgatcagcaaaacgtcgattccctctatcaactgcaggcgaagaattatcgcgtggatagcggcagcaaggggattgaagagaaaacgctggcgctggtgcagggactgtttagcggccgggaagcgcactgtttttccgttgatgaagtggtcagcgccgccgggctcagcaaaaccaccgcccgtcgctatctggagcacggcgttgagaccggttttctggaagtggagatgctgtacggaaaaattggccatccgcggcggctgtatcgccgcgctaaggtcaaaagttaa

SEQ ID NO: 267749 - DNA, 1626 bp, Klebsiella pneumoniae
atgaaattatcttttcaatataagctgtttatttctctggtcgcttttttctcggtcctttttatcgcgctgggcatttattattattttgacgccagccgccagctttatcaggagatgagcgcccgggccaaaatacaggccgaagagatagccctgatgccgaatttacgtcaacaggtcagccggcacgacccacaggcgattcaggcgtttatgcagcaaatcgccgcccatagcgacgccagctttatcgtcatcggcgaccgtcagggagttcatctgtttcattccgtccatccggagtgggtcggcacccgactggtcggcggcgacaaccaggcggtactggaagggaaatccatcaccaccattcgcaaaggcggcctcggggtctcgctgcgcagcaaaacgcccatcgttgatgacgcagggcgagtgatcggtattgtctccgtcggctacctcaccagctatctcgacagcattactctgactaaagtgatcaatatttttatcgccgccgtcctgctgctcatcgccctgtttatcttctcctggtactttacccgcagtatcaagaagcagattttttctctcgagccgcgggaaattggcctgctggttcgccagcaaaaggcgatgatggagtcgatctttgagggggtgatcgtcatcgatcgccagcggcgtattgaggtgataaaccatgccgcccgcagcctgctggggctcagccagcccgcccgccagctgcgcggtcagtcgatcgacagcgtcatttcgccgcagccctttttcgccagcggcgacatgctcgaacgcgatacccacgatgagctatgccgcttcaaccagttgaccgtgctcgccagtcgggtgcgcattatgctggagaataccctgcagggctgggtgatcacattccgtgaccgcaatgaaatcaatgccctcaccgcccagctgagccaggtgaagcgctatgtcgacaatctgcgcatcatgcgccacgagcagctcaaccggatgactaccctctccggcctgctgcatatgggccattatgacgaagcgatccgctatattcaggcccagtcggaacatgctcaggagctactggactttatctcctcgcacttccactcgccgacgctatgcggtctgctgctcggcaaagccacccgcgcccgcgaaaaaggcgtggcgctgagcttcgacccggcctgccgcatcgaccgccccctgccgtcgctgatggaatccgagctgatctccatcatcggcaacctgctggataacgccatcgaagccacgcagcgtgccgagctgccgcatgagccggtggaagtcctgatccagctcaacgcccgggagttgattatcgaagtggccgaccgcggcgtcggtatccgccccgatatccgcgagcgcatttttgaacgcggcgtcaccaccaaaacccgtggcgatcacggcattggtctgtatcttattgaacattatgtcactcaggcgggcggcaccatcgaagtcgccgataacgcgccgcggggaacgatcttcaccctatttatcccggccgacgcgcacgcctgtccgcaaccggaggcccacgatgcatcatga

SEQ ID NO: 267750 - DNA, 1365 bp, Klebsiella pneumoniae
atgagcaccacagacaatgcattctctgcaacccttgaaccgatcgatacgccgaaaaccacgctcaagcagcgctggtggcatatcatggataactggaaggtggggatcgtcccgctgccgctgtttctgctggccggaggactgattgccctcgactgccttggcggcaaactgccgagcgatatcgtggtgatggtggccaccctggctttctttggcttcgcctgcggcgagtttggtaaacgcctcccggtgctggggaaactcggtgcggcggcgatctgcgccacctttattccttccgcgctggtccactatggtctgctgcctgacgtggttattgaatccacgaccaaattctataaatccactaacattctctatctctatatctgctgcatcattgtcggcagcatcatgagtatgaaccgcaccacgctgattcagggctttctgaagatcttcttcccgatgctgtgcggcgaagtggtcggcatgctggtgggcatcggcgtcggcacgctgctgggcatggagccgttccaggtgttcttctttatcgtgctgccgattatggccggcggcgtgggagagggggcgatcccgctgtcaatgggttatgccgcgctgatgcatatggagcagggcgtggccctgggccgggtattgccgatggtgatgcttggcagcctgacggcgatcgtcatctccggctgcctcaaccagctcggcaagcgcttcccgcatctgaccggcgaagggcaactgatgccgaaccgcagccatgaaacccgcagcctcagcgagagcgaaggcgtgagcggtaagaccgacgttgggaccctcgcctccggcgcgctgctggcggtactgctgtatatgatggggatgctcggccacaaactgattggtctgccggcgccggtaggcatgctgttcctcgcggtactgttaaagctggctaacgtggtgtctccgcgtctgcaggaggggtcgcagatggtgtataaattcttccgcaccgcggtcacctacccgatcctctttgccgtcggcgtggcgatcactccgtggcaggaactggtaaacgccttcactttaaccaacctgctggtgatcgtcagtaccgtctccgcgctggtggcgaccggtttcctggttggtaaaaagatagggatgcacccgatcgatgtggcgattgtttcctgttgccagagcgggcagggcggcaccggcgatgtggcgatcctgaccgccggcaaccgcatgagcctgatgccgttcgcgcagatcgctacccgcatcggcggggcgataaatgtctcgctggggttgctgttcctcagccactatctggcgtga

SEQ ID NO: 267751 - DNA, 540 bp, Klebsiella pneumoniae
atgtcagtggatactcccgcccaggcgggcgtcagcatcgaggcattgctggcggcgaaagagcagcgtgcagcccgccaggccgactggttggcccattatcagcagcctgttatttccctgaccctggtgaccccgggggcggtgaaggacagcattcgctatcgtaatatgatgggcgttgccctccaggcctgcgatcagctgctgtggaagcaccgctggcaaacgctggatcgtcaggtgctatggctgccgaccgggccagaagcgctgtggtgcgtagcgcatccggccagcgaaatcaaagcgatgtgcagtacgctggagcagagccatccgctgggacgcctgtgggatatcgatgtaatctgtccgcagaacgggctggtgggacgccagtcgctgggcgaatcgcagcgccgctgcctgctgtgcgatgagccggcgcacgcctgtgcgcgcagccgtcgtcacgacaccgatctcgtcgtcgcccgcgttgagcagatgattgacgcgtggttcgcccgcgattaa

SEQ ID NO: 267752 - DNA, 660 bp, Klebsiella pneumoniae
atggcgatggaaaactacaatccgccgcaggatccctggctggtgatcctgtatcaggatgagcacatcatggtggtcaacaagccgagcggcttgttgtccgtccccggtcgtcttgaggaacataaagacagcgtgatgacgcgcattcagcgcgacttcccgcaggccgaatcggtgcatcgcctggatatggccaccagcggcgtgattgtggtggcgctgaataaagccgccgagcgtgaactgaagcgtcagttccgcgagcgcgagccgaagaagcagtacgtcgcccgcgtctggggccatccgcagccggcggaaggcctcgtggatttaccgctgatttgcgactggccgaaccggccaatgcagaaggtgtgctatgaaaccggcaaagcggcgcaaaccgaatatgaggtactggagtacgcagaggataacaccgcccgcgtgcgcctgaagccgattaccggacggtcacaccagctgcgcgtgcatatgctggcgctggggcatccgatccttggcgaccgcttctatgccacgccggaggcgctggcgatggccccgcgcctgctgctgcacgccgagacgctcaccatcacccatcctgcctacggcaacgcgatgacctttcgcgcgccgatcgacttttaa

SEQ ID NO: 267753 - DNA, 2907 bp, Klebsiella pneumoniae
atgccttttacacttggtcaacgctggattagcgacacagagagcgaactaggattagggacggtggtagcgctggatgcgcgcatggtcactctccttttccccgccatcggcgaaaaccgtctgtactctcgcaacgattccccgatcacccgcgtaatgtttaacccgggcgacaccatcaccagccatgaaggctggcagctccacgttgacaaagtgaatgaagagaacgggctgctgtcctacactggcacccgcctggacacccaggaagcgaacgtcaccctgcgtgaagtgctgctcgacagcaaactggtattcagcaaaccgcaggaccgcctgttcgccggccaaatcgaccgtatggatcgctttgccctgcgctaccgcgcgcgcaagttccagagcgaacagtaccgcatgccgtggagcggcctgcgcggccagcgcaccagcctgatcccgcaccagctgcatattgcccacgatgtgggccgtcgtcacgcgccgcgcgtcctgctggccgatgaagtgggcttaggtaaaaccattgaagccgggatgatcctgcaccagcagctgctctccggcgccgccgagcgcgtgctgatcgtggtcccggaaaccctccagcaccagtggctggtggagatgctgcgccgtttcaacctgcgtttctcgctgttcgatgacgagcgctacgccgaagcgcagcacgatgcctacaatccgttcgaaaccgaacagctggtgatctgctctttagacttcgtgcgtcgcagcaagcagcgcctggagcacctgtgcgacgccgagtgggacctgatggtggtcgacgaagcgcaccacctggtgtggagcgaagaggcgccgagccgtgaatatcaggctattgaacagctggctgagcgcgtgccgggtatcctgctgctcaccgcgacgccggaacagctgggaatggagagccattttgcgcgcctgcgtctgttggatccgaaccgcttccacgattttgaacagtttgtcgaagaacagcagaactaccgtccggtggccgacgccgtcgcgctgctgctggcgggcaacaagctgagcgatagcgaactcaataccctgggcgatctgatcggcgagcaggatatcgagccgctgctgcaggccgccaacagcgatcgcgaagatgcccaggccgcgcgccaggagctgatctcgatgctgatggaccgccacggcaccagccgcgtgctgttccgtaatacccgtaacggcgtcaaaggtttcccgaaacgcgagctgcacaccattcgtctgccgctgccgacccagtaccagacagccatcaaagtgtccggcattatgggcgcgcgcaaaaccgcggaagagcgcgcgcgcgacatgctctatccggagcagatctatcaggaatttgaaggtgataccggtacctggtggaacttcgacccgcgcgtcgagtggctgatgggttacctgaccagccatcgctcgcagaaggtgctggtaatctgcgctaaggccgccaccgccctgcagctggaacaggtgctgcgcgagcgcgaaggcatccgcgccgcggtgttccatgaagggatgtcgattatcgaacgcgaccgcgccgcggcgtggtttgctgaagaagacaccggcgcccaggtgctgctgtgctccgagatcggctccgaaggacgcaacttccagttcgccagcaacctggtgatgttcgacctgccgtttaacccggatctgctggagcagcgtatcggtcgtctcgaccgtatcggccaggcgcacgatatccagatccacgttccgtacctggaaaaaaccgcgcagtcggtgctggtgcgctggtatcacgaagggctcgacgccttcgaacatacctgcccgaccggtcgcaccgtctacgacagcgtgcacgatgaactgatcaactatcttgcggcgccggaatccaccgacggctttgacgatctgatcaaatcctgccgccaacagcatgatgccctgaaggcgcagctggagcagggccgcgaccgtctgctggagatccactccaacggcggcgagaaagcccaggccctggcggagagcatcgaagagcaggatgacgacaccagcctgatcgctttctcgatgaacctgttcgatatcgtcggcatcaaccaggacgaccgcggtgaaaacctgatcgtcctcaccccttccgaccatatgctggtgccggatttcccgggcctgccggaagacggttgcaccatcaccttcgaacgtgacgtggcgctgtcgcgtgaagatgcgcaatttattacctgggaacacccgctgatacgcaacggtctggacctgatcctttccggcgataccggcagcagcaccatttccctgctgaagaacaaggcgctgccggtcggcaccctgctgctggagctgatctatgtcgtcgaagcgcaggcgccgaagcagttgcagctcaaccgcttcctgccggcgaccccggttcgcatgctgctggataaaaacggcaacaacctcgccgcgcaggtggagttcgaaagcttcaaccgccagctgagcgcggtcaaccgccataccggtagcaagctggtcaatgcggtgcagcaggacgttcacgcgattctgcagcagggtgaagcgcagatcgccaaagcagcgcaggggctgatcgacgcggcgcgtaacgaagccgatgaaaagctgacggcggagctgtcgcgtctggaagcgctgaaggcggtgaacccgaacatccgtgacgacgaactggcggcgatcgaaagcaaccgtcagcaggtgatggatgcgctggcgcaggccggatggcgtctggacgcgctgcgtctgatcgtcgtcactcaccagtaa

SEQ ID NO: 267754 - DNA, 2358 bp, Klebsiella pneumoniae
gtgacccagccacgagcaggatttttactcacccgtcactggcgggacactccgcagggcaccgagctctccttctggctggccaccgacgacggtccgctgcaggtaaccctcccgccgcaggagtccgtcgcctttattcccgaagcgcagcgggcgcaggctgaacggctgctgcagggggagaaagggctccgcttcgccccgctggccctgaaagatttccatcgtcagccgattgttggcctctactgccgcgcccatcgccagttgatgcgtctggagaagatgctccgcgacagcggcgtcaccgtttacgaaggcgatatccgcccgccggagcgctatctgatggagcgctttatcaccgccccggtgtgggtggaaggcgaaacgcgcggctcgcagctggtcaacgcgcgcatgaagccgaaccctgactatcgtccgccgctgaaatgggtgtcgctggatatcgaaaccagccgccacggcgagctgtactgcatcggtctggaaggctgcggccagcgggtggtctacatgctgggccccgaaccggaaacgccgccagacgtcgacttcgagctggtcttcatcgccagccgtcccctactgctggaaaagctcaacgcctggtttgccgaacacgaccccgacgtgctgatcggctggaacgtagtgcagttcgatctgcgcgttctgcaaaagcacgccgaacgctatcgcatcccgctgcggctcggccgcggcaacagcgagctggagtggcgtgagcacggctttaagaacggcgtctttttcgcccaggccaacgggcggctgattatcgacggcatcgacgcgctaaaatcggcgttctggaatttctcctccttttcgctggaggcggtggcccgcgagctgctgggagaaggcaaagccatcgacaacccatgggatcggatggatgagatcgatcgccgctttcatgaagacaaaccggcgctggccatctataacctgcaggattgcgagctggtgacgcggatcttccacaaaacggagatcatgccgtttttgctcgaacgggcgacggtcaacggtctgcccgccgaccgccacggcggctcggtcgccgccttcagccatctctatttcccgcgcatgcaccgcctgggctacgtggcgccgaatctcggcgacgtaccgccgcaggcgagccccggcggctacgtgatggactcccgccccggcctgtatgactcggtgctggtgctggactataaaagcctgtatccgtcgattattcgtacctttttaatcgatccggtcggcctggttgaaggactggcgcaacccgatgaccagcacagtatcgagggcttcctcggcgcccgcttctcgcgagataagcactgcctgccggggattgtcagccagatctggcacggacgggatgaagccaaacgccagcacaataagccgctctcccaggcgctcaagatcattatgaacgccttttacggcgtgctggggaccagcgcctgccgcttcttcgacccgcgtctcgcctcgtcgatcaccatgcgcggccatgcgatcatgcgccagactaaagcgttaattgaagccaaaggctatgacgttatctacggcgataccgactccaccttcgtctggctgaagcgcccgcacagcgaagcccaggcggcggagatcggccgcgagctggtcagcgatgtcaacgcccggtgggcgcaggagcttagcaaaagccagcttaccagcgccctggagctggagtatgaaacccacttctgccgctttttaatgccgacgatccgcggcgccgataccggcagcaagaagcgctatgccgggatgattcaggagggcgatgcccagcgcatggtgtttaaggggctggaaacggtgcgtaccgactggacgccgctggcccagcagtttcaacaggagttatacctgcgcatcttccgcaaccagccgtatcaggattatgtgcgggagactatcgccaggctgatgaacggcgagctcgacgaacagctggtttatcgcaaacgcctgcgccggccgctggcggagtatcagcgcaacgtaccgccgcacgtgcgcgccgcccggcttgccgatgaacacaacctgaagcttgggcggacgcagcagtatcagcagcgcggcaccatcaaatacgtctggaccaccagcggcccggagccggtggattaccagcagtcgccgctcgattacgatcactatttaacaaagcagttgcagccggtggcggaagggatcctgcccttcgtcaacgatgactttgctacaatagtgacaggacagttggggctattttga

SEQ ID NO: 267755 - DNA, 696 bp, Klebsiella pneumoniae
atgttagaagatcttaaacgccaggtgctggaagctaacctggccctgccaaagcataatctggtgaccttaacctggggcaacgtcagcgccgtcgaccgcgagaaaggggtgttcgtgatcaaaccctccggtgtggattaccgcgtgatgaccgccgacgatatggtggtggtcagtctggagagcggcgaagtggtagagggtaataaaaagccctcgtcggataccccgacccatcgcctgctgtatcaggccttcccgacgctgggcggcattgtgcatacccattcgcgccacgccaccatctgggcgcaggccgggcaatctattcccgcgaccggcactacccatgccgactacttttatggcccggtgccctgcaccaggttaatgaccgatgcggagatcaacggcgactatgagtgggaaaccggcaacgtgattgtcgaaaccttccgccagcagggaatcgacccggcgcagatgcccggcgtgctggtccattcccacggtccgttcgcctggggcaagaacgccgaagacgcggtgcataacgccatcgtgctggaagagatcgcctatatggggattttctgccgccagctggcgccgcagctgccggctatgcagcagaccctgctggataagcactatctgcgtaagcatggggccaaagcctactacggccaataa

SEQ ID NO: 267756 - DNA, 1503 bp, Klebsiella pneumoniae
atgacgatttttgataactatgaagtatggttcgttattggcagccaacatctgtacggcccggaagccctgcgccaggtgacgaagcatgccgaacatgtggtgaacagcctgaatgcggaagccaaactgccgtgcaaactggtccttaagccgctgggcaccaccccggacgagatcacccatatctgccgcgacgccaactacgatgacaaatgcgccgggttagtggtctggctgcataccttctcgccggcaaaaatgtggatcaacggcctgaccatcctcaataagccgctgctgcagttccatactcagtacaacgccgcgctgccgtgggacagcatcgatatggactttatgaacctgaaccagaccgcgcacggcggccgcgagttcggcttcatcggcgcccgcatgcgccaacagcacagcgtggtcaccggccactggcaggataaagaggcccaccagcgtatcggcggctggatgcgtcaggcggtctccaaacaggatacccgtcatctgaaagtgtgccgtttcggcgataacatgcgcgaagtggcggtgaccgacggcgataaagtcgccgcgcagattaagtttggcttctcggtgaacacctgggcggtcggcgatctggtgcaggtggtgaacagcatcagcgacggcgatatcagcgccctggtcgatgaatatgagagcagctaccgtctgaccccggcggcgcaggttcacggcgagaagcgccagaacgtgctggacgccgcgcgcattgagctggggatgaaacgcttcctcgaacagggcggtttccacgcctttaccaccacctttgaagatctccacggcctgaaacagctcccgggtctcgccgtacagcgcctgatgcagcagggctacggctttgccggcgagggcgactggaaaaccgccgctctgcttcgcatcatgaaggtgatgtcaactggtctgcagggcggcacctcctttatggaggattacacctaccacttcgacaatggtaacgatctggtgctcggctcgcacatgctggaagtgtgcccgacgatcgccactgccgagaaaccgatcctcgacgttcagccgctgggcatcggcggcaaagcggatccagcgcgcctgatcttcaatactcaaaccggcccggcgatcgtcgccagcctgatcgacctgggagaccgcttccgtctgctggtcaataccatcgaaaccgtcccaacgccgcacgatctgccgaagctgccggtggccaacgccctgtggaaagcgcagccggatctgcgtaccgcgtcggaagcctggatcatcgccggcggcgcgcaccataccgtcttcagccatgcgctgaacctcgacgatatgcgccagttcgccgagctgcatgatatcgagctgaccgtcatcgacaacgatacccgtctgccgtccttcaaggacgcgctgcgctggaatgaagtgtattacggttcaaaacgctaa

SEQ ID NO: 267757 - DNA, 1710 bp, Klebsiella pneumoniae
atggcaattgcgattggcctcgactttggtagtgactcagtccgcgctctggcggtggaatgcgcgtccggcgcagagctggcgaccagcgtggagtggtatccgcgctggcgggaaggacagtattgcgatggcgctaacaaccgcttccgccatcacccgcgagattacatcgagtccatggaagcggcgctgaaaagcgtgctcgcttcgctgagcgccgaacagcgcgccgacgtcgtgggcattggcgtcgacagcaccggctcaactccggctcccgtcgatgccgagggcaacgtgctggcgctgcgcgaagaattcgctgacaaccctaacgccatgtttgtcctgtggaaggatcacaccgcggtcgaggaagccgaggcgatcacccgcctgtgccaccagccgggcaaagaggattactcgcgctatatcggcgggatctactccagcgaatggttctgggccaaaatccttcacgtcacccgcgaagatagcgccgtcgcccaggcagccgcctcgtgggtagagctttgcgactgggtgcccgccctgctctccggtactacgcgtccgcaggatctgcgccgcggccgctgcagcgccggacataaatcgctgtggcatgagagctggggcggtctgccaccggccagcttcttcgatgagcttgatcccatcatcaaccagcatctggcctggccgctgttcaccgatacctggacggccgatgtgccggtcggcacgctgagcgcagagtgggcccagcgcctgggtctgtcgcagagtgtggccatctccggcggcgccttcgactgccacatgggcgccgttggcgccggcgcgcagcctaacgcgctggtgaaagtcatcggcacctccacctgcgacattctgatcgccgataaagagagcgtcggcgagcgcacggtcaaaggcatctgcggccaggtcgacggcagcgtggttccacactttatcggcatggaggcaggccagtccgccttcggcgatatttacgcctggtttggccgcattctcggctggccgctggagcagctggctcagcagcagccggcgttgcgcgagcaaatcaaagccagccaaaaacagttactgccggcgctcaccgaagcctgggccaacaatccatcgctggagcatctgccggtggtgctcgactggttcaacggccgccgcacgccgaatgccaaccagcgcctgaaaggggtgatcaccgaccttaacctggccaccgacgcgccggcgctgttcggcggtctgatcgccgccaccgccttcggcgctcgcgccattatggagtgcttcaccgagcaggggatcccggttaacaacgtcatggcgcttggcggtatcgcgcggaaaaaccaggtcatcatgcaggcctgctgcgacgtgctgaaccgtccgctgcagattgtcgcctccgatcagtgctgcgcgctgggggcggctatcttcgccgccgtcgccgccggcgtctatgacgatattcctgccgcccaacagcggatggcaagccaggtggaaactaccctgcagccgcgtccggcgcaggcacagcgtttcgaacaactctatcagcgctaccagcaatggtcggtcagcgcggaacaacactatctcccttcggctgcaaaggcggaaaaagccccgcaatctcaggcagcgctcacccattaa

SEQ ID NO: 267758 - DNA, 846 bp, Klebsiella pneumoniae
atggccgaaacgcaaaacgatccgctgctgccgggctactcttttaacgctcatctggttaccggcctgacgccgattgaggcgcagggatacctggatttctttatcgaccgcccgctgggtatgaaaggctatattctcaatctgacgatccgcggcgagggggtgatcaacaaccacggcgaacagtttgtctgccggccgggcgatatgctgctgttcccgcccggggaaattcatcactatggccgccatcccgacgccagcgagtggtatcaccagtgggtctacttccgcccgcgcgcctactggcacgagtggctcaactggccaacgatttttgcccagaccggctttttccgtccggatgaacagtggcaggcgcgctttggcgagctgttcggccagatcgtcgatgccgggcagggggcggggcgctattccgaactgctggcgataaacctgctggaacagctgctgctgcggcgcatggaggcgatcaacgaatcgctgcatccgccgctggacaaccgggtgcgcgacgcctgccagtacatcagcgaccatctggcggacagccattttgatatcgccagcgtcgcccagcacgtctgcctgtcgccctcgcgtctgtcgcacctgttccgccagcagctgggggtcagcgtcctcggctggcgggaggatcagcgcatcagccaggccaaactgttgctcagcaccacgcggatgccgatcgccaccgttgggcgcaacgtcggcttcgaagatcagctctatttttcccgcgtgtttaaaaaatgcaccggggccagcccgagcgaattccgcgcgggttgtgaataa

SEQ ID NO: 267759 - DNA, 768 bp, Klebsiella pneumoniae
atgcaagcattgctcgaacactttattacccaatccacggtctactcattgttagccgtgatgctggtggcctttctcgagtcgctggcgctggtagggcttatcttacccggcacggtgatgatggctggccttggggcgctcatcggcggcggcgaagttaacttctggcaggcgtggctggcggggattgtcggctgcctgctgggcgactggatctcattctggctcggctggcgctttaagaagccgttgcaccgctggtcgtttatgaagaaaaaccgcgccctgctggagaaaaccgagcatgcgctgcatcagcacagcatgatcaccattctgattggccgctttgtcggaccgacgcgtccgctggtgccaatggtcgccgggatgctcgacctgccggtggccaagttcgtgctaccgaatattatcggctgcctgctctggccgccgctctatttccttccgggcattctcgccggggcggcgattgatattccggctgatgaaaacagcgccagctttaaatggctgctattgggggcggcgctgctggcctggctggcgggatggctgtgctggcggctgtggcggagcgcgaaaacctcaggcgatcggctgacccgctggctgccgcgcggccgactgctgtggctgtcgccgctgatggtcgcgctggcggctacagcgttaacatttgtcttccgccatccgctgatgccggtctatctggcgatcctgcataaagtcatcgcgcgctga

SEQ ID NO: 267760 - DNA, 702 bp, Klebsiella pneumoniae
atgctaaaactcaatgatgtgacctggctataccagcatctgccgatgcgcttcaccctcgacgtcgcgcgcggggagcgcatcgcggtgctcggccccagcggcgccggaaagagcaccctgctgaatctgatcgccgggtttctgccgcccgccagcggcagcctgctgattaacggcgaggcgcataacgcgacgccgccggcgcagcgtccggtctcgatgttgtttcaggagaataacctgtttaaccatctgaccattcgacaaaatatcagcctcggcatccacccaggccttaaactgaaccgcgagcagcaggcgcaggtcacggcgatagctggacagatgggaattgatgcgctgctggaacgtctgcccggcgagctctccggcggtcagcggcagcgcgcggcgctggcccgctgtctggtgcgccagcagccggtgctgctgctggatgaacccttctcggcgctcgatccggcgctgcgccaggagatgctgtccctggtcgccgatgtctgcgagcagcagcagctcaccctgctgatggtctcccacagcgtagaggacgccgcgcgcatcgcgccgcgctcgatggtggtcgccgaagggcgcattgtctgggatggcgccaccgccgagctgttaagcggccacagcagcgcctcgcatttgatggggatcagcgcgcgatga

SEQ ID NO: 267761 - DNA, 1611 bp, Klebsiella pneumoniae
atggcaacgcgccgtcagccgctaaaccttcgcgggctgatgccgggcctgttcgccgctacgctgctgtgcgctgtcgcgctggcggcgtttctggcgctgtggtttagcgcccccggcgcgggctggcaatcggtcttcagcgatagctacctgtggcatgtggtccgcttctccttctggcaggcgtcgctgtcagcgctgatctcggtgggaccagccatctttctcgctcgcgcgctttatcggcgtcgcttcccgggccgtacgctgctgctgcgcctgtgcgcgatgaccctgatcctgccggtgctggtggcggtgttcggcatcctcagcgtctatggccgccagggctggctggcctcactatttcacgcgctcggctggcaatgggagttctcgccctacggtctgcagggcatcctgctggcgcacgtctttttcaatatgccgatggcgacccgcctgctgctgcaggcgctggagaacattcccggcgagcagcggcaaattgccgcccagcttggcatgcgcggctatgccttcttccgcctcgtcgaatggccgtggctgcgccggcacattcccgccgtcgccgcgctgatttttatgctctgctttgccagcttcgccaccgtactctcgctgggcggcggccctaaagccaccacgatcgagttggctatctaccaggcgctgagctttgactacgatccggcgcgagcggcaatgctggcgctgatccagatgctctgctgccttgggctggtgctgcttagccagcgtctgagtaaagccgtcgccatcggcgtcagccatgtgcgcggctggcgcgaccctgacgatcgcctgcatagccgcctgagcgacgggttgctgatcggcgccgccctgctgctgctgctcccgccgctgctggcggtcatcgtcgacgggatcaaccgtaatatgctggacgtgctggcgcagccagcgctctggcaggcattgagcacctctctacgcatcgccatcgccgccgggctattgagcgtgaccctgacgatgatgctgttatggagcagccgggagctgcgctctcgccagcggccgttggccgggcaggcaatggagctgagcggcatgctgatccttgcgatgccgggaattgtgctggcgaccggcttcttcctgctgctcaataacactatcggcctgccggagtccgccgacggcatcgtcatcttcactaatgccctgatggcgatcccctatgcgctgaaagtactggaaaacccgatgcgcgacattgccgcccgctacagcatgctgtgccagtcgctgggtattgaaggctttgcccggctgcgggtggtcgagcttcgcgctctccggcgcccgctggcccaggcgctcgccttcgcctgcgtactgtcgattggcgatttcggcgtggtggcgctgttcggcaacgaggcgttccgcaccctgcctttctatctgtaccagcagataggcgcctaccgcagccaggacggggccgtcaccgccctgctcctgctgctgctctgtttcttgttgtttacgctgattgaaaaacttccggggcgtgatgctaaaactcaatga

SEQ ID NO: 267762 - DNA, 984 bp, Klebsiella pneumoniae
gtgttgaaaaaattactcccgctgctggcgctggtcgccatgcccgctttggctaagcctgttcttaccgtctatacctatgactccttctctgccgactggggccccggcccggcggtcaaaaaagcctttgaagcggagtgcggctgcgagctgaagttcgtcgcgctggaagatggcgtttcgctactgaatcgcctgcgcatggaaggcaaaaacagcaaggccgacgtcgtacttggccttgataacaacctgctggaagccgcggcgcagagtaaactgtttgccaaaagcaacgtacccgccagcgcggtcagcgtgccgggcggctgggataatgacacctttgttccctacgactatggctatttcgccttcgtctatgacaaaaacaaactggctaatccaccgaagagcctgaaagagctggtcgaggggccgcaaaaatggcgggtcatctatgaagatccgcgtaccagcaccccgggactgggcctgctgctgtggatgcaaaaggtctatggcgatcaagcgcccgaggcctggcagaagctggccgcgaaaaccgttaccgtcaccaaaggctggagcgaagcctatggtctgttcctgaaaggggaaagcgacctggtgttgagctataccacctcgccggcctaccacatgattgaagagaagaaagacaactatgcggcggcgagcttcgccgagggccactatctgcaggtcgaagttgccgcgcgtaccgccgccagcaagcagccggaactggcggaaaaattcctcaaatttatggtctctcccggcttccagaacgccatccctaccggcaactggatgtatccggtgacccaggtcaccctgccggccgggtttgataccctggtgaagccgcagaccaccctgtcctttaccccgcagcaggtcgccagcgagcgtcaaacctggattagcgcatggcaacgcgccgtcagccgctaa

SEQ ID NO: 267763 - DNA, 1656 bp, Klebsiella pneumoniae
atgtcttccggccgtctgcaacaacagttcattcgcctatggcagtgctgcgacggcaagtcgcaggagaccacccttaacgagctggcggaaatgctgagctgctcgcgccgccatatgcgcaccctgctcaatatgatggagtcccgcggctggctgacctgggaagcggaggcaggccgcggcaagcgttcgcggctaacctttctctataccggcctcgccctgcagcagcaacgtgccgaagatctccttgagcaggatcgcatcgatcagctggtgcagttggtcggcgataaggctgccgtccgccagatgctggtctcgcatctcggccgcagcttccgccaggggcggcacatcctgcgcgtgctctactatcgtccgatgaagaatttgctgccaggtagcgcgctgcggcgttcggaaacgcatattgcccggcaaatattcagcgccctgacgcgggtaaatgaggaaaatggggaactggaagccgatattgcccaccactggcagcagctgacccccacccactggcgctttttcctccgtcccggcatccattttcaccatggccgtgagctggagatggcggatgtgatcgcctctctgcagcgcagcaatgccctgccgctctattcacatatcgaacgcatcgaatcgcccaccgcctggaccctggatattcatctgcgccagcccgaccgctggctgccctggctgctggggcaggtgccggcgatggtgctgccgcaggagtggcagaccatgaaccacttttcctccatgccggtcggcaccggcccctatgccgtggtgcgtaacaaccagaatcagctcaagatccatgcctttgaggactattttggctaccgggcgctgatcgatgaggtgaacgtctgggtgctgccggagattagcgaagagcccaacggcggcctgacgctgcagggcaataccgaaagcgaaaaagcggtagagagtcgcctggaagagggctgctattacctgctgttcgactcgcgaagcccgctgggggccaacgacgcggtgcgccgctggctaagctatctgtttcagcccgccaacctgctctaccatgcgggcgaacactaccagggcaactggtttcccgcctacggcctgctgccgcgctggcatcacgccagcaaccacgcctgcgagaagccggcggggctggagacagtcacccttacctactaccgcgatcacgtcgaacatcgggtgatcggcgggatcatgcgcgacctgctggcggcgcatcaggtaaagctggagatccaggagctggagtacgatgcctggcatcgcggcgagggggtcagcgatatctggctcaacagcgtgaacttcaccttaccgatcgaattttcgctcttcgcctatctgtacgaagtcccgctgattcagcgctgcattcccattgactggcaggcagacgcctgccgctggcgagcaggagagtttaatccggccacctggagccagcggctgctggccgggcaacatatcgtgccgctgatccaccactggctgatgattcagggtcagcgcagtatgcgcggcgtgaggatgaataccctcggctggttcgattttaaatccgcatggtttgcgccgccggagccgtaa

SEQ ID NO: 267764 - DNA, 153 bp, Klebsiella pneumoniae; identical to SEQ ID NO: 137091

SEQ ID NO: 267765 - DNA, 1185 bp, Klebsiella pneumoniae
atgctgtggttgatgacgatgggacgacggcttaacggcgtctatgccgcctttatgctggttgcttttatgatgggcgtggcgggcgcgttgcaggcgccgacgttgagtttgtttctcagccgcgaagtgggggcgcaaccgttctgggtgggcctgttctataccgtaaacgccatcgccgggatcctggttagcctgtggctggccaagcgctccgatagccgcggcgaccggcggcggttgattatgttctgctgtctgatggcggtgggtaatgcgctgctgtttgccttcaaccgccactatctgacgctgatcacctgtggcgtgatgctggcatccattgccaacgcggccatgccgcagctcttcgcgctggcgcgggagtacgccgacagctcggcgcgggaagtggtgatgttcagctcggtcatgcgcgcccagctgtcgctggcttgggtgattggcccgccgctggcctttatgctggcgctcaactatggcttcaccaccatgttctccattgcggcgggcatttttgtcattagcctcgctctgattgccatcaaactgccttcggttccgcgtgtggaacagccctcggaggaggcggcggcgctagcgcaggccggcggctggcaggacaagaacgtgcgtatgctgtttatcgcctccaccctgatgtggacctgcaacaccatgtacatcattgatatgccgctgtggatcagcagcgatctcgggcttcccgacagcctggccgggatcctgatgggcactgccgccgggctggagataccggcgatgatcctcgccggctactacgtaaagcgctttggcaaacgtaaaatgatggtggcggcggtggccgccggcgtgctgttttatgccggactgatcctgtttcatggtcgcacggcgctgctggctctgcagctgttcaatgccatctttatcggcattatcgccgggataggcatgctgtggttccaggatttaatgccgggacgggcgggagcggcgaccaccctgttcaccaacagtatttccaccggcgtgatccttgccggcgtgatgcagggggcgctgtcccagagctatggtcacgccagcgtctactggacgatcgcggccatttcgctggtgacgctgtttttaaccagcaaggtgaaggatatctga

SEQ ID NO: 267766 - DNA, 1311 bp, Klebsiella pneumoniae
atgagtatgtcaaactctcaggaagtcctcacttccacatcgggggcgaaaaaaagaagccgcgtacggatagttattctgctgctactctccgtcggaacgatgatcaattatctcgaccgtaccatcctgggtattgtagcgccacagttaagcaaagaaatccatatcgatccggcgatgatgggcatcatcttctccgccttcgcctggacttatgcgctggcgcagatccccggcgggatgtttttagaccgctttggcaacaaactgacctatgccctgtcaattttcttctggtcgctgtttaccctgctgcaaagtttcaccctcggcctaaaatccctgctgcttctgcgcctgggactcggcgtcagcgaagcgccctgctttccggccaacagccgcatcgtcagcacctggttccctcagcatgagcgcgcgcgggcaacggcaacgtatacagttggtgaatatatagggctggccgctttctcgccgctgttatttttaattctcgaacatcatggctggagaacgctttttttcctcaccggcggattaggtattttatttactttagtgtggtggcgtttttatcatgaaccgcatgaatcgcgcacggctaatcaagcggagctggattatatcggcgcaaacagcattaacaataaaattcagaacgttccatttaactggcgtgacgccagacgcctgctgggctgtcgccagatcctcggcgccagcctgggtcagttcgccggcaacaccacactggtctttttcctgacgtggtttcccagctacctcgccaacgagcgccatcttccatggctgcacgtcggcttcttcgccacctggcccttccttgccgccgcgattggcatcctcttcggcggctggatctccgaccggttgttgaagcgaaccggctccgtcaacatcagtcgaaagttaccaataatttccggtttattgctgtccagctgtattatcgcggcgaattgggtaagcgccaatagcaccgtaattattatcatgtcggtggctttttttggccaggggatggtcggtctgggctggaccttaatttctgatattgccccggaaaatatggcaggcctcaccggcggcatatttaatttctgtgccaatatggcctcgattatcgcaccactgataattggtgtgattatttccgccacgggtaatttcttttacgcgctgatctacgtcggcctgacggcgctgattggggtgattgcctacatttttatcattggcgacattaagcgtatcgaactcaagtag

SEQ ID NO: 267767 - DNA, 897 bp, Klebsiella pneumoniae
atgaacctaaagcaactttattattttaaacgtctgtctgaaactgagcattacaccgaagccgcctccagtctgtgcatcacccagccctcgctaagccacgcgatatcggagctggagaaggagttaggggtcgcgctattcgccagacaggggcggaacgtaaaaattacccaaaacggcaagcgttttttgccgtatgttgaagatgcgctggcctcgctggagaacggacgcatgatattgcaaaaaaatggcgctgagaataaagagaatattcgcatcgcctttatttacacgatgggggagtatgttgttccacagttaattaataaatattctctttcacctgaatgtcacaatgtgactttttcttttactcaagggacatcgctgacgctgttgcaggagctgaaggccggaaaagtcgatctggcgatctgctcttatattgccgatgaacccgatatcgattttattccggtgatccagcaggaactggtggtggtcacggcaaaggatcatccgctggcccggctatatgaacatgaagtcgatctggtggagacgattcattatccgtatatctatttttcagaaaatagcggcttacgtccgtttatcgataatgtatttatgcagcaaaagctggtgccggagatcgcctgctatgtggatgaggatacggcgatggccgggctggtgagtattgactacgggatcgcgattatgccgcgcattaccgcgctctcctattacaacgtccatatcctgaagattaaaaacaccatccccccccgctatatctatctggcgaccatgaaagacaaggggctctctccggcgctggagtcatttaaaaatgtggttatccacgatagccagaagatctgttaa

SEQ ID NO: 267768 - DNA, 756 bp, Klebsiella pneumoniae
atgacaaatgcagtaaccgtaaagaacatcaccttccaggaaggggaaaccctcatttgtgtaccgctgatcggtaaaaccctggatgagatactgggtaacgcccacggcctggtcgatgccggcgccgatattatcgaatggcgcgttgaccactttgcccaggtcagagagatggcccaggtgatggccgcgctggcggaaatccgtggcgcgctgaaagcgcttccgctgctgtttaccttccgcagtaagaaagaaggtggcgaaactgagctcagcgacgaagcctattttgcgctcaaccgcgaggccgcacgcagtggactggttgatgttatcgatatcgaactgttcaatgatgaagcgcagatccgcgcgctggttgacgatgcgcatgccgcgggcgtcaaggtgatcatgagtaatcatgattttcataagacccccgctcaggaagatattatctatcgcctgcgccgcatgcaggatctgggggccgatctgccgaagatcgcggtgatgccgcagtcgccgcaggacgtactcaccttgctcgccgccacgctgactatgaaagagaagtatgcgacgcgtccgctgatcaccatgtcgatgggcaaatccggtggcgttagccgggtcaccgggcgcttgttcggttcggcgatgaccttcggtaccgttggtcaggcctccgcgccggggcagatcgccatcgctaagctgcgtgaagtgatggatattctctcctga

SEQ ID NO: 267769 - DNA, 1215 bp, Klebsiella pneumoniae
atgaaaaataaatacatccctactgcggcagggctgtacctcaactacctgatccacggtatgggggtgctgttaatcaccctcaacatggcccatcttcaggaacagtggggaacggacgcggctggcgtatcggtggtgatctcctcgttaggtatcggcaaactggcaaccatcgtgaccggatttctctcggatcgcttcggtcgcaagccctttatctatcttgggatcctgagctacctgatctttttcgtcggcatcctgctgaccaaaaatatctatctggcttacgtgttcggcattatggcgggcctggcgaacagcttcctcgactccggtacctatccggcgctgatggaatctttcccgcactctgccagccgggccaacgtgctgatcaaagccttcgtttctgcagggcagttcctgttgccgttcattatcagcttcctgatatgggcaaatctgtggttcggctggtcgttcgtgattgcggcagcgctttttgtactgagcgggatttatctgcttaaaatgccgttccctgacagccaggcggcgaaaaaagaggaagcccctacggcacaggcggaaacagccgtccggccacaggctaataagctggatatggtgatcttcaccctgtacggttatatcggcatggcgaccttctatctggtcagccaatggctggcgcagtacggccagttcgtcgtcggcctgccctatgcctcggcgattaaactgcttagcatctataccgtcggctcgctggtctgcgtctttgtaactgccgccttcgtcaaagaggtgtttagctcggccattgcgatgattatttatactggcctgtcgatgatttcgctgctgttggtgtgcctgttcccgacgccgatgatggtgaccggctttgcttttgtcatcggctttgccgccgctggcggagtgctgcagctgggtgcgacaatcatggcgatgagcttcccgaacggaaaaggcaaagcaaccggcatcttctacactgccggcagtatcgccagcttcacgatcccgttgatcaccgcaaagctttcgcagatcagtattgccagcattatgtggtttgattttctgatcgccgttatcggctttgtgatcgccctgtacatcggctatcgtcaactgcaggctcgggcggcgcaaaaagtgtcacgcaccgcagtcaccgcctga

SEQ ID NO: 267770 - DNA, 864 bp, Klebsiella pneumoniae
atggcagaacgtattactggacacactgagctgattggcctgatcgccaccccgattcgtcacagcatgtcgcccaccatgcacaacgaggctttcgcccatctcgggctggactacgtctatctcgcttttgaagtcggtaaccaggagctaaaagacgtggtgcagggcttccgggcgatgaagctgcgcggctttaacgtctctatgccgaacaaaaccgagatttgccagtatctcgataaactgtcgccggcggcacagctggtcggggcggtcaataccgtggtcaacgacgacggcgtactgaccggacatatcaccgatggcaccggctacatgcgcgcccttagtgaagccggtatcgatatcatcggcaagaagatgaccgtactcggcgccggcggcgcggcaacggcgctctgcgtccaggcagcactggatggcgtgaaggcgatctccatctttaaccgtcgcgataaattcttcgctaacgcagaagaaaccgtggccaagatccgccacaacaccgactgcgagatccatctgttcgatctcgacgatcatgacaaactgcgcgccgaaattgacagcagcgtgatcctgaccaatgccaccggggtcggcatgaagccgttcgaaggccagatgctgctacctgacgacagcttcctgcgtccggacctgatcgtctccgacgtcgtctacaacccgcgcaaaacccacctgctggaagtggccgagaaaaaaggctgccgcacgctgaacggcctggggatgatgctgtggcaaggcgcgcgcgcgttcgaaatctggacgggcaaacagatgccggttgattacatcaagagcattctgttctaa

SEQ ID NO: 267771 - DNA, 2034 bp, Klebsiella pneumoniae
atgagccactatccgcaccttttcagtccgttgaccatcaacggtatgacgttaaaaaaccgcattattatgccccctatgggcaccaatatggccacgctcaatggcgaggtgtcgcaggaacagctggaatactacgaactgcgggccaaaggcggcaccgggcttatcaccatcgaaaatatttgtattgatttccccttcgcctccaacggcaccacccaactgcgcatcgataacgatcaatatattccacggctgtttaaattaaccgagaccctgcataaacatggcgcctgcgtatccattcagttaaatcatgccggcgcttccgcttatgcctaccgactggaaggccagacgccgctctcctcttctacaacgccgtcgaagaagcacggtaatattccgcgtccgatgacccatgaggaaatatatcatgcggtagaaaaatttggtgacgccgcggagcgcgttcggcgcgcaggttttgactgcgtcgaaattcatgccggtcactcctatttaattagccagtttttatcgccgctgtttaataagcgcactgatgaatttggcggcagcgtcgaaaatcgcacccggatattgagtctgattgtcgataaagtgcgcgcctgcgtggggccgcgttttccggtcagcctgcgcatcagcgccgacgacttcctcaagggcggcaataccctcgaagattccctgcgtattcttgagctctgccaggagaaggtcgatatcatcaacgtctctgcggcgcagaacgacaacctgaatctgcaaatcgatcagatgtcgctggaggatggctggaagcgctatctctcccgcgcggtgcgcgataaattccataaacccacggtcatcgccggcaatattcgcactccgcaggtagccgaagatatcctcgccagcggcgatgccgatcttatcgccattggccgcggtctgattgccgagccggagtgggtgcagaaagtgcaaggcggaaaagagcgtctgatgcgcaaatgtatctcctgcaacatcggctgcgccgaccatcgcatcgcccgctcgcgcccgctgcgctgttcgattaacccggatattattcacggtgacgcctataaaatgcggcgcgtgaatcgcgacactaacgtggtggtcatcggcgccggcaccgccgggatggaagccgcctgcaccgcggcggaagttggttgccatacctggctgctggaagcgaaaaaccacgtcggcggcctcgccagcgaaatctcccgcctgccggagaaaaaacgcatcgctgatttcccgcagtttatgaaaaatcgtatcgcctcgctggacaacctgatgctgcagatcggcaagcgggccgacgtggcttcagtttccgccctgcgtccgcatctgattgtcaacgccaccggctcaacgccgctgctgccgcccattgaaggcttgcgggaaaacattgacgtcgagaacggcaagatcttttccattaccggcatgatcgacaatctggcgaaatttaccgatatcaagggcaaacgcatcgccgtagtcggcgccggcgccgttggccttgacgttatcgaatactttaccgctcgcggcgcacaggcggtgctaatcgagatgcaggacgccgccggccgcgatctcgacatcattaccaaaaatgccatgttgaccatgctcgacgagcaccaggtcgaacagcacatgaatacccaactgatggcggtcgctgccgaccatttccaggtgaaaaatacacagcaaaccttcgatattcccttcgactacggctttgtctgtctggggatgcgcgccaaccggacgggtctcgacgagatcgagcgctgggccaatgccaataacgtcaaaatcatgaacatcggcgacagcgtgatggcgcgacgcattatcgatggcgtccgcgaaggccgcaacgtactggatgcactggaagacatgggtgcgctgggcagcagcgaagcacaacgaattccctttctaacttattga

SEQ ID NO: 267772 - DNA, 606 bp, Klebsiella pneumoniae
atggcagagaaatttacccaacataccggcctggtggttccgctggatgctgcaaacgtcgataccgacgcgatcatccctaagcaatttttgcagaaggtcacccgcaccggctttggcgcgcacctgtttaacgactggcgctttctcgacgataaaggtcaacagccgaacccggagttcgtgctgaattttcctgagtaccagggggcatcgatactgctggcgcgggaaaacttcggctgcggctcctcgcgcgagcacgcgccgtgggcgttgaccgattacggctttaaggtcgttatcgccccgagctttgccgatatcttttacggcaacagcttcaataaccagctgctgccggtgaccctgagcgacgagcaggtcgatgagctgttcaagctggtgcaggccaacccgggcattacgtttgaagtggatctggaagcgcaggtagttaaagccggggataaaacctacagctttaagatcgacgatttccgccgccactgcatgctcaacggcctggatagcatcggcctgacgctgcaacatgaagcggcgatctccgactatgaacgcaagctgccggcgtttatgaattaa

SEQ ID NO: 267773 - DNA, 1401 bp, Klebsiella pneumoniae
atggcgaagacgttatacgaaaaattatttgatgcgcacgtagtgtatgaggcgcagaacgaaaccccgctgctgtatatcgaccgccatctggtgcacgaagtcacctctccgcaggcgtttgacggtctgcgcgcccatggccgccaggtgcgccagccgggtaaaaccttcgctaccatggatcataacgtctcgacgcagaccaaagacattaacgcgtccggtgagatggcccgcattcagatgcaggagctgattaagaactgtaaagagttcggcgttgaactgtacgacctgaaccacccgtatcagggcatcgtccacgtcatgggcccggaacaaggggttaccctgccggggatgacgatcgtgtgcggtgactcccataccgccacccacggcgcgttcggtgcgctggcgttcggtatcggcacctccgaagtggagcatgttctggcaacccagaccctgaaacagggccgcgcgaagaccatgaaaatcgaagtccagggcaaagcggcgccgggcattaccgccaaagatatcgtgctggccatcattggtaaaaccggtagcgccggcggcaccggccatgtggttgagttctgcggcgaagcgatccgcgatctgagcatggaagggcgtatgaccctgtgcaacatggcgatcgagatgggcgccaaagcgggcctggtcgcgccggacgaaaccaccttcaattacgtacgcggccgtctgcatgcgccgaaaggcaaagattttgacgatgccgtagcgtactggaaaaccctgaaaaccgacgacggcgcgacgtttgataccgtggtgacgctgcaggcggcggaaattgccccgcaggtgacctggggcaccaacccgggccaggtgatctcggtgacggataacatccccgatccagcgtcgttcagcgatccggtggaacgcgccagcgccgaaaaagcgctggcctatatggggctgaaatccgggatcccgctgacggaagtcgctatcgataaagtgtttatcggctcctgcaccaactcgcgcatcgaagatttacgcgccgcggcggaaatcgctaaagggcgtaaagtggcgccgggcgtccaggcgctggtggtgccgggttctggtccggtgaaagcgcaggcggaagcggaaggtctggataagatctttatcgaagccggctttgagtggcgcttacctggttgctctatgtgtctggcaatgaataatgaccgcctgaatccgggcgaacgctgtgcctcaaccagcaaccgtaactttgaaggccgtcagggccgcggcggacgcacgcacctggtgagcccggcaatggccgcggcggcagccgttaccggccatttcgccgatatccgtaatctgaagtaa

SEQ ID NO: 267774 - DNA, 1092 bp, Klebsiella pneumoniae
atgtcgaagaattaccatattgccgttttgccgggtgatggcattggcccggaagtgatgaaccaggcgatgaaagtactggaagccgtgcgccaacgttttgccatgcacattaccaccagccagtacgacgttggcggggcggccatcgaccgtcagggaactcccctgccgcaggcgaccgtcgccggatgcgagcaggcggatgcgatcctgttcggctccgtcggcggtccgaaatgggagcacctgccgccggcggaacaaccagagcgtggcgcgctgctgccgctgcgtaaacactttaaactgttcagcaacctgcgcccggccaaactgtatcaggggctggaagagttctgcccgctgcgcgccgacatcgctgctaacggcttcgacattctctgcgtacgcgaactgaccggcggcatctacttcggccagccgaaaggccgcgaaggcagcggtcagcatgagaaagcctttgataccgaggtgtatcaccgctttgagatcgagcgtatcgcgcgcatcgcttttgaatccgcccgcaagcgtcgtcacaaagtgacttccatcgataaggccaacgttctgcagtcctccatcctgtggcgcgaaatcgtcagcgagatcggcaaggagtatccggacgttgagctggcgcatatgtatatcgataacgccaccatgcagctgattaaagatccgtcccagttcgacgtgctgctgtgctccaacctgtttggcgacatcctctccgacgagtgcgcgatgatcaccggctcgatgggtatgctgccgtccgccagcctcaatgaacaaggttttggcctgtacgagccggcgggcggttccgcaccggatatcgccggcaaaaatatcgccaacccgatcgcgcagatcctctccctggctctgctgctgcgctacagcctcgacgctgacgaagcggcgaccgccattgaaaacgcgatcaaccgcgccttagaagaaggggttcgaaccggcgacttagcgcgcggcacggcggcggtcagcactgatgaaatgggcgatattattgcccgctatgtcgcagaaggggtgtaa

SEQ ID NO: 267775 - DNA, 1572 bp, Klebsiella pneumoniae
atgagccagcaagtcattattttcgatacgaccttacgtgatggcgaacaagcgttacaggcaagcctgagtgtcaaagagaagctgcagatcgcactggcccttgagcgaatgggggccgacgtaatggaagtcggtttcccggtatcctcgccgggcgattttgaatcggtgcaaaccatcgcgcgcaccattaaaaacagccgcgtgtgcgccctggcgcgctgcgttgagaaagatatcgacgtggcggcggaatcgttaaaagtggccgaggctttccgtattcatacctttattgccacctcgccgatgcatatcgccaccaaactgcgcagtacgctggatgaggttattgagcgcgcgatctatatggtgaagcgggcacgcaactacactgacgacgttgagttctcctgtgaagacgccggccgtacgccgattgccgatctggctcgcgtcgtggaagcggcgatcaacgccggcgccaccaccattaatatcccggataccgtcggctataccatgccgttcgaatatgccaacatcatcagcggcctgtatgatcgcgtgccgaatatcgacaaagcaattatttccgtccacacccatgatgatctgggcatcgctgtcggtaacgccctcgccgcggtccacgccggtgcgcgccaggtagaaggtgcgatgaacggtatcggcgaacgcgccggcaactgcgcgctggaagaagtgatcatggcgatcaaagtgcgcaaagacatcatgaacgtgcacaccaacattaatcatcatgaaatctggcgcaccagccagaccgtcagccagatctgcaatatgccgatcccggcgaacaaggccatcgtcggcaccggcgccttcgcccactcctccggcattcaccaggacggcgtgctgaagaaccgcgaaaactacgagatcatgaccccggaatctatcggcctgaaccaggtgcaactgaacctgacttcccgctccggccgcgcggcggtgaaacaccggatggaagagatgggctaccaggagagcgattacaacctggatcatctgtacgacgcattcctgaagctggcggacaaaaaaggccaggtcttcgattacgatctggaagcgctggcctttattaacaagcagcaggaagagccagagcatttccgcctggattacttcaacgtccaatccggatccagcgatatcgccaccgcctcgatcaaactggtctgcggggatgagatcaaaaccgaagccgccaacggcaacggtccggtcgatgctatctaccaggcgattaaccgcgtcaccgactacaacattgaattagtgaagtatggcttaagcgcgaaaggccacggcaaagacgccctgggccaggtggatatcgtcgttgactacaatggccgccgcttccatggcgttggtctggcaacggatatcgtagagtcgtcagccaaagcgatggttcacgtgctgaacaacatctggcgcgccgccgaagtcgaaaaagaattgcaacgcaaagctcagaataaagagaacaataaggaaaccgtgtaa

SEQ ID NO: 267776 - DNA, 951 bp, Klebsiella pneumoniae; identical to SEQ ID NO: 138455

SEQ ID NO: 267777 - DNA, 1725 bp, Klebsiella pneumoniae
atggagatgttgtcaggagccgagatggtcgtccaatcgcttgtcgatcagggcgtcaagcaagtattcggctatcccggaggcgcagtcctcgatatctatgatgcgttacatacccttggcggtatcgatcatgtgctggttcgtcacgagcaggcggcggtgcatatggcggatggcctggcgcgggcgaccggggaggtcggcgtggtgctggtgacctctgggcctggggcgacgaacgccatcactggcattgcgacagcctatatggactctattccgttggtgatcctctcggggcaggtagccacctcgcttatcggctacgatgccttccaggagtgcgacatggtggggatttcccgtccggtggtgaagcacagtttcctggtgaagcagaccgaagatattcccggcgtgctgaagaaagccttctggctggcggccagcggtcgccccggtccggtagtggtcgatctgccgaaggatattctcaatccggcgaagaagctgccttacgtctggccggacgcagtgagcatgcgctcgtataacccaaccaccagtggccataaagggcagataaaacgcgcgctacagactctggtggccgcaagtaagccggtcgtctacgtcggcggcggggcgatcaatgcgcattgcgaacctcagctgcgcgagctggtggaaaaactgaagctgccggtggcctcatccttgatggggcttggcgctttcccggcgacacactcgcaggcgctggggatgctggggatgcacggcacctatgaagccaacatgaccatgcaccactcggacgtgatttttgccgtcggcgttcgctttgacgaccggaccaccaataacctggccaagtattgtccgaacgcgacggtactgcatattgatatcgatccgacttcaatctcgaaaaccgtgccggcagatgtgccgatcgtcggcgatgcccggctggtgctggagcagatgctggagctgctggagcaggaggaagcgcagcagccgctggacgacattcgcgactggtggcaacagatcgagcagtggcgtgcccgccattgtctgcgctacgacgaccagagcgataaaatcaaaccgcaggcggtaattgaaactatctggcggctgacccagggcgatgcctacgtcacttccgatgtgggtcagcatcagatgttcgccgccctgtattaccccttcgataaaccgcggcgctggattaactccggtggtctcggcaccatgggctttggcctaccggctgcgctgggggtcaaaatggctctgcgggacgaaatggttgtctgcgtgaccggtgacggcagtatccagatgaacattcaggaactctccactgcgctgcagtatgagctgccggtcctggtgcttaacctcaacaaccgctatctcgggatggtgaagcagtggcaggatatgctctattccgggcgtcactcgcagtcctatatggaatcgctaccggactttgtccgtctggcggaagcctatggccacgtcgggatccgcatcagcgagccgcaggagctggagacgaagcttgctgaagctctggagcaggtgcgccagcgtcggctggtgtttgtcgatgtgaccgtcgacggcagtgagcatgtgtaccccatgcagatccgcggcggcggcatggatgaaatgtggttgagcaaaacggagaggacctga

SEQ ID NO: 267778 - DNA, 492 bp, Klebsiella pneumoniae
atgcgccggatattatcggtattactggaaaacgaatcgggcgcattgtcccgcgttatcggcctcttttcccagcgtggctataatatagaaagcctgactgtcgcgccgacggacgatcccactctctccagaatgaccattcagaccgtgggcgatgaaaaagcgattgagcagattgaaaagcaactgcacaagctggtggatgtcctgcgggtcagcgagctggggcagggggctcatgttgaacgcgaaattatgctggtgaaggttcaggccagcggctatggccgtgaagaagtgaagcgcaacaccgaaatcttccgcggacagattatcgacgtgacgccttctatctataccgtccagctcgccggcaccagcgataagctggatgcatttctggcctcgctgcgcgatgtcgctcggattgtggaagtggctcgctccggcgtggtcggcctgtctcgcggtgataaaatcatgcgctaa

SEQ ID NO: 267779 - DNA, 1005 bp, Klebsiella pneumoniae
gtgaaactggatgaaatcgcccggctggccggtgtttcaagaaccaccgcgagctatgtgattaatggcaaagcgaagcagtaccgcgtaagcgataaaacggtcgaaaaagtgatggctgtggtgcgagagcacaactatcacccaaatgcggtcgctgctggcctgcgtgcaggacgcacacgctctatcggtctggtgatcccggatctggaaaacaccagctatacccggattgcaaattatctcgaacgtcaggcgcgtcagcgcggctatcagctgctgattgcctgctcggaggatcagcccgataacgagatgcgctgcatcgagcatctgctgcagcgccaggtggacgctatcattgtctctacttcgctgccgccggagcaccctttttatcagcgctgggctaacgacccgtttccgattgtcgccctcgaccgcgccctcgatcgcgagcacttcaccagcgtggttggcgctgaccaggatgacgccgagatgctcgcagctgagctgcggacgtttcctggcgaaacggtgctctatctcggcgcgctgccggagctgtcggtgagcttcctgcgcgaacagggcttccgtaaagcctggcaggacgatccgcgtgaggtgcattatctctatgccaacagctatgagcgcgaagcggcggcccagctgtttgagaaatggcttgaaacccatccgatgccacaggcgctgtttaccacctctttcccgctgctgcagggcgtaatggatgtgaccttgcgtcgcgagggtaaactgccctccgagctggcgatcgccaccttcggtgataatgagctgctcgattttctgcagtgtccggtactggccgtggcccagcgtcatcgcgatgtcgctgagcgggtgctggagatcgtcctcgccagcctcgacgaacctcgcaagccgaagccgggtcttagccgtattcgccgtaatctctatcgtcgcggtagcctgaatcgccgctaa

SEQ ID NO: 267780 - DNA, 459 bp, Klebsiella pneumoniae
atgttccgtggagcaacgttagtcaatctcgacagcaaaggccgcctggccgtgccaacgcgctatcgcgaagggctgatcgaggacgctgccggtcaattggtatgcaccattgacattcatcacccgtgcctgctgctttatccattgcctgaatgggaagtcatcgagcagaaattgtcgcgtttatcgagcatgaatcccgttgagcggcgcgtacagcgtttgcttttgggtcatgccagcgaatgtcagatggataatgccggccgcttgctgattgcgccggtgttacggcagcatgccgggctgacaaaagaagtgatgctggtcgggcagtttaataaatttgaactgtgggatgaaacgacctggtatcaacgggtcaaggaagatatcgacgctgagcaatccgcgaccggtgaactgtcggagcgcctgcaggatttgtccttataa

SEQ ID NO: 267781 - DNA, 942 bp, Klebsiella pneumoniae
atgatggaaaattataaacatactacggtacttctggatgaagccgtcaacggcctcaatattcgtccagacggtatctatattgatggtacttttggccgcggcggtcactcgcgcctgatcctctcccggctgggtgcggaaggacgcttgctggctatcgatcgcgacccgcaggcgattgccgtcgcgcaaaccatcgatgacccccgcttttccatcgtacatggtcccttttcacaactcgctgagtacgtcggcgagcgcaatcttaccggtaagatcgacggcattctgctcgatctcggcgtctcttccccgcagcttgacgatgcggaacgcggcttttcctttatgcgtgacgggccgctggatatgcgcatggatccgacgcgcggtcagtccgcggccgaatggctgcagacggctgaagaagacgatatcgcctgggtgattaaaacctttggcgaagagcgtttcggcaaacgtatcgcccgcgcgatcgtcgaacgtaatcgcattcagccgatgacccgcaccaaagagctggcggaagtcatcgccgcggcgatgccggtaaaagataagcacaaacatcccgcgacccgtaccttccaggcggtgcgcatatgggtaaacagtgaactggaggagatagagcaggcgctaaaaagctcgctcagcgtgctggccccgggcgggcggctgtcgatcattagttttcattcgctggaagaccgcattgtgaagcgctttatgcgtgagcaaagccgcggtccgcaggttccggcgggaataccgatgaccgaagcgcagctcaaaaaactgggcggccgtgagttgcgagcactaggcaagttgatgccgggcgaagaagaggtggcagagaatccacgcgcccgtagttcagtgctgcgtatcgcagagaggacgaacgcatga

SEQ ID NO: 267782 - DNA, 366 bp, Klebsiella pneumoniae; identical to SEQ ID NO: 210101

SEQ ID NO: 267783 - DNA, 1767 bp, Klebsiella pneumoniae
atgaaagcagcgccaaaaacgcctaaagcaaaacgtcaggaagaacaggccaactttatcagttggcgttttgcgttgctgtgcggctgtattctgctggcgctggcttttctgctgggtcgcgtcgcctggctacaggtgatcagccccgatatgctggtgcgccagggcgatatgcgttctttgcgcgtacaggaagtgtccaccgcgcgcgggatgattaccgatcgctccggacgtccgctggcggtcagcgtgccggtgaaggctatctgggccgacccgaaagagctccatgacgccggcggggttaccctggatacacgctggaaggcgctggcggatgccctcaatatgccgctggatcagctggcgacgcgcatcaataccaatccgcggatgcggtttatctatctggcgcgtcaggttaaccctgacatggccgattacatcaagaagctgaagctgccgggcattcatctgcgcgaagaatcccgtcgttactacccttccggggaagtaaccgctcacctcatcggctttaccaacgtcgatagccaggggattgaaggggttgagaaaagctttgataaatggcttaccggtcagccgggcgagcgtatcgtacgtaaagaccgctatggccgggtaattgaagacatctcttctaccgatagccaggcagcgcacaacctggcgctgagtatcgacgaacgcctgcaggcgctggtctatcgcgagctgaacaacgccgtggcctttaacaaagccgagtcgggcagcgccgtgttagtggatgttaacaccggtgaagtgctggcgatggccaacagcccatcctataacccgaacaacttcgccggtacggcaaaagacaccatgcgtaaccgtgcgattaccgacgtgtttgagccgggttcgacggtgaaaccgatggtggtcatgacggcgctgcagcgcggtatcgtcaacgaaaataccgtgctcaataccgtgccttatcgaattaacggccacgaaatcaaagacgtggcgcgctacagcgaattgaccctgaccggggtgctacagaagtcgagtaacgtcggtgtttctaagctggcgttagcgatgccgtcctcagcgttagtagatacttactcacgttttgggcttggaaaggcgaccaatttggggttggtcggagaacgcagtggcttatatcctcaaaaacaacggtggtctgacatagagagggccaccttttctttcggctatgggctaatggtaaccccgttacagttagcgcgagtctacgcaacgattggcagctatggcatctatcgcccgttgtcgattaccaaagttgatcctccggttccgggcgagcgcgtcttcccggaatcactcgttcgtaccgtcgttcatatgatggaaagcgtggcgctgcccggcggcggcggtgtgaaagcggcgatcaaaggctatcgcatcgcgattaaaaccggtacggcgaaaaaagtggggccggatggccgctatatcaacaaatatattgcttacaccgcaggcgttgcgcccgccagccatccgcgcttcgcgctggtggtggtgatcaacgacccgcaggcaggtaaatactacggtggcgccgtttccgcgccggtcttcggtgccatcatgggcggcgtattgcgcaccatgaacatcgagccggatgcgctggcaacgggcgaaaaaagtgaatttgtaattaatcaaggcgagggaacaggtggcagatcgtaa

SEQ ID NO: 267784 - DNA, 1488 bp, Klebsiella pneumoniae
gtggcagatcgtaatttgcgcgacctactcgctccatgggtgccaaacgcaccggagcgcattctgcgagagatgacgctggacagccgggtggctgcttccggcgatctctttatcgcggtacagggtcatcaggcggacgggcgtcgttatatcccgcaggcgatagcgcaaggtgtggctgccattattgctgaagcgcagggcgaagctaaagacggtgagatccgtgaaatgcacggcgtgccggttatctacctgagccagcttaacgaacgcttatcggcgctggccgggcgtttttatcatcagccgtcgcagcagctgcgtctggtgggcgtcaccggcaccaacgggaaaaccaccaccactcagctgctggcgcagtgggcaaagctgctcggcgaaaccagcgcggtgatggggaccgtcggtaacggtctgctggataaagtcgttccaactgaaaacaccaccggttccgcggtggacgttcaacatgtgctctccagtctggtcgggcagggggctaccttcggcgcgatggaagtctcctcccacggtctggtacagcaccgcgtagcggccctgcagtttgccgcctcggtgtttaccaatctcagccgcgatcatctcgactaccatggcgacatggagcactacgaagcggcgaaatggctgctgtactccacccatcattgcggtcaggccatcgtcaatgctgacgatgaagtcggtcgtcgctggctggcgaagctgccggacgcggtggcggtatcgatggaagatcatatcaacccgaattgccacggccgctggctaaaggccaccgcggtgaactatcacgacagcggggcgaccatccagtttgactccagctggggcaagggcgaaatcgaaagccgcctgatgggcgcatttaacgtcagcaacctgctgctggcgctggccacgctgctggcgctgggctatccgctggccgatctgctgaagaccgcagcgcgtttacagccggtgtgcggccgtatggaagtgttcagcgcgccgggtaaacctgccgtggtggtagattatgcccatacgcctgacgcgctggaaaaagcgctgcaggcggcacgcctgcactgcagcggcaagctgtggtgcgtcttcggctgcggcggcgaccgcgacaaaggtaaacgtccgttgatgggcgctatcgcggaagaatttgccgacatcgtggtcgttactgacgataacccgcgcaccgaagagccgcgggcgattatcaacgatattctggccggcatgctcgatgcaggtcaggcgaaggttatggaaggccgcgcggaagcggtgaccaacgccgtgatgcaggcgaaagagaacgacgtggtgctggtggcgggtaaaggccatgaagattaccagatcgtcggcaaccgccatctggattattccgaccgcgtgaccgtcgcgcgtctgctgggagcggtagcatga

SEQ ID NO: 267785 - DNA, 1359 bp, Klebsiella pneumoniae
atgattcgctttacgttaagtcaacttgccgcgatcgcccatggcgaacggcagggtagcgatgtcgctatcgacgaagtgaccaccgatacccgtaaagtgacggcgggctgcctgtttgtggcgctgaaaggggagcgtttcgacgcccatgattttgccgaacaggcgaaagcggcgggcgccggcgcgctgctggtgagtcgtccgctggcctgcgatctcccgcaggtgattgtgagcgatacccggcaggctttcggtgagttagccgcttgggtgcgtcagcaggtgccgactcgcgtcgtcgccctgaccggctcgtccggtaaaacctcggttaaagagatgaccgcggcgatcctcagccagtgcggcaacacgctgtataccgccggcaacctgaacaacgatatcggcgtcccgatgacgctgctgcggctgaccaaagagcatcagtacgcggtgatcgaactcggcgccaaccaccagggcgaaatcgcctggaccgtcagcctgacgcgtccggaagcggcgctggtcaacaaccttgctgcggcgcacctggaaggtttcggttcgctggcgggcgtggcgaaggcgaagggcgaaatctataccggtctgccggaaaatggcatcgccatcctcaatgccgacaataacgactggctgaactggcaggcggtgattggcgatcgcaaagtgtggcgcttctcgccgaacgcggcgaacagcgatttcacggcgaccaacgtgcagatcaccagccacggcaccgaatttacgctgcagaccccaaccggcaacgttgacgtactgctgccgctgccgggacgccacaacatcgctaatgcgctggccgccacttcgctggcgatggcggtaggcgccgatttggcggcggtgaaagccggactggcgcagctgcaggccgttccgggacgtctgttcccgatccggctgaccgagagccagctgctgctggatgattcctataacgctaacgttggttcgatgaccgcggcggtgcaggtgctgtcagagatgcccggctttcgcacgatggtggtcggcgatatggcagagcttggcgcggagagcgcggcctgccatcgcgaagtcggcgaagcggcgaaagcggcgggtctggattgcgtcctcagcgtcggcgccttgagcgcggatatcagccgcgccagcggcgtgggcgaacattttaacgataaagccgccgtggtggctcgcctgcgcgagctgctggcggagcacaaaataatgaccattttagtgaagggttcacgtagtgccgccatggaagaggtagtacgcgcattacaggagactgggacatgttag

SEQ ID NO: 267786 - DNA, 1083 bp, Klebsiella pneumoniae
atgttagtatggctggccgaacacttggtcaaatattattccggctttaacgtcttttcatatctgacgtttcgcgccatcgtcagcctgctgaccgcgctgttcatctcgttgtggatgggcccgcgcatgatcgcccgtctgcaaaaactcgcctttggccaggtcgtacgtaacgacggcccggagtctcatttcagtaaacgcggtactccgaccatgggcgggatcatgatcctcaccgcgatcaccgtttccgttctgctgtgggcctatccatctaacccgtacgtctggtgcgtactgacggtattaatcggctacggcatcatcggtttcgttgatgattaccgtaaagtcgtgcgcaaagataccaaaggcctgatcgcccgctggaagtatttctggatgtcggtgatcgccctgggcgtggccttcgcgctgtatctggcggggaaagataccccggcaaccgagctggtggtgccgttctttaaagacgtaatgccgcagctggggctgttctatatcttgctggcctacttcgttatcgtcggtaccggcaacgccgtcaacctgaccgacggcctcgacggcctggcgattatgccgaccgttttcgtcgcggcaggctttgcgctggtggcatgggccaccggcaacatgaattttgccaactacctgcatatcccgtatctgcgccacgccggcgagctggtgatcgtctgtacggcgattgtcggggcggggctgggcttcctgtggttcaacacctacccggcgcaagtctttatgggcgacgtcggttcactggcgctcggcggcgcgttgggcattatcgccgtgctgctgcgtcaggagttcctgctggtgatcatgggcggggttttcgtggtggaaacgctgtcggttattctgcaggtcggctcctttaagctgcgcggtcagcgcatcttccgcatggcgccgatccaccaccactatgaactgaaaggctggccggagccgcgcgttatcgtgcgcttctggattatttcgctgatgctggtgctgattggcctggcgacgctgaaggtacgttaa

SEQ ID NO: 267787 - DNA, 1317 bp, Klebsiella pneumoniae
atggcagattatcagggtaaaaaagtcgtcataattgggctgggcatgaccggcctgtcatgcgtggactttttcatggcgcgcggcgtaaccccgcgcgtgatggacacccgcgtcgcgcctccggggctggataaattacccgaatcggtcgaatgccatgtcggcggactcaatgatacctggctgctggcggcggacctgattgtcgccagtccggggattgcgctggcccatccttcgctcagcgcagcggccgacgctggcgtagagatcgttggcgatatcgaactgttctgccgcgaagcgcaggcgccgattatcgccattaccggttctaacggcaaaagcactgttactaccctggtgggcgagatggcgaaagccgctggagttaacgtcggcgtgggcggcaatatcggcctgccggcgctgatgctgctggacaccgatcgagagctgtatgtgctggagctctccagcttccagctggaaaccacctccagcctgcaggcggtggcggcaaccatcctcaacgtgactgaggaccatatggaccgctacccgctggggctgcagcagtatcgcgcggcgaagctgcggatttacgagaatgcgaagacctgcgtggtgaacgcggacgatgcgctcaccatgccggtacgcggggcggacgaacgctgcattagctttggcgtcgatgtcggtgactaccaccttaaccgccagcagggcgaaacctggctgcgcgttaaaggtgagaaagtcctcaatgtgaaagagatgcctctcaccggtcagcataactacagcaacgccctggcggcgctggcgctggccgatgccgcgggtctgccgcgggccagcagcctgaaggcgctgaccacctttaccggtctggcgcaccgtttccagctggtgctggatcacaacggcgtacgctggattaacgactcgaaggcgaccaacgtcggcagcaccgaggcggcgctgaacggcctgcagctggacggcacgctctatctgctgctgggcggcgacggcaagtccgctgattttaccccgctgaagcgctacctcggcggcgatcgtattcgcctgtactgctttggtcgcgatggcgccgagctcgctgagctgcgtcctgaggtggcggtacaaactgagactatggaacaggcgatgcgtcagattgctcccctggtgaaagcgggggacatggtgctcctgtcgccggcctgcgccagcctggatcagtttaagaactttgaacaacggggcgagatgtttgcccgtctggcgaaggagttaggttga

SEQ ID NO: 267788 - DNA, 1047 bp, Klebsiella pneumoniae
atggtgatggcgggcggtaccggcgggcatgtgttcccgggactggcggtcgcgcaccatttaatggaccagggctggcaggttcgctggctgggtaccgccgatcgtatggaagcggatttagtgccgaaaaacggcatcgaaattgattttatccgcatctccggcctgcgtggcaaaggtatcaaagcgcagctactggcgccggtgcgtatctttaacgcctggcgtcaggcgcgggcgatcatgaagcgtttccagccggacgtggtgctgggtatgggcggctatgtttccgggcctggcggtctggcggcgtggtcgctggggatcccggtggtcctccacgagcaaaacggcattgccggcctgactaacaagtggctggcgaagattgcgaagaaagtgatgcaggcgtttcccggcgcgttcccgcatgcggacgtcgttgggaacccggtgcgcaccgatgtactggcgttgccgctgccaggtcagcgtctggttggccgtcaggggccgattcgcgtgctggtggtcggtggctctcagggcgcgcgcgtcctgaaccagacgatgccgcaggtggcggcgaagctcggcgctacggtgaccatctggcatcaaagcggcaaaggcggccagcaaaccgtgcagcaggcctatgccgccgccggacagccgcagcataaagtgacggaatttattgatgacatggccgcggcgtatgcctgggcagatgttgtggtttgccgttccggcgcgctgacggttagcgaaatcgcggccgcaggtttaccagcgctgtttgtcccgttccagcacaaagatcgtcagcagtactggaatgcgctgccgctggagaaagccggcgcggcgaaaattcttgaacagcctgagttcacggtagaggcggttgcctctaccctggcgagctgggatcgggaaaccttgctggatatggcggaacgagcgcgtggcgcttcgattccggacgctaccgagcgggtagcagaagaggtcagcgccgtagctttggcgcgctaa

SEQ ID NO: 267789 - DNA, 1476 bp, Klebsiella pneumoniae
atgaatacacaagatttggcaaaactgcgttccatagtgcccgagatgcgtcgcgttcggcacattcactttgtcggcatcggcggtgccggtatgggcggtattgccgaagtgttggctaacgaaggttaccagatcagcggctccgacctggcgccgaatccggtgacccagcagctgtcgcagcttggcgccaccatttatttcaaccatcgcccggaaaacgtgcgtgatgccagcgtggttgtcgtttccagcgcgatttcggcagataacccggaaatcattgccgcgcatgaggcgcgtatcccggtgatccgtcgtgccgaaatgctggcggagctgatgcgctttcgccacgggatcgccattgccgggacccacggcaaaaccaccaccaccgcgatggtatccagcatttacgccgaggccgggctggacccgaccttcgtcaacggcggactggtaaaagcggcgggcgtacatgcccgtcttggccatagccgttacctcatcgcggaagcggatgagagcgacgcgtcgtttctgcatctgcagccgatggtggccattgtcaccaacatcgaagccgatcacatggatacctaccatggcgactttgagaatctgaagcagacctttatcaacttcctgcacaacctgccgttctacggacgcgcggtgatgtgcgtggacgatccggtgatccgggaactgctgccgcgcgttggccggcagatcaccacctacggttttagcgacgacgccgacgtacgcgtcgaggactatcgtcaggttggggcgcaggggcatttccgcctggtgcgccaggataaagcgatcctgcaggtgacgctcaatgccccgggacgccataacgcgctgaacgcggcggcggccgtcgccgtggcgacggaagaggggattgacgatcgggctattctgcgcgcactggagagcttccagggaactggacgccgctttgattttcttggcgagtttccgctggccgaagtcaacggcaaaccgggcagcgcgatgctgatcgatgattacggtcaccacccgacggaagtggacgccaccattaaagcagcgcgcgccggctggccggataaaaacctggtgatggtattccagccgcaccgttatacccgtacccgcgatctgtatgatgattttgccaacgtgctgacccaggtggatgccctgctgatgctggacgtctatccggcgggcgaagcgccgatcccgggcgccgacagccgctcgctgtgccgcaccattcgcggccgcgggaaagtggatccgatcctggtgcccgattcggcccaggccgcggagatgctggcgtcagtccttaccggcaacgatttagtactggtgcagggcgccggtaacatcggtaaaatcgcccgccacctggctgaaatcaaactgatcccgcaaaaaacggaggaggagcgccatggctga

SEQ ID NO: 267790 - DNA, 921 bp, Klebsiella pneumoniae; identical to SEQ ID NO: 138345

SEQ ID NO: 267791 - DNA, 831 bp, Klebsiella pneumoniae; identical to SEQ ID NO: 138346

SEQ ID NO: 267792 - DNA, 1263 bp, Klebsiella pneumoniae; identical to SEQ ID NO: 138347

SEQ ID NO: 267793 - DNA, 1152 bp, Klebsiella pneumoniae
atgtttgaacctatggaactgaccaacgacgcggtgattaaagtcatcggcgtcggtggcggcggcggtaacgccgttgaacacatggtgcgcgagcgcattgagggtgttgaattcttcgcggtaaacaccgatgcgcaggcgctgcgtaagacggcggttggccagactatccagatcggtagcggtattaccaaaggtctgggcgcgggcgcgaacccggaagtcggccgtaacgcggctgatgaagaccgtgaagcgctgcgcgcagcccttgatggcgcagacatggtgttcatcgcggcaggcatgggcggcggtaccggtaccggcgcggcgcccgtagtcgcggaagtggcgaaggatctggggatcctcaccgttgcggtggtcactaagccgtttaattttgaaggtaagaagcgcatggcgttcgctgagcaggggatcaccgagctgtccaagcacgttgactcactgatcactatcccgaacgacaagctgctgaaggtcctgggtcgtggaatttccctgctcgacgcattcggcgcggcaaacgacgtcctgaaaggcgcggtgcagggtatcgccgaactgatcacccgtccgggtctgatgaacgtcgacttcgcggacgtccgtaccgtgatgtctgaaatgggctacgcgatgatgggctccggggtggcgagcggtgaagaccgtgcggaagaagcggctgaaatggctatctcttctccgctgctggaagatatcgacctgtcaggcgcgcgcggcgtgctggtcaacattactgcgggcttcgacctgcgtctggacgagttcgaaactgtgggtaacaccatccgtgcttttgcctcggataatgcgaccgtggttatcggtacctctctggacccggatatgaacgacgagctgcgcgtgaccgtagtggcgaccggtattggcatggataagcgtccggaaatcaccctggtaaccaacaagcaggttcagcagccggtgatggatcgttaccagcagcatggtatgtcgccgctgacgcaagagcagaagccggcagccaaagtggtgaacgacaatacgccgcaaaccgcgaaagagccggattatctggatatcccagccttcctgcgtaagcaagccgattaa

SEQ ID NO: 267794 - DNA, 918 bp, Klebsiella pneumoniae
atgatcaaacaaaggactcttaaacgtatcgttcaggcgactggcgtcggtttgcataccggcaagaaagtcacactgacgttacgccctgcgccggcaaataccggggtcatctatcgtcgcaccgacttgaatccaccggtagattttccggctgatgccaaatctgtgcgtgataccatgctctgtacttgcctggttaatgagcatgacgtgcggatttctacggttgaacacctgaacgccgcattggctggcctgggtatcgacaacattattgttgaagtcgatgcgccggaaatcccgattatggacggcagtgcggctccgttcgtttatctgttgctggacgccggcattgatgaactgaactgcgccaagaaatttgtacgtatcaaagagacggttcgcgtcgaagatggcgacaaatgggctgaattcaaaccgtacaatggtttttcgctggacttcaccatcgattttaaccatccagcgattgatgccagcacccagcgctatacgctgaacttctcggccgatgcgttcatgcgtcagattagccgtgcgcgtaccttcggttttatgcgcgatatcgaatatctgcagtcccgcggcctgtgcctgggcggcagcttcgattgtgccatcgttgttgacgattatcgcgtactgaacgaagacggtctgcgctttgaagacgaatttgttcgccacaaaatgctggatgcgatcggtgacctgtttatgtgtggtcacaacattatcggcgcattcacggcgtacaaatcgggtcacgcgttgaacaacaaactgctgcaggcggttctggcaaaacaggaagcctgggagtatgtgaccttcgaagacgacgcaaaactgccaatggcgttccgcgcaccgtcgatggttctggcgtaa

SEQ ID NO: 267795 - DNA, 504 bp, Klebsiella pneumoniae
atgaacgtgagtggattactgacgcgctggcgacagtttggcagacggtatttttggccgcatctcctgttggggatggtcgcggccagcctcggcctgcctgcgctaagcaacggtcacgagaccgcggcgccagcgaaggcgaccgccagcaatcacaatccgagcaaggttaatttctctcagctggcgcttctggagacgaatcgccggcccagctttaccgtcgactactggcatcagcacgccattcgcaccgttattcgtcatctctccttcgccatggcgccgcaggcgctgccggtcgcggaagaaacttccccgctgcaggctcagcatctggcgctgctcgacaccctcagcgcgctgctgacgcaggacagcacgccgccggtggtgatccgccaggcgggttacatcccttcttcatattctgccttccgcgtcagcgcctggataagccaggtggcggggatccgcgcagggcctcaacgtctcagctga

SEQ ID NO: 267796 - DNA, 2706 bp, Klebsiella pneumoniae
atgcttatcaaaatgttaaccaaggttttcggcagccgtaacgaccgtacgctgcgtcgtatgcgcaaagtcgtcaatatcatcaacggcatggaaccggcgatggaaaaactctctgatgacgagctgaaagcgaaaaccgctgaattccgcgcgcgcctggaaaaaggcgaaacgctggaaagcctgatccctgaagctttcgccgtcgttcgcgaagccagtaagcgcgtattcggcatgcgccacttcgacgtccagctgctgggtggtatggtgcttaacgatcgctgcatcgccgagatgcgtaccggtgaaggtaaaaccctgaccgcgaccctgccggcgtacctcaacgcgctaaccggcaaaggcgttcacgtagtgaccgtcaacgactatctggcccagcgtgacgccgaaaataaccgcccgctgtttgaattcctgggcatgacagttggcatcaacatgtccggcctgccggcgccggcgaagcgtgaagcttacgctgccgatatcacctatggcaccaacaacgaatacggcttcgactacctgcgcgacaacatggccttcagcccggaggagcgcgttcagcgtaaactgcactatgcgctggtggatgaggtggactccatcctgatcgatgaggcgcgtacgccgctgatcatttccggcccggcggaagacagctctgaaatgtaccgcaaggtaaacaaaatcatcccgcatctgatccgccaggaaaaagaggattcggatactttcactggcgaaggccacttctcggtggatgaaaaagcgcgtcaggttaacctgaccgaacgtggtctggtgctgattgaagagctgctggtacaggaaggcattatggatgaaggtgagtccctgtactctccaaccaacattatgctgatgcaccacgttaccgccgcgctgcgcgcccatgcgctgttcacccgcgacgttgactacattgtcaaagatggcgaagttatcatcgtcgatgagcacactggccgtacgatgcagggccgccgctggtccgatggtctgcaccaggccgttgaggccaaagagggcgtggagatccaaaacgagaaccagactctggcctctatcaccttccagaactacttccgtctgtacgagaagctggcggggatgaccggtacagccgataccgaagcctttgaattcagctctatctataagctggataccgtggttgtaccgaccaaccgtccgatgatccgtaaagacatggcggatctggtctatatgaccgaagcggaaaaaattcaggcaattatcgaagatatcaaaactcgtaccgctgccggtcagccggtgctggtggggactatctcgatcgaaaaatctgaagtggtttcccgtgaactgactaaagctggcatcaagcacaacgtcctgaacgccaaattccacgccagcgaggcggatatcgtcgcccaggcgggctacccttccgcggtgaccatcgccaccaacatggcgggtcgtggtaccgatattatgctcggcggtagctggcaggcggaagtcgctgcgctggaaaacccaacgccagagcagattgagaaaatcaaagccgactggcaggtacgccacgatgcggtactggccgcaggcggtctgcacatcatcggtaccgagcgtcatgaatctcgccgtatcgataaccagctgcgcggccgtgctggtcgtcagggggatgccggttcttcccgcttctacctgtcaatggaagatgccctgatgcgtatcttcgcctccgatcgcgtgtctggcatgatgcgtaaactgggaatgaaaccaggtgaggcgattgagcacccgtgggtcaccaaggcgatcgccaacgcccagcgtaaagtggaaagccgtaacttcgatatccgtaagcagctgctggaatatgatgatgtggccaacgaccagcgccgggcgatctacacccagcgtaacgagctgctggacgtgtctgacgtcagcgaaaccatcaacagcatccgcgaagacgtctttaaggcgacgatcgatgcccatattccgccgcagtcgctggaggagatgtgggatatcgaaggtctgcaggagcgtctgaaaaacgacttcgacctcgacctgccaatcaaagagtggctggataaagagccggagctgcatgaagagaccctgcgcgaacgtattctgcagagcgcggtagaaacctaccagcgtaaagaagaagtggtcggcgccgagatgatgcgccacttcgagaaaggcgtgatgctgcagactctggattcgctgtggaaagagcacctggcggcgatggattacctgcgccagggtatccacctgcgcggctatgcgcagaaagatccgaagcaggagtacaagcgcgaatcgttctcaatgtttgccgcgatgctggagtcactgaagtatgaagtgatcagcaccctgagcaaagtccaggtgcggatgccggaagaagtcgaggcgatggaacagcagcgtcgtgaagaggccgagcgcctggcgcagatgcagcagctcagccatcagagcgatgatgaagccgcagcccaggatctggcggcgcaaaccggcgaacgtaaagtgggccgtaacgatccgtgcccgtgcggctccggcaaaaagtacaaacagtgccacggccgtctgagctaa

SEQ ID NO: 267797 - DNA, 393 bp, Klebsiella pneumoniae; identical to SEQ ID NO: 210085

SEQ ID NO: 267798 - DNA, 195 bp, Klebsiella pneumoniae; identical to SEQ ID NO: 139075

SEQ ID NO: 267799 - DNA, 744 bp, Klebsiella pneumoniae; identical to SEQ ID NO: 210083

SEQ ID NO: 267800 - DNA, 621 bp, Klebsiella pneumoniae
atggggtacatagtcgcgttaacaggcgggatcggcagcggtaaaagtacggtcgccgacgccttcgcgcagcttggggttaaggttatcgatgccgatgttatcgcccgtcaggtggtcgagcccggtaccccggcgctccaggccattgtcggccactttggaccacagatgattgcccccgacggcacgctgaaccgccgcctgctgcgggaaaaaatttttgctcacgtggaggaaaaagcctggctcaatgcgctgttgcacccgctgattcagcaggaaacgcgccgccagatgcaggccgccacctccccttatctcctctgggtcgtacctttgctggtcgaaaaccgcctgtccggccaggccgatcgcgtactggtcgtcgatgtgccgaaagagacgcaaatcgaacgcaccatgctgcgcgataaggtcagccgcgaacatgctgaacatattcttgccgcccaggccacgcgccagcagcgcctggccgtcgcggacgatgttattgaaaacactggcacgccggatgcagtggcatcggatgttgcccgcctgcacgaaaagtatttaacgctggcatcgcaggccgcctcacaggaaaactcgtaa

SEQ ID NO: 267801 - DNA, 1044 bp, Klebsiella pneumoniae; identical to SEQ ID NO: 210081

SEQ ID NO: 267802 - DNA, 1206 bp, Klebsiella pneumoniae
atggcgactaagcgtctctggcgctggcgcggtatcgatgtgcagggcgccccttgtcaggggatgctatggcaaaccaagcgtctggaggtcctgcagcacctccaacagcagcgagttataccgctggccgtacgccgctgtgcggtgaagcagagcctctggcacccgcgctacagttgcgaaacgatccgccagctggcgaccctgctgcaggccggcctgccgctggcggaagggttatcgctgctggcgcagcagcagtcgcatgcccagtggcaggcgctgcttgaggcgctgggccgcgagctggcccagggcgtggcgttctctgccgcgctggcgcagtggccccaggcttttccgccactatatctggcgatgattagcaccggcgaactgacgggcaagctcgatatctgctgcctgcagttggcgaatcagcagcaggagcagcagcggctcgccagcaaagttaaaaaagcgctgcgctacccgctgatcgtgctctctctggcgctgttggtggtgctggggatgctctattttgtcctgcccgagttcaccgccatctaccagacgttcagtacgccgttaccgctgttgacgcggatggtcgttgcggcaggcgacatgctaagtcgcggctggccgctgctgctggccttgctgctgagcccgctgctgctcaaccagctgatccggcggcgcagcgactggttgctgcgccgccagcggttgcttaacacgcttcctctcattggctccctgatcggcggacaacagctgagcctgatcttcaccatcctggcgttaacccaaagcgccggtattagctttctgcaggggctgcaaagcgttgaagagtccctgtcgtgcccgctatggcgccagcgtctggcgcaggcccgcgcgctgatcgttcagggggagccgatttggcaggcgttaagccgctgcggcggttttacaccgctgtgcctgcagctcatccgcacgggggaaagcgcgggagcgctggatcagatgctggaaaacctggcgcatcaccatcgcgagcaaacctatcagcgagccgatagtctggctgcgcatcttgaacccatgatgctggtgataaccggctcgctggtcgggattctggtggtggcaatgtatttgcccgtttttcacctgggcgatgccattggcggggcgggaggatga

SEQ ID NO: 267803 - DNA, 1386 bp, Klebsiella pneumoniae
atgaaaacagaacagctgatccctctctgccgtcgctaccacgccatgctgctgcatagcgatgaacagacaatctctattgcggtggttaataccccgccggcggagttaatggaggcgctacgcttcgcgacgcaaaagcggatcgacattgaatgctggagccaggagcagatggataagcgtctgcaggcccaggaaaagcaggcgcaactggcgcagaacgacgggccggaaaatatcgccgaacgggtcaaccagatcctcgaacaggccctgcgtcagcgggcgtctgatattcatatcgagcccacggaaacgcacttacgcatccgcctgcgggtcgatggcgtccttcacgccctaccgttgctggctcccgaactggccgcaccggttatcgcgcgactcaaggtcctggccagtctcgatatcgccgagcaccgtttaccgcaggatggccagttcgcgctgaatcttgcgggacgaccgctctcttttcgcatcgccactctgccctgccgctatggcgaaaagattgtcctgcgccttctgcatcaggttgaccaggcgctggatctggaagcactcggactctcatcctcccagctggcggcctttcgccaggcgctgaaccagccgcagggtctgctgctggtcaccggcccaaccggaagcgggaaaacggtgaccctctacagcgccctgcaggccagaaaccgtgagcaagtgaatatctgtagcgtggaggatccactggagatccccatcgccgggatgaaccagacgcaaatcaatccccgcgccggactcacttttcacagtgtgctgcgcgccctgttacgccaggatccggatattgtcatggtgggcgagatccgcgatgccgagaccgctgaaatcgcgctcaaagccgcccagaccggtcatctggtgctctccaccctgcacaccaattccaccagcgaaaccctgacccgcctgcagcaaatgggcatcgcccgctggatgatttcctctgcgctctcgctggtcatcgcccagcgtctggtccgcaagctgtgtccccactgtcggcgtaatgccggcagcgccgccgacctgccgcacagcctgtggccccgcccgctgccacgctggcaggcagcgggctgcgaacattgttaccacggatattacggccggctggcgctgttcgaagtgctgcctgttacccccgggctacgccaggggatagtccagggacttaacgccattgagattgaatctctggcgcgagccgcggggatgatgacgctttttgaaagcggctgtcaggctatcgaacagggattgaccagcctcgaagaggtggtgcgggtgctggggatcccccatggcgactaa

SEQ ID NO: 267804 - DNA, 894 bp, Klebsiella pneumoniae
atgtcgcctcgtcgttacaaccccgaccgccgccgtgacgtgctgctggaacgtattaatctcgatattaccgatgctgtcgcacactccctgcgggaagatctgggcggcgaagtcgacgccaacaacgatattagcgcgcaattattgccgcaggatgcacgctcccatgcggtggtcattactcgtgaagatggcgtcttctgtggcaaacgctgggtggaagaggtctttattcagctcgccggtgacgatgtgaatatcacctggcacgtggccgacggcgatgcggtcaaagccgaccagccgctgttcgaattggaaggcccgtcgcgtattctgctcaccggcgaacgcacggcgctgaactttgtgcaaaccctctccggcgtcgccagcgtcgtccgtcgctatgttgacctgctcgccggcaccaaaacccaactgctggatacgcgcaaaacgctgccagggctgcgtaccgcgctgaaatacgcggtactctgcggcggcggcgccaaccatcgactgggcctgttcgacgcgttcctgattaaagaaaaccacattatcgcctccggatcgatccgtcaggcagtggaaaaggcgttctggctgcatcctgatgtgccggtagaagtggaagtggaaaccctggatgaactggagcaggcgttaaaagccggggccgatatcattatgctcgataacttcaccaccgatctgatgcgcgaggcggtgaaaattaccgcaggccaggcggcgctggaggtctccggcaacgttacctttgacaccatccgcgaattcgccgataccggcgtcgactatatttccgtcggcgccctgaccaaacatgtgcaggcgctcgacctgtcaatgcgcttccgctga

SEQ ID NO: 267805 - DNA, 564 bp, Klebsiella pneumoniae; identical to SEQ ID NO: 137945

SEQ ID NO: 267806 - DNA, 855 bp, Klebsiella pneumoniae
atgacgctgtttacgacgctgttggtgcttatcgccgaacggctgtttaagctgggcgaacactggcagcttgatcatcggctggaggtggtgtttcgccggataaaacatttctcgttaccgggcacgctgctgatgacgctggtggccgtcgcggtcgtgtatatcattcagcgtctgctgcagggacagctgtttaacataccgctgctggtgttctggattttactgggcctgctatgcattggcgccggcaaagttcggctgcactaccatgcctatctgaaagcggcgtcgcgcaatgacagtcgtgcctgcgatgccatggccagcgagctgacgctgattcacggcgtgccgccgggctgtgatgagcgtgagtaccttagcgaactgcaaaatgcgctgctgtggattaactatcgatactatctggcgccgcttttctggtttgtcgtggggggggtctgtggcccgctgacgcttatcgcctacagcgtactgcgcgcctggcagacatggctggcgcgctaccagacgccgcaccaccggttgcagtccgggatcgatggtatcctgcatattgtggactggctgccggtgcgtctggtgggggtggtctatgccctggtgggccatggtgaaaaagcgctcccggcgtggtttgcttcgctgggcgaccgccattcgtcgcagtatcaggtgttgacccgcctggcgcagtattctctggcccgtgagccgcacgtggataaagtagcgacgccgaaggctgcggtatcgatggctaagaagacttcgctggtggtagtggtgattatggcgctgctgacgatttacggtaccctggtttaa

SEQ ID NO: 267807 - DNA, 951 bp, Klebsiella pneumoniae
atgaacaactggccaaacccctttattgaacagcgtgcagacccctttatcctgcgccatcttagccactactactttattgcctcggtgccggaatacgaccggctggagatccggcgcgcggtaacccttgaaggattacgcgatgctgagccggtcgtggtttggcgcgcgccgcaaagcgggccgatgagccagctgatttgggcgccggagctgcatgaaatagaaggtaagtggtatatctattttgccgccacccatactcacgatctggatgcgctggggatgtttcagcatcgcatgttcgttctcgagtgcgctgacagcgatccgctgaccggccgctggcaggaaaaaggccaggtggtcacgcctttcgataccttcgccctcgatgccaccacttttacccatcaggggaaacgctggtatctgtgggcgcaaaaatccccgcatatcgaaggcaactcaaacctgtatctcgccgaaatggctaacccgtggacgttaaaaggcgagccggtcatgctgagcaagccggagttcgactgggagtgccggggatttaaggtcaacgaagggcctgcggtactgatgcatggcgataagctatttatcagctattccgccagcgccaccgatgaaaactactgcatggggttgttatggatcgaccggcaggccgatccgctgcagccggcaaactggcataaagctccgcagccggtgttccgcaccagctatgaaaaccgccagtatggcccaggtcataatagttttacccaaacgccggaaggggaagatgtgctggtgtatcacgcgcggaattacaccgagatagaaggcgacccgctgtatgatcccaatcgccatacgcggttaaagctggtcagctggcgggaagacgggatgcccgacttcggtattccaccggcggatacgctgtag

SEQ ID NO: 267808 - DNA, 1407 bp, Klebsiella pneumoniae
atggcagagaacacgctttcaataagagaaaagattggttacgggatgggtgatgccggatgcaatattatctttggcgccatcatgctgtttgtgaactatttttacactgatatattcggactagcgccggcgctggtcggcgtacttctgctctcggtgcgagtcatcgatgcggtaaccgaccctatcatgggcgctcttgccgaccgcacccgtagtaaatatggtcgctttcgtccatggctgctgtggttcgccttcccctacgccctgttcagcgtcctgatgttcaccactcctgagtggacctacaatagcaaagtcatctatgcgtttgtgacctactttctgctgtcgattacctataccgcgattaatattccctactgctcgctgggaacggtgatgaccgccgatccgaaagagcgtgttgcctgccagtcttatcgtttcgtcatggtgggtatcgccacgctcctgctgtcattgacgctgctgccaatggccgactggttcggcggcgccgataaagcgaagggctaccagatggcgatgaccgtgctggcctttatcggtatgtgtatgttcctgttctgcttcgccaccgtgcgcgaacgtatccgcccggcggtgcagacgaatgacgaactgaaaaaagatctgaaagacgtctggaaaaatgaccagtgggtgcgcatcctgctgctcacgctgtgcaacgtctgtccgggctttatccgcatggccgccaccatgtactacgtcacctgggtgatgggacaaagcacccattttgccaccctgtttatcagcctcggcgtagttgggatgatgattggcagcatgctggcgaaagtcctgaccgaccgctggtgcaaactgcaggttttcttctggaccaatatcgtgctggccgtgttctcctgcgccttctatttctttaatccacacgccaccacgctgattatggtgctctacttcctgctcaacattctgcatcaaatcccttccccgctacactggtcgctaatgtccgacgttgacgactacggcgaatggaaaaccggcaagcgcatcaccggtatcagcttctccggtaatctgttcttcctcaaggtcggcctggcggtcgccggggcaatggtcggtttcctgctgtcatggtacggctacgacgccggcgcgaaagcgcaaagcgcctccgcgctgaacggtatcgtgctgctattctcagtcattcccggcgtcggctatctgatcaccgccggcgtggtgcgcctgctgaaggttgaccgtaccctgatgcgccagattcagagcgatctggagaagcgccgcagcaactacagcgagctgaacgaataccaggaactgaaaaccagtgaacacgtaaggaaagcctga

SEQ ID NO: 267809 - DNA, 1371 bp, Klebsiella pneumoniae
atggaaggtcaacagcacggcgatcggctgaagcgcggcctgaaaaaccgtcacattcagctcatcgcgctgggcggggctatcggcaccggcctgtttctggggagcgcgtccgtcattcagtccgccggcccgggtatcattcttggttacgctatcgccggttttatcgctttcctgatcatgcgtcagctgggcgaaatggtggtggaagagccggtggccggctcatttagccactttgcttacaaatactggggcggttttgccggcttcgcctccggctggaactactgggtactgtatgtcctggtggccatggcggaactgaccgccgttggcaaatatatccagttctggtggccggaaatccctacctgggcctcggcggcggtcttcttcatcgccatcaacgccattaacctgaccaatgtcaaagtgttcggtgaaatggaattctggttcgcgattatcaaagtggtcgccgtagtggcgatgattttgttcggcggctggctgctgttcagcggcaacggcggcccgcaggcgacggtacgtaacctgtgggaccaggggggcttcctgccgcacggcttttacgggctggtgatgatgatggcgatcatcatgttctcctttggcggcctggagctggtggggatcaccgccgcggaagcggataatccggagcaaagcattcctaaagccaccaatcaggttatttaccgtattctgatcttctatgttggttcgctggcggtgctgctctccctgctgccgtggacccgcgtcaccgcggacaccagtccgttcgtcctgatcttccatgaacttggcgatacgctggtggcaaacgctctgaacgtggtggtgctgacggcagcactgtcggtttataacagctgcgtgtactgcaacagccgtatgctgttcggccttgctcagcagggcaacgcgccaaaagcgctgctcagcgtcgacaaacgcggcgtgccggtgaataccattctcgtctcggccctggtcactgcgctgtgcgtgctgatcaactacctggcgcctgaatctgctttcggtctgctgatggcgctggtggtctcggccctggtcatcaactgggcgatgatcagcctcgcgcatatgaaattccgtcgcgccaaaaagcagcagggcgtggtcacgcgtttcccggccctcttctatccgctgggcaactggctgtgcctgctgtttatggcggcggtgctggtgattatgctgatgaccccggggatggcgatttccgtctggctgatcccggtatggattgcggtgctgggcgtgggctatctgtttaaagagaaagccgccgccaccataaaagcacaataa

SEQ ID NO: 267810 - DNA, 780 bp, Klebsiella pneumoniae
atggcctacagcaaaatccgccaaccaaaattatccgatgtgatagagcagcagctggagtttctgattcttgaggggaccttgcgccccggtgaaaaactcccgccagaacgcgaactggctaaacagttcgacgtttcccgcccctcgctgcgtgaggcgattcaacgcctcgaagccaagggcttgttgcttcgtcgtcagggaggtggaacgtttgttcagagccgcctgtggcagagcttcagcgatccgctggttgagctgctgtccgatcaccctgaatcccaattcgatctgcttgagacccgtcacgcgctggaaggcatcgcggcctattacgcggcgctgcgcagcaatgatgaggatcgcgaccgtatccgtgagctgcatcaggctattgaacgcgctcagcagtcgggcgatttggacgctgagtccggcgccgtcgtccagtatcaaatcgccgtcaccgaggcggcacacaatgtggtgttgcttcatctgctaaggtgtatggagccgatgttggcgcaaaacgtgcgtcagaactttgaattgctgtatgcccggcgggaaatgctcccgttggtcagcaaccatcgcactcgcattttcgaggcgataatggccggggagccggagcaggcgcgtgaagcgtcgcaccgtcacctggcgttcattgaggaaattttgctggatcgtagtcgtgagcagagccgtcgagagcgctcactgcgtcgtttacagcaacgaaaggacgagaactccggttcttaa

SEQ ID NO: 267811 - DNA, 2664 bp, Klebsiella pneumoniae
atgtcagaacgtttacacaatgacgtggatccgatcgaaactcgcgactggctacaggcgatcgaatcggtcatccgtgaagaaggtgttgagcgcgctcagtatctgattgaccaactcctttctgaagcccgtaaaggcggagtgaaggttgctgcaggcgcttccgccggcaactacgtcaacactattgccgttgaagatgagccggaatacccgggcaatctggatctggaacgtcgcattcgttctgcgattcgctggaacgccatcatgaccgttctgcgcgcgtcgaaaaaagatctcgaactgggcggccacatggcgtcctatcagtcttccgcgaccttctacgaagtctgcttcaaccacttcttccgtgcgcgcactgagaaagatggcggcgatctggtgtacttccagggtcacatctctccgggcgtatatgcacgtgcgttcctggaaggccgtctgaccgaagagcagatggacaacttccgccaggaagttcacggcaagggtctgtcctcttatccgcacccgaaactgatgccggaattctggcagttcccgaccgtatccatgggtctggggccgttgggcgctatctatcaggccaaattcctgaaatatctggaacaccgcggtctgaaagacacctccgaacaaaccgtttacgccttcctgggcgacggcgagatggatgagccggaatcaaaaggcgctatcaccatcgccacccgtgaaaaactggacaacctggtcttcgtcatcaactgcaacctgcagcgtctggacggcccggtcaccggtaacggcaaaatcattaacgaactggaaggcatcttcggtggtgctggctggaacgttatcaaggttatctggggcggccgttgggatgagctgctgcgtaaagacaccagcggtaagctgattcagctgatgaacgaaaccgttgacggcgactaccagaccttcaaatccaaagacggcgcttacgttcgtgagcacttcttcggcaaatatccggaaaccgctgccctggtcgctgactggactgacgagcagatctgggctctgaaccgcggtggtcacgatccgaagaaagtctacgctgcattgaagaaagcgcaggagaccaaaggtcagccgaccgtgatcctggcgcataccattaaaggttatggtatgggcgataccgctgaaggtaagaacatcgcgcaccaggttaagaaaatgaacatggacggtgttcgctacgtccgcgatcgtttcaatgtgccggtggcggatgccgatctcgaaaaactgccgtacgtaaccttcccggaaggttccgaagagcacacttacctgcacgctcagcgtcagaagctgaacggctatctgccgactcgtcagccgaagttcactgagaaactcgagctgccgaccctggccgacttcagcgcgctgctggaagagcaaaacaaagaaatctctaccactatcgctttcgttcgcgccctgaacgtgatgctgaagaacaagtcgatcaaagatcgtctggtgccgatcatcgccgacgaagcgcgtaccttcggtatggaaggtctgttccgtcagatcggtatttacagcccgaacggccagcagtataccccgcaggaccgtgagcaggttgcttactacaaagaagacgagaaaggccagattctgcaggaagggatcaacgagctgggcgcaggcgcatcctggctggctgctgcgacctcttacagcaccaacaacctgccgatgatcccgttctacatctactactcgatgttcggcttccagcgtatcggcgatctgtgctgggcggctggcgatcagcaggctcgcggcttcctgattggcgggacttccggtcgtactaccctgaacggcgaaggtctgcagcacgaagatggtcacagccacattcagtcgctgactatcccgaactgtatctcttacgacccggcgtacgcctatgaagtggctgtcatcatgcatgatggtctggtccgtatgtacggcgaagcgcaagagaacgtttactactacatcactacgctgaacgaaaactaccacatgccggccatgccggaaggcgccgaggaaggtatccgtaaaggtatctacaaactcgaaaccatcgaaggtagcaaaggtaaagttcaactgctgggctccggttctatcctgcgtcacgtgcgtgaagcagcgcagatcctggcgaaagactacggcgtgggttccgacgtgtatagcgttacctccttcaccgaactggcgcgtgatggccaggattgcgaacgctggaacatgctgcacccgctggaaaccccgcgcgtgccgtatatcgctcaggtaatgaacgacgctccggcagtggcatccactgactatatgaaactgttcgctgagcaggttcgtacttacgtaccggctgatgattaccgcgtactgggtaccgatggcttcggtcgttccgacagccgtgaaaacctgcgtcaccacttcgaagtcgatgcttcctatgtggtcgtagcagcgctgggcgaactggctaaacgtggtgaaatcgataagaaagtggtggctgacgctatcgcgaaattcgacatcgatgcagaaaaagttaacccgcgtctggcgtaa

SEQ ID NO: 267812 - DNA, 1899 bp, Klebsiella pneumoniae
atggctatcgaaatcaaagtaccggacatcggggctgatgaagttgaaatcaccgagatcctggtcaaagttggcgacaaagtagaagctgaacagtcgctgatcaccgtagaaggcgacaaagcctctatggaagtcccgtctccgcaggctggcgtcgtgaaagagattaaagtctccgtcggcgacaaaaccgagactggcaaactgattatgattttcgattccgccgaaggtgcagccgccgctgcacctgcgcaggaagagaagaaagaagccgctccggcagccgctgctccagcggctgccgcggcagcgaaagaagttcacgtcccggatatcggcggcgatgaagtcgaagtcactgagatcatggttaaagtgggcgacaccatcgccgctgagcaatccctgatcaccgtagaaggcgataaagcttctatggaagttccggcgccgttcgccggtaccgtcaaagagatcaaaatcaataccggcgataaagtttccaccggctccctgattatgatcttcgaagtggcgggcgctgcgcctgcagccgctccggcacaggctgccgcgccggctgctgcggctccggctgccgcagcaggcgtgaaagatgttaacgtcccggacatcggcggcgacgaagttgaagtcaccgaagtgatggttaaagtcggcgataaagtcgcggcggaacagtccctgatcaccgtagagggcgacaaagcctctatggaagttccggcgccgttcgcgggtaccgttaaagagatcaaaatcagcaccggcgataaagtcaaaaccggttccctgatcatggtcttcgaagtggaaggcgctgcgcctgccgccgctccggctcaggctgctgcaccggcaccagctgctgccccggctcaggccgctaagcctgccgctgcgccggctgcgaaagcagaaggtaaaagcgaattcgctgaaaacgatgcctacgttcacgcgaccccgctgattcgccgcctggcgcgcgagttcggtgttaacctggcgaaagtgaaaggcaccggccgtaaaggtcgtatcctgcgcgaagacgttcaggcctacgtgaaagaagcggttaaacgcgctgaatccgcaccggcggctgccgctggcggcggtatcccgggcatgctgccgtggccgaaggttgacttcagcaagtttggcgaagtcgaagaagtggagctgggtcgtatccagaaaatctctggcgccaacctgagccgtaactgggtgatgatcccgcacgttacccacttcgacaaaaccgatatcaccgatctggaagcgttccgcaagcagcagaatgccgaagctgagaagcgtaaactggacgtgaaattcactccagtggtcttcatcatgaaagcggttgccgctgcgcttgagcagatgccgcgcttcaacagctcgctctccgaagatggtcagcgcctgacgctgaagaaatacatcaacatcggtgtggcggtggataccccgaacggtctggtggttccggtcttcaaagacgtgaacaagaagagcatcaccgagctgtctcgtgaattgaccaccatctcgaagaaagcgcgcgatggcaaactgacggctggcgaaatgcagggcggttgcttcaccatctccagcatcggcggcctgggtaccacccacttcgcgccgattgttaacgcgccggaagtggccatcctcggcgtgtctaagtccgcgatggagccggtatggaatggcaaagagtttgtgccgcgcctgatgctgccaatctctctgtccttcgaccaccgcgtcatcgacggtgctgatggtgcccgcttcattaccatcattaacaacaccctgagcgacattcgccgcctggtgatgtaa

SEQ ID NO: 267813 - DNA, 1425 bp, Klebsiella pneumoniae
atgagtactgaaatcaaaactcaggtcgtggtacttggggcaggccccgcaggttactctgcagccttccgttgcgctgatttaggtctggaaaccgtcatcgtagaacgttacagcaccctcggtggtgtttgtctgaacgtgggttgtatcccttctaaagcgctgctgcacgtggcaaaagttatcgaagaagcgaaagcgctggccgaacacggcatcgttttcggcgaaccgaaaactgacattgacaagatccgcacctggaaagaaaaagtcatcactcagctgaccggtggtctggctggcatggccaaaggtcgtaaagtgaaggtggttaacggtctgggtaaatttaccggcgctaacaccctggaagtggaaggcgaaaacggcaaaaccgtgatcaacttcgacaacgctatcatcgcggcgggttcccgtccgattcagctgccgtttatcccgcatgaagatccgcgcgtatgggactccaccgacgcgctggaactgaaatctgtaccgaaacgcatgctggtgatgggcggcggtatcatcggtctggaaatgggtaccgtataccatgcgctgggttcagagattgacgtggtggaaatgttcgaccaggttatcccggctgccgacaaagacgtggtgaaagtcttcaccaaacgcatcagcaagaaatttaacctgatgctggaaaccaaagtgactgccgttgaagcgaaagaagacggtatttacgtttccatggaaggtaaaaaagcaccggcggaagcgcagcgttacgacgcagtgctggtcgctatcggccgcgtaccgaacggtaaaaacctcgatgcaggtaaagctggcgtggaagttgacgatcgcggcttcatccgcgttgacaaacaaatgcgcaccaacgtgccgcacatctttgctatcggcgatatcgtcggtcagccgatgctggcgcacaaaggtgtccatgaaggccacgttgccgcagaagttatctccggtctgaaacactacttcgatccgaaagtgatcccatccatcgcctacactgaaccagaagtggcatgggtcggtctgaccgagaaagaagcgaaagagaaaggcatcagctacgaaaccgccaccttcccgtgggctgcttccggccgtgctatcgcttctgactgcgcagatggtatgaccaaactgatcttcgacaaagagacccaccgtgttatcggcggcgcgattgtcggcaccaacggcggcgagctgctgggtgagatcggcctggctatcgagatgggctgtgacgctgaagacatcgccctgaccatccacgctcacccgactctgcacgagtccgttggcctggcggcggaagtgttcgaaggcagcatcaccgacctgccaaacgccaaagcgaagaaaaagtaa

SEQ ID NO: 267814 - DNA, 285 bp, Klebsiella pneumoniae
atgaaacgctttttaaccacagcgctggtcgctgcaacgttttttaccggtgtggcttacgccgctgacgccaacattccctgggcggacaacagcggcggtacggaaacgacccacattgcggcgatgggccaggatctgaatgcccagcatcagcaggtgacgaagaccaatgaaggggtatgggcggcgaattccggtagcatcagcgctgacgaagcggcattatccagcacaaaaccagcctttgccggcgatccttctctgatgcctcaccagggctaa

SEQ ID NO: 267815 - DNA, 807 bp, Klebsiella pneumoniae
atgagaaacccattatccgttgccctgtttacgttaatgctgtcgccgcttgccgccttcgcccaacagcagtttgccacgccggaacaggccgcaactgcgctggccgaagcgatcagccagcctaatgaagccgcgctgagcgaagtactcggcgataactggcagcagtttttacccacggacgggatcgaccctgccgccgtcgatcgctttcaacgcgactggcaggtgaaacatgtcatcatccagcagggtggcaaagcctggctcgatgtcggtagcgaggcatggcgtctgcccgtgcctatcgtaaaaacgtctgagggatggcgctttgatatggccgctggcgaagaggagatcctcacccgcgccatcggccgcaatgagctttcggcgatcgccgccatgcatgcctatgttgatgcccagcaggattattatcatctgaaccaccgctgggcgcagaaaatcatcagtagcgaaggcaaaaaagatggcttgtactggccaacttcgccgggcgaagcgccaagcccgctcggtccggcctttagcccgacggtgcccggtagcggctaccatggctatcgctttcgaattatcgccggtcgcgatgaccagagcgtcgccttgctggcctggccgatagcctggggtgaaaccggcgtgatgagctttatgatcgatcagcaggatagggtctatcaggccaatctcggtgaagagagcgccgcaaaggcacaggagataacgcgctttacccccgacgctgacgccggctggcaggtggcagaaccttaa

SEQ ID NO: 267816 - DNA, 1608 bp, Klebsiella pneumoniae
atgtcactgccgttcaaaccccattttatcgccctgctctgtagcgctggcttactcgcggcggcaggaacactctatgtgcaaagccgaaccccagcgacgatcgctgaaccgcctgcgcagcaagcgccagcgcccgcagcgtcgacgacacagccggtggccgccacttacacccaggcgcaaattgatcagtgggtcgcccctatcgcgctctacccggacagtctgctgtcgcaggtgttgatggcctccacttatcccgacaatgtcctgcaggcggtccagtggtcccaggataaccccgcgatgaaaggggatgcggccgtgcaggcggttgccagccagccgtgggaccctagcgtcaaatctcttgtcgctttccctgccctgctggcgatgatgggcgagaatccgccctgggtggaaaatcttggcaatgcgtttttggcccagccgcatgatgtgatggattcagtgcagcgcctgcgcgccattgcccaacaaaccgggacgctgaaatccacaccgcagcagaaagtgattgtcacccctgccgcaccggtttcagccagcagcagcacggcagcaaccgcaaccgcccacacagcggcgcctgcgcccacgcaggtcattaaaatagagccgaccaatccacaggtggtctatgttcccagctataacccctccaccgtctatggtacctggccgaacagcgcctatccgccggtctatctgccgccccctcccggggagcagtttaccgatagcttcgtcaaaggcttcgggtacagcctcggcgtggccaccacctgggcgctgttcagcagtatcgactgggatgatgatgaccatcaccatcacgatgacgactaccaccacggcgattactcgcataatggcgataacatcaatattaatgtaaataatttcaatcacataacaggagaaaacctgccgggaaaccacgttaactggcagcacaatcctgcctatcgcggacacacaccgtatcccgataatacggtagctcagcgcttccatcagaccaacgtttccggcggactgagcgcgacccaacatgcgccagtcgatcgcgaagcgcagcgccaggcagcgatgacccagctgcagcataacgtaccgacggccacagcgggcaacctggcggcaaacaacgcctcacgcgacgcccagcgtcaggcggcctcggcgcagctgaagcaagccacccaacgcagtaattaccgcggttacgacagtacgccgacccaacagcagcgtcgcgaggcggcaaaaacgcagctgaaaaaccccacgccgcagcaacagcagcgtcgagaagccgccaggagccacgagcagaaccgcacacctcagcagcagcagcgccggcagcagttccagtccgccacgccagcccagcgtcagcagacgctcagccatctgcgcgccaacgcccttagcggcaacgaaagccgcgccccctcctggcaagcgcagcaggaacgaggactgcagagccgccagttttccggcgtaaaccgcgagttacgcgagggcgccagagaacgtctttccgaacaccatgaactgcgtcgccgctaa

SEQ ID NO: 267817 - DNA, 2598 bp, Klebsiella pneumoniae
gtgctagaagaataccgtaagcacgtagctgagcgtgccgccatggggattgttgccaaacccttagatgcaacccaaatggccgcgctggtagaactgctgaaaaacccgcctgcgggcgaagaagaattcctgttagacctgctgattaaccgtgtaccgccgggcgtcgatgaagccgcctatgttaaagctggattccttgccgcgatcgccaaaggcgaagcgacctcccccctggttacccctgaaaaagccgttgaactgctgggcaccatgcagggcggttacaatatccatccgctgatcgatgcgctggacgacgcgaaactggcgccgattgccgcgaaagcgctctcccacaccctgctgatgttcgataacttctacgacgtggaagagaaagccaaagcgggtaacgagcatgctaaacaggttatgcaatcctgggctgacgccgaatggttcctgaaccgtccgcagctggcagagaaaatcactgttaccgtcttcaaggtcaccggcgaaacgaacaccgatgatctctctccggcgccggatgcgtggtcgcgcccggatatcccgctgcatgcgctggcaatgctcaaaaacccccgcgaaggcattgagccggatcagccgggcgtggttggcccaatcaaacagatcgaagccctgcagcagaaaggctacccgctggcctacgtcggcgacgtggtcgggaccggttcttcacgtaaatccgccaccaactcggtgctgtggtttatgggcgacgatatcccgaacgtgccgaacaagcgcggcggcggcctgtgtctgggcggtaaaatcgcgccaattttcttcaacaccatggaagatgcgggcgcgctgcctatcgaagttgatgtgtctaacctgaacatgggcgacgtaatcgacgtttacccgttcaaaggcgaagtgcgtaaccacgagaccaacgaactgctggccagcttcgagctgaaaaccgatgtgctgatcgacgaagtgcgcgccggcggccgtattccgctgatcatcggtcgcggtctgaccaccaaagcgcgtgaagcgctgggcctgccgcacagcgatgtcttccgtcaggcgaaagacgtggcggaaagcacccgcggcttctcgctggcgcagaaaatggttggccgcgcctgcggcgttgccggtatccgtccgggcgcttattgcgaaccgaaaatgacctccgtcggttctcaggacaccaccggtccaatgacccgtgatgagctgaaagacctggcgtgcctgggcttctctgcagacctggtgatgcagtccttctgccacaccgcggcctacccgaagccggttgacgttaccacgcaccacactctgccggacttcatcatgaaccgcggcggtgtttctctgcgtccgggcgatggcgtgattcactcctggctgaaccgcatgctgctgccggataccgtgggtaccggcggtgactctcacacccgtttcccaatcggcatctccttcccggcaggctctggtctggtggccttcgccgccgcgaccggcgtgatgccgctggatatgccggaatcggtgctggtgcgtttcaaaggtaaaatgcagccggggatcaccctgcgtgacctggtccacgccatcccgctgtacgccatcaagcagggcctgctgaccgtggagaagaaaggtaagaaaaacatcttctctggtcgcatcctcgagatcgaaggtctgccggatctgaaagtcgagcaggcgttcgagttgaccgatgcctcggcggagcgttctgccgccggctgcaccatcaagctgaataaagagccgatcgttgagtatctgaactccaacatcgttctgctgaagtggatgatcgccgaaggctacggcgaccgccgtaccctggagcgtcgtatccagggcatggaaaaatggctggcggatccgcagctgctggaagccgatgctgacgcggaatacgcggcagtgatcgacatcgatctggcggatattaaagagccgattctgtgcgcgccgaacgatccggacgatgcccgcctgctgtctgatgtgcagggcgagaagatcgacgaagtgttcatcggctcctgcatgaccaacatcggccacttccgtgccgccggtaagctgctggatagccacaaaggccaactgccgactcgcctgtgggtggcgccgccaacccgtatggatgccgcgcagctgaccgaagaaggctactatagcgtgtttggtaagagcggggcgcgtatcgaaatccctggctgttccctgtgtatgggtaaccaggcgcgcgtggccgacggcgcgacggtggtttccacctctacccgtaacttcccgaaccgtttaggtaccggcgctaacgtctatctggcctctgccgaactggcagcggtggcttcgctgctcggcaaactgccgacgccggaagagtaccagaccttcgtggcgcaggtggataagacggcggaagatacctaccgttatctgaacttcaaccagctggatcagtacactgaaaaagctgacggcgtgatcttccagaccgcggtgtaa

SEQ ID NO: 267818 - DNA, 363 bp, Klebsiella pneumoniae; identical to SEQ ID NO: 138090

SEQ ID NO: 267819 - DNA, 795 bp, Klebsiella pneumoniae
ttgaaaaaattgaagctgcacggctttaacaacctgaccaaaagcctgagtttttgtatctacgatatctgttacgccaaaacggcagaagagcgcgacggctacatcgcctatatcgacgaactctataatgccaatcgcctgacggagatcctgacagaaacctgttctattattggcgccaatatcctgaatatcgcccgtcaggattatgaaccccagggcgccagcgtgaccattctggtcagcgaagagcctgtcgatcccaagctgattgaccagaccgaacatcctggcccgctaccggaaaccgtggtcgcccatctcgataagagccatatctgcgtgcatacctacccggagagccatccggagggcggcctgtgcaccttccgcgccgatatcgaagtttcaacgtgcggcgtcatttccccgcttaaagcgctgaactatctgattcaccagctggaatcggacattgtgaccattgactaccgtgtgcgcggctttacccgcgatatcaatgggatgaagcattttatcgatcatgaaatcaattcgattcagaactttatgtccgacgatatgaagtcgttgtatgacatggtcgacgtcaacgtttatcaggaaaatatcttccataccaaaatgttgctcaaggagtttgaccttaagcactacatgttccatacccgaccggaagagttgactgccgaagagcgcaaggtcattaccgacctgctatggaaagagatgcgcgagatttactacggccgcaatattcctgccgtgtaa

SEQ ID NO: 267820 - DNA, 861 bp, Klebsiella pneumoniae
gtggccgataatccactgtggcatgaaacgctgcatgaccattttggtcagtattttagcgttgataacgtgctgtaccacgaaaaaaccgatcatcaggatctgatcatctttgataaccgcgcctttggccgggtgatggcgctggatggcgtcgtacaaaccaccgaacgcgacgagttcatctatcacgaaatgatgacccatgtgccgctgctggctcacggcaacgcgaagcatgtgttaatcattggcggcggcgatggcgcgatgctgcgcgaagtctctcgtcaccgtagcatcgaaaccatcaccatggtggaaatcgacgccggggtagtttcattctgccgccagtacctgccgaaccataacgccggcgcctatgacgatccgcgctttacgctggtgattgatgatggcgtcaattttgttaatcagacgacgcaaacgtttgacgtgatcatttcggactgtaccgaccctatcggcccgggagaaagcctgttcacctcggctttttatgaaggctgcaaacgctgcctgaacccgggtgggatctttgtcgcccagaatggcgtctgcttcctgcaacaggatgaagcggtaggcagccatcgcaagctaagccactattttcgcgacgtcagcttctaccaggcggcaattccaacctattacggcgggatcatgacctttgcctgggcgagcgacaatgaggcgctgcgccatctctccagcgaaatcattcaggcgcgctttcacaaagccaacctgacctgccgttactacaatccggcaatccatacggcggccttcgccttaccacaatatctgcatgatgctctgtccgcaccgtga

SEQ ID NO: 267821 - DNA, 774 bp, Klebsiella pneumoniae
atggcggccatagtggcagcctatcgcctgcaggcggataaagacaacgcccagctacggatgaaagaagatgaaatcgaactgctgagaacgcagctttctgtacagtccaaaacgcgcagcggcgagagcgccgctgccaaactcagcgcatcgggagaacagcaggcttatgcgatcggcgcctcgatgggaagcgaggcgctcaacgtccttaccacccgtcgcactcagggagttaccgtcgacgcaggcctggtgttgcagggcatcgaagatgcctttcgcggccagcttcgtctcggagagcaggaacgtaacaaagcgctgtttgatgtgtcgcagcaggtttatcagaacctgaataaaatagagcagaaaaacatcagtgccggcaagaaatatcagcaggcgtttgcgcgcaaaaaagatgtggtctttaaagagggcgtctacagccgcatcgattacccgggtaaaggaaaaataagcggtaacgacctggttaccgtggtgatcaaagagatgctgacggacgggacggtgatcaacgatatggaagcgaaagatcaggcgcttacgcaaaagctggatgcctatcccccggtgtttcgcgaaccgctgaagcgtctacagaaccacggctctgtgacgctcgtcgtcccgcctgaaaaggcctatggcagtaaaggattaccgccaaaaatcccgccaggcgccaccatggtttattccgtgcggatagtagatagccaacccgagccggcaaaatag

SEQ ID NO: 267822 - DNA, 666 bp, Klebsiella pneumoniae
atggttgtcgataatgagttggtcgttattatatttagaggtatagatagactattaatcactatcggaggggtcatatcgatttggcttgggtataagctatttagcaaggctttacctaatgatggaacatttgatgggggcattggttcatggacagtgcgcatgcaaaatatagctccaggtgtgttttttgcgctttttggagtgtgctctttaatattttcaatatcccatcctttatcttatgaccaaaaatataattcgggtgatgaaactcatattaatcacatcgttagtgatggtaataaaggatatgagcagtcgcagtatgaaagcaaattctctggagtaaatttggaaaaagtacccaaccttgatattgcaagtgaattagatatattaaactctttggtggtcatccataaatacaaggatagacctgttggcagtttgaccaatgaacagatgcaaaaaataaatctatcatttaataggttgtattcctttcagatatatttgataaataagttgtttggacaaggtagttttgataagtatttaagtatttcagctgatatcagggataacccagaaaaattaaaaaccctatctaaggaggataagctcctgtatgaaaatatcaaaatgctttacgagcagtga

SEQ ID NO: 267823 - DNA, 945 bp, Klebsiella pneumoniae
atgaattttaaaagatgcgttatcagcttgtttttttttactggattttcaatggcaggtgttcagccgattgattttacagaaggtgaaaaaacaatagttgaccaaagaattaatagctttaatgacgaatttagcactatagttaatcaactgaattttagcattgattcttctaaccctgtacctggtgcaaaatccggctgggttaatggagttcccactattatttttacttcttcactattggatgtggttttttatacgactgaattagctgttttaaatatgaatgatagtaaatggggtgactgctatgttgcttatagtggatatttaagaacttcttacatagatatgatgcgacagagggataatcatgttcctgtaagtccattaatacctcttgagaagtatgggcactcttgtgaaggaatcgataaaaaatatccttttgaagggatgttgaaaactcagcgggatcaatctgccggtaatgctatcgctttcatttatctccatgagttatcgcatctgttctataggcatatggcgtttgatactgaaaaaatgagtgattcagaaagacaaaaagctaattgtataataagaaaacaggaaaaagatgccgatatactagccgccagaaagttggttaaatttggctgggaaggggcagcgcttgatgtaaccatttggatggttatgttgaatactggcattattgagaccagtcgcaatagtaatcttgaccatccaacagccttagagagaatgtcgtatactttagatgaagtaaggggcgcgattcttagttctggaggccatgttagtcgtgagatgtctgaggcaatcgatgaagcaaaggatctggtgaagaaagcagatgagcaattaggcggaaaagatgattcagaaaacaatgtaattacttgtaaggattaa

SEQ ID NO: 267824 - DNA, 138 bp, Klebsiella pneumoniae
atgaatacagagaatatcgaagaggcacgttggataatattaaacgccagacaatgcaggaatggtttagagaaagaaataaaattaaaaaatataaaaaatgtctccgaacagagtctctatatattgacaaaataa

SEQ ID NO: 267825 - DNA, 1434 bp, Klebsiella pneumoniae
atgtccggatttaaagcaggttttctgtggggcggcgcggtcgcagcgcatcagttagagggcggctggcaggagggcggcaaggggatcagcgtggcggatgtgatgaccgccggcgcccacggcgtgccgcgggaaattaccgacggcgtggtggccgggaaaaactacccgaaccatgaggcgatcgatttttatcatcgttatccacaagacctggcgctgtttgccgagatgggcttcaaatgttttcgcacctcgattgcctggacgcgtattttcccgcagggcgatgagctggagcccaacgaggctggcctgcagttttatgatgatctgttcgacgaatgcctgaaacacggcattgagccagtcattacgctgtcgcattttgaaatgccttatcacctggtcaccgagtacggcggctggcgcaaccgcaagctaatcgactttttcgtgcgctttgccagggtcgtcttcacccgctatcaacataaagtgaagtactggatgacctttaacgagatcaacaaccaggccaacttccatgaggactttgcccccttcaccaactccggtttgaaatatttgccggatgaagaccgggaaccggtgatgtaccaggccgcgcactatgagctggtggccagcgccctggcggtgaaagcggcgcgcgagatcaacccggcgctgcagattggctgcatgatcgctatgtgccccatctatccgctgacctgcgctccggacgatatgatgatggcgatgaacgccatgcaccgccgttactggtttaccgacgtccacgtgcgcggtcgctatccgcagcatctgctcaactattttgcccgccgcggctttactctggatatcaccgaagccgatcgtcaggcgttaaccgagggctgtgtcgactacattggctttagctactatatgtcgttcgctaccaaagccaccgaagacaaccccttgcttgattatgatgaaaccaccagcctggtctccaacccgtacgtcaaaaagtcggactggggctggcagattgacccggtcggcctgcgctattcgctgaactggttctgggatcactaccagctgccactgtttattgtcgaaaacggctttggcgcgattgatgtccgcgaagcggacggcagcgtcaatgaccagtatcgtatcgattatctctccgcccatatcgcggagatgaaaaaggcggtggtcgaggatggcgtcgatctgatgggctacaccccctggggctgtatcgatctggtttccgccggcacgggggaaatgaaaaaacgctacggctttatttatgtcgataaagataatgaaggcaatggcacgttggcacgcagccggaaaaagtcgtttgcctggtatcagcaggtaattgccagcaacggggagaacctgtcgtag

SEQ ID NO: 267826 - DNA, 2163 bp, Klebsiella pneumoniae
atggtatctgtaacgaaaacatcagcaagtaaaaatgaagatgatatcgatttaagtcgattagtgggcgagtttattgatcatcgaaaacttatcatttctgtaacatcattatttacagtaatagctttggtatacgcattgtttgctacgcctatctatcaagcagatgcattaattcaggttgaacaaaaacaagccaatgctattttgactaacctgagtcaaatgttaccagacagtcaaccacaatcagccccagaaatagcacttttacagtcgcgcatggtactgggcaagacagtagacgatttaaatttacaagcgcgaataacaccaaaatattttccaatcttgggtcgtggttgggcaagattaactggaacaaaaaatggtgagttgagaatagcaaaattatttatacctggtgcaaatgaagattatataccaaagttacaactgaatgttattgataataaaagatttgaaatagtaggcgatgacttttcttttgaatccgattttgggaagcttactcaaaaaaatggcgtagttattgatatcgccaatatatcggctaaaccaggagataagttttatatatcctatacaactcggttaaaagctattaatgatcttcaggattcattttctgttaatgatcaggggaaagatactgggatattaactctatccatttctggttctgaaccgagtcttatcaaagtaatattagatagaattacagaaaattatcttgagcaaaatatcgaaagacaagctgcacaagatgctaaaagcttggagtttctgaatcaacaattaccaaaggtaagaggtgaacttgatattgcagaagataaactgaatgcttatcgacgtaaaagtgattctgttgatctatcgttagaggcaaagtctgttcttgagcagattgttaatgttgataatcagctaaacgagttgacgtttaaagaatctgagatttcacagctatataccagagagcatccaacatataaatcacttatggagaagcgtaaaacgcttcttgatgagaaaagtaagctgaacaagcgtgtgtcagcgatgccagaaacacagcaagagatcttgcgtttgagtcgcgacgtggaatctggacgagcggtatatatgcaacttcttaacagacagcaagagttaaatatcgctaagtctagtgctataggtaacgttagaattattgatgatgctataactcaaccaaagccagtaaaacctaaaaaggtattggttgtaatcattggtttagttctcggatttatgatatctgtaggacttgtacttataagagtatttctgagaagagggatagaatctcctgaacaacttgaagaaatcggtattagtgtctatgccagcattcctgtttctgagagttttaccaagaaaataaataattcaaataaagttaaaaacgtgaaggctgctgaatatcaaggttttctagctcttgataatccagctgatatagccttggaagctataagaggtctgcgtacaagtctccattttgcaatgatggatgcaaaaaatgatatattaatgatatcaggggctagcccaaatgcaggtaagacatttgttagtacaaacttagcagcagtaactgcacaaacaaataaaaaagtattgtttatagatgcagatatgcgcaaaggttatacccataagttattcaatgtaaataacgataatggcttgtctgattatctttctggacgggttgatactgaaaagtgtattaaagctatatcagcaggttttgattttatatccagaggcgcagttccacctaatccagctgaactattaatgaattcaagacttgaaaaattgcttgattgggcgaaagataattatgaattagttatcgtagatacaccaccaatactcgctgtaacggatgctgcaataattggtcgtcatgtcggaacgactctgctagtagcccgattcgaactaaatacaccaaaggaaattgaagttagtttacgtagatttgataatagtggtgtacatattaatggttgtattcttaacggcgtaatgaaaaaagcaagtagttactatggttatggctacaatcattatgggtattcttattctgataaggattaa

SEQ ID NO: 267827 - DNA, 276 bp, Klebsiella pneumoniae; identical to SEQ ID NO: 245152

SEQ ID NO: 267828 - DNA, 435 bp, Klebsiella pneumoniae; identical to SEQ ID NO: 10324

SEQ ID NO: 267829 - DNA, 351 bp, Klebsiella pneumoniae; identical to SEQ ID NO: 10325

SEQ ID NO: 267830 - DNA, 894 bp, Klebsiella pneumoniae
atgttacttacttcattcaatgacattcttaaagaagaccaaacattagctattagattggcatttatagatttcaaagttttctatactggaatgttatcaagaatagatattatgaatgagtttgacgtctccgagataacagcttcaagagtgatttctcaatacagggagtttagaggggggaatatatcgtatgataataaaagtaaaaggtttgaattaaaaaaagacacatacgagcctttggtgaagtttaatgctaaagatgcgctgagaatgctttccgaagggtttgataaaaattatttgattagggggcgtgggtttattccttatgaacctattggttttattcagccacctcttgaaaactcctttgtttcgataataactagagctattgccgcaggaaaaaaaattaagtgccaatataactctgctactagcaatgattcttcttatagagttctttctccgcttgttattctttttgatggcaggaattggatatttagagcctaccatgagaattcgaccagtgacgtaaagtataaaaactttaactttgctcgtgttgtcgatgtcttaagtgatgatgagtttgttgattatgaacatgggcttgcatacgatgatttatggaatataacactccctgttgaaatcgaaataaataagtcatttagtgacgttaaaaaaaacgaagtgagaagagattttggtattaaagatggggccgataaagtgttaatgacggaaagagctgctttcatttggattatattaaatcaatggatggtgcattacgatgatggaaaaaaaatgacagatgattatattttttgtctgaaaaatgctgaaatgctacgaacttataaggctattagataa

SEQ ID NO: 267831 - DNA, 663 bp, Klebsiella pneumoniae
atgaaagcattagtaatttttggcagcacagctagaaatgagaggtcttttgattcagatatagacatgcttggtgtatatgacaaggaaaaaatactatctgtttcaaaagagagcgtgaacctttttttatatccagaaacaaccttacgcgaaaaaatggtttctggtgatttatttgcactccacctagtaaaagaatcaattccaatttatggctctgatataatcaaagacatatacagctcattcaaatataaagagagttacatcgtagaaataaataccgcactcaaagtttccaccgagatattatcaatttacgataaattaagacagcacaagagtgccaataaaaaaatcgcatggtgtttacgcacgataataatttcaatatcagcgcaagatagaacccctattttctccaaaaaaaaactatccgagtatataaaggtaacaggattcgattctagggaaatacttatactcatcaatataaaaagcataagtaaaaaattaccaagtagaataataaatagaatttcatgtttatttaacgaactatatatatatagcgactttcataactatagttataaacaagatattctataccaaatgctacatgatattgatagaaataataatagcataaactactaa

SEQ ID NO: 267832 - DNA, 588 bp, Klebsiella pneumoniae
atgacatttgatcacggtgatggccaattagagtttgagggagcaacactcaccctagatcacctaaaaaatagaaaaataactatacagattgatgagacatctgcactagtggcggaaatttcgtgtagctcacattgctacacagatgaaacaccattcacgacaactttacttgagattagagaccactacggtaacaaacgttacttttgccccaaaagatatgagctaagcaaaaacatacatacttggttggaaaattgcgcaaatgagatatgtataaaaagagtactcccaagtggaaccattcactggttaatcatcgaggatcatgattctggtgaaaaagtaagcattgtgtttgagattgagaaacataaaagtattgataatgctgtatacatgatggttaaggctgttcatgcttttgacagaacccccccgccaaatccaagtgagcgagatgtaactttcaaggtggtaggttcttcctatgccaagaacgatgaagcaccgccgagagccaagaaaaaaagaaatagaaagagaaaacgctctacagcagaaacgaaaaaagactcctag

SEQ ID NO: 267833 - DNA, 948 bp, Klebsiella pneumoniae; identical to SEQ ID NO: 132723

SEQ ID NO: 267834 - DNA, 264 bp, Klebsiella pneumoniae
atgatcattaatggtaaaaaaataaaagcaaaagaaataatggaaatgacaggtcgtagtgaaagaactgtcagaaaatatttttctcaatctcgtgacgattacgaaaaaacagcaatggatcgtcgtcgtcaggcttacgaactacgaagccaggggctgaaatggcaacaggtagccgacaaaatgggctgttcgtatcacggagccgttgccctgtatcgccgttatgttgccttagatatgcctcaaaacagcctgtaa

SEQ ID NO: 267835 - DNA, 261 bp, Klebsiella pneumoniae
atgaccgttaaattaaagggtattgtattacctccgacgttgaactacccaaaactcgatgattttaagttgtttgatattatggcgcaggttcctgttaccgctggtttggtagggtcatattttttaggctcccgcaatgcagacccaacatataactttgctaacccgtcactgcctttaattcagcatttgagcccaggctacagcgactcaaaatgttcaattttaagtgttaatagggctttgttgaataaataa

SEQ ID NO: 267836 - DNA, 1902 bp, Klebsiella pneumoniae
atgaagataaacacagttagaatagaaaactttcgttcatttaatgatgagacaattacacttgatgactacacatgttttgttggatgtaatggtgcaggtaagtcaacattgcaaaatgctctaaatgttttttttagacagtataaagactcaaaaactgatttaagtaaactttctgttgaagattttcaccacagagatactagtaagccaattcagattaccgttgaatttactaatttatctaaagaggcagttgatgaattatcagcatatgtccgacatgataagttaataataacagctaaggctgaatatgatgaaaaaacacaacgtgcggaagttaaacagtatggtaatagactggttataagtgattttagagtttggtttgatgccgaaaaatctggctcaaaagttgacgagttaaaggtcatatataatactatcaaattaaagtataatgaccttccggctccaacgactaaagccgcaatgcaatcagcactgaatctatttgaaagtcaaaatctagagttgtgtgagttggttcctagtgaggaccagttttatggtgtatctaaaggagcaaataggttagctaattatattcaatgggtatatgtccctgcctcaaaagatatatcggaagaaggagatgagtctaaaaactcagcattaggccagttgttattgcgagctgtaagaaccaaggttaattttgatacaaaaatagaggagatgaaaaataaacttcttcttgaatatcaaagtatgttagagggagaacagggcgcactattggaactttcaaattccatagaaagtaaattaaaaatatggtctacccccgggtctagtgcaaaaataatttggaagaaagactctgaaaagtcagtaaaagtcgaagtgccattagcaacaatacaaatcggtgagaatggttttttaagtgaattatgtagatttgggcatggcatgcaacgctcgtatatgttgtctttactgcaagagctatctacgaatggagatgataatgctcctactttagttatggcgattgaagaacctgaactttaccaacacccgccgcaagctcgatatttatcagaactccttcaggaattatctactaataataatcaaataattgtttgctcgcatagtccttattttattcctggggatgacttcccaaaaataagacttgtacttatggatggcgaaccgaaaagaagtttaatcaaaagtgtgacctatcaaaagatatcggatatgttagctagtgcgggagaaaaaaatatttctgagaaaggaatccaggcaaaaatgttcccaagtttaagacctgagttgagtgaaatgttttttgcaaaacgtctggtttttgttgagggaatagaagatgttgcctatataacgacgtatttgcatttgactgataattataatcgatttagagcaatgggattccatatcattccagttcatggcaaaagtgagttaattaagcctatagcgatcgcaaagttattagatataccttattacgtggtttgtgatgccgatactgataaaacaagagaacatgaagtaattcaggcgaagaaagaaaataagataattctttcttttaataatatcgaatctgacggatggcctactagtgatatctatagcaaaaatattactatgtggaaatgcaatcttactcatgttatagaacaggaatttgggggggggtataaacagcatgaagataaagccgctgcctattataataatgcaggtgggttaaaaaagaatccgttggctatttcaaaagcgttagaatttgcttggggagctgggcttcggtcaaagcagattcaagaacttattgatagaatcattgcttaa

SEQ ID NO: 267837 - DNA, 321 bp, Klebsiella pneumoniae
ttgacagaaaacgtcttattcgcggaagagcgcttcgatattcagcccctgtccctgcagaatttcccgcaggcgacgcagaccttccacctggatctgccgcacgcgttcgcgggtcaggccaatttcacggcccacatcctccagcgtggcagcttcataacccagcagaccaaaacgacgtgccagaacttcacgctgcttggcgttcagttcgaacagctatttgacgatactttgcttcatatcatcgtcctgcgtggtgtcttccgggccgttctctttctcatcggccagaatatccagcagcgctttttctga

SEQ ID NO: 267838 - DNA, 240 bp, Klebsiella pneumoniae
atgcagctcttctgcaacagaggctttgtttctgttgaattcagtctgcaaggattcacgcgcactcgcttccgcagcatcggcggtgatacgagcatttttctcctgatagatcagaccggagcgaatgtcgtccagatttccgctttcagaggaaccgcggatttgtgcagccaatgtgctgcgcgcctgcgcttcggcggtatccgcattcgcacgagcctgctgctcttcctgtaa

SEQ ID NO: 267839 - DNA, 627 bp, Klebsiella pneumoniae
atggaaaacgtcataacattcatcgttatattcttgattattataacactcgttttaatgacagcttcaaataaaggctctgtagaagaatacagaaaacacaaaggtgagtatttaaaaagaaacaaccttaaagcaactgattttgtctggttcaaacgaaacgtcgataatgagattggattctctgtggactgcgaaaagatcaccgtagtttctattgtcggtaagagaacacgaaaaggttacaaatacatagcattcaaaaaagactttctcgctaaggacattttagaagtttcattagttgaagatgacaacattactcaaacgataaaaaataacggttctgttcttgggcgtggcgttctcggcgcagtaacgtttggtgttggtggtgccgttgtaggtgctcttagtgcatccagcaataaaaccattgatacaaaaacaataatacgcaaaatcgaatttgggatcacgataaatgacctcgacaatccacttaataactttgttgtatttgaaggtaatatttctcctaatagcaaagaatataataacataaaaagcaaactagtaagtcttgtatcgagggtaaaaatatcatcagggctttttaaataa

SEQ ID NO: 267840 - DNA, 1182 bp, Klebsiella pneumoniae
atgagtgagatgagctatctggaaaagttactggatggggctgaggttgaatggaaacctttgagggaagtttgtgattttaaaaatggatttgcatttaaaagcaacttatttaaagaaactggattaccgatagttagaatcacaaatatagatggttttaacgtgaatcttgatgaagtgaaatacttttcaccaaatgattacaaggaagatatatcctcctttgaggtgtcaatgggggatatagtaattgcaatgtcaggtgccaccacaggtaaggtaggtttctataaaaacgaaacaagatgttatctcaaccaacgagttggtaaattcgtacctaaacgtaaccttttaaacaataagtatttataccattttctgttattgaatactgaggccatctatatccttgctgggggcggagcacagccgaatctcagctcaaacgcattgatgtcaaaattacttattcccatacctagctcttccaacccggaaaagtccctcgctatccagtctgaaatcgtccggattctggataaatttactgctcttaccgctgagcttaccgctgagcttaccatgcgtaaaaagcagtacaactactatcgcgaccagttgctgagttttgatgagggtgaggttgagtggaagacattgggggagatcacgaggaaaattgcatcagggcgtaataagactcgccaggccgaaggtgatttccctgtctacggctcaactggcttgcttggctttactaatgaacctgcatattcaggggatttgcttctagtcgctcgtgtcggtgcatatgctggattggttaatgctgtatccggccattttgacgtttcagataatactctaataattcacccttcagactcatggaattcgcgtttcgcatttcatcaactgacacacatgaatttaaatcagtacgcagtaggagcagggcaacctcttattacaggcggaatgttaaaaaatctgaaagtaccagtcccctcactgaacgaacaaacccgtattgcgaaaattctcgataaattcgaaacaataacagtgtcaatcaccgaaggcctgccccgagagattgaactacgccagaagcagtacgaatactatcgtgatttgctgttcagcttcccgaagcctgaaattgccagttactga

SEQ ID NO: 267841 - DNA, 756 bp, Klebsiella pneumoniae
atgcaccaagatttagccaatgcaacatttcaggtcattgctggagattcacgcgggagcggatttagttttatgcgtgaagacctggttgttacaaattgtcatgttataacgtcttgcctagactctcagaggctgcgccaaaatcgtgctgttattcttagaactgaagaaagccaaatacttaacgcacaaatcttacattttgattatgagaatgatttttcgattttgcaattaaactctcctctcccatccggacggaaggtcctgcacccaccagaagcgttcatgcccactaggggtaagagaataatatttgcaggatacccccatgggatgccgcaattgcttacaaacgaagcaatcatttcagccccgttggaacatggacagtttgcaattgatggcatggttaatggtggcaactctggtggaccgatcatcgacgctgaatccgggtttgttgtcgggttaattacagctcgacgttatgtgagtggcgagaaagctgatgctctaatggcagaggcgattgaactacgaactcttttagagcagacttcaaagaacatatccgtggaaatcatgggcgtcaattttgcaggattgttggatatgtttggccattccctgcaggtaatcatggaacttatggagtcaaacgctaaccctgggataggcataggctaccctatatctccgattgttgagatggcaaaacaacaaaagcgtatattcatgaccaaattttga

SEQ ID NO: 267842 - DNA, 231 bp, Klebsiella pneumoniae
atgagtgaagctaaaccgcaggacaacagcaccgtaaagggctatcgcgctcaaagtgagaaggatactacctttatttcaatgactaattctattgatagcatcagcagtatctttattgatggaataatcccacccgagggctcagttcttgagatgatactggtcaaaaaagagaacctttgcggaaaatgtacgatagaactaaagttgcgagctattctactttaa

SEQ ID NO: 267843 - DNA, 378 bp, Klebsiella pneumoniae; identical to SEQ ID NO: 227033

SEQ ID NO: 267844 - DNA, 177 bp, Klebsiella pneumoniae; identical to SEQ ID NO: 234138

SEQ ID NO: 267845 - DNA, 156 bp, Klebsiella pneumoniae
atgaaaaacgcctatgtcaaagtaacgtttaaactcttccagcgggctatagttatgggagtgtctcactacggcatcagccacataggctactttataaccagaaaggactgcttgtgcagtaaaatacatatcttcacaaagaattgtatttga

SEQ ID NO: 267846 - DNA, 222 bp, Klebsiella pneumoniae
atgtccccgcaggaacagtatctcgcgcaaaattctttagcgattctgcgtgataaaaacgttcgcgctggcgaagatagtcactacgaaattgattgtgtgacgccaacgaagcagcgtctggtaaatttgtgcctaaatggtctccataggcatcaagcaactggcgaatgtatcggctttcattttccgtcgctatggttggtggagaagatgggttag

SEQ ID NO: 267847 - DNA, 399 bp, Klebsiella pneumoniae
atgacttacgctattaaaacacttaataacatccgtacccttcgcgctcaggcacgagaaacagatctggctactctggaagagatgctgggaaaattaactgctattgttgaagacagacgccaagaagaatcacttgcactgcaacaaaatgctgaacgtcaggccaaaattgaagcgcttcgtgcacaactgcttgaagatggtattgatccatctgaactgctgggcaatcctaaatcttcccgtccggctactgttcgtgctcttcgtcctgctaaatacaagtacattgacgaaaatggtgatgaaaagacgtggacgggtcaaggtcgtacaccaaaagcgatagctgctgcactagaaggtggtaaagctcttgaagactttgccatctga

SEQ ID NO: 267848 - DNA, 1404 bp, Klebsiella pneumoniae
atgaaaaaacaaaataaaaaagggttctcattacttgaactcattttggtgctgggtgttggtagtatgatggcttttatgcgttttcaggatatgaaaactgaacaagaaaatgttatggctaaggctgttggtcaacagatgaagcagataggtgaggcggtaaatggctatatcaatatcagatatgacaagctttctacgctgacgtcaagcagtagtcagtcaagcgatccgggtccccgtacctgtaatggttcaggttgtgaaatcacttatcagacactcattaatgaagggttattgccagtatcatataccggggtaaatgcccagaaatcttcttataagataatgttaaaacgttcaggagctactcctaactatgtggttaatggcttaatcacaacaactttaccttggagtgaaagcggaaaacttcgctacgatttattaggtaaagctatgcaggaagcgggtattgacagtggcatgacaagaacaacatcaaatgctttcggttatggtggtcaatggtctgaaacctctgctaatttcaataatattacctccgctggacagttggctttccgtgttgggtttaatagtgcattatattctgtttatttaagacgagatggaacactgccaatgacaggaaaccttaacatgggtggtcaaagtgtctataatgctcaggatataacagcagcaggaacgacaacaacaggaatattagaaactaatactgctaccgttggagcaacattaaacgtagcaggagttactacattagcctctgatcttaatgtatcaggaaacggacaagtcaatgggaacttaaattctaacaaaaccctatcaggcgcaactgtaacgtctcgttctgaaacctatactcaaaactggtttagaacattaggagatggaggaatttatttccaaaagtatggtggtggttggaatatgggagatacagctacaataaatgcgtatggcggtaaaaatgtccaaacatccgctggtttctatggtggatatataaaatcaacaggaaatattgatgctaatggcagagtaaatgctggtgaatttatttatataaatggacaagcgaatgtaggatggggatgctctcctaatggattacagggaagaacgccaaaaggggctattttatcttgtgttaatggtgtgtggaaaagtagttctgcaagaattgagagaactcaatttttagtttctagtggtagtaattatggagatatttgtcaatccaaaattaatagtaatggaatggcagcacaaggttgggtcgcaagtgggtctgatgcttgtactgaggacgggaatgattgttcagtggacaatgttagatgttttgcaataagaattgtaaattaa

SEQ ID NO: 267849 - DNA, 858 bp, Klebsiella pneumoniae
atgatgtcattacgcgatgctgttagtgaagatgattggctgagtagtatgatgcttttattcagaagcgaaatgaatcgacgtcgtatattgattgtagttgagggcattacagatatccgatttttcaatgcataccggcttgataataggatgatttatgaatcgccagaaaatgggaaacgtgaggtaatatcggctgttagtcaattacgtcatgctgggaatgatgctgtgtatggtgtatgtgacgctgattttgatgagttaagtggaataaattacgagggggttttttatactgatgctcatgatcttgaaatgatgttagttaaaggtggagtggttgataaatttattatgtcacacacagatagaaaactaattcaaggggaattagctgaatcattctgtcgtgatgtaaagatgaatatcctttgtgcatgttataaaatcggacttctcaaatggtacaattatcttacacatagtaatcttaattttaaaggattaaaacatcgggattttgtaagcattaataaaatagaggttttagttgatgagaatgagtatataaaccatgtagttaatagaagtcgtgccggtggggattttaatgtagcagacttatttaatgaagtgcgtaaattagaattaatgtctccagaccacttttctatatgcaatggacatgatttcacttgtatattaaaaatgatgtatggaacggatgtatctgtaaataagaacatgcgtctggatgagatagatagttatatgcgtatgagttacgatcatcacacatttagaactacgaaattacataactgcctgaatcaattgttaactttacattaa

SEQ ID NO: 267850 - DNA, 1245 bp, Klebsiella pneumoniae
ttgaaattaatacattttgaaataaacaaactatttggtctccttgattatgaaatccccttggataaccatgaaattactatgcttacaggtccaaatggatacggtaagacgatgattcttaagataatcaatggtatccttgcaaatgaattaaatatcctatgtaaacttaagtttgatttaattaagattgaatttcaaggtggctcagtttcaattactcatgacactaagaaagatggcttaatactgaatcatctagataataattcgggaagcaccgcaactgaaaaactcaagttacaaaaagatgaatccagtacggaagaagtattttatataagctggcatgggagggaagctaaaccaaaacaaaaaccacaactggataagccattatcttcgaaggtattaagtcacattacatcgaaagaagacgtatcttttatatgtgcagatcgattacaagttagggctgatgatgaaacagtcattgatttatgtgcaagaaaattaaaagatttgatggaaagcgcacaagatgattccgctgcattatcacaaagattagatgctacatttcctatccggttatttgagcgtttagaacaacaaaaacgattttcgtcaggaaatattcaagcgcgcttaaatggcattcaagataaacgtcgtcattacatgcggtatggtcttattcaggctgaaaatgatctaatgcctgaaaaaagcacaagtctttatagtagtaatgaatatctaggtgtcttggatctatacattgaagatgcccttgggaaactgtccccctttcagacattgcatcaaaagattgatttatttgaatcaattttgcaagaaaagattttagcttttaaaaaagtgatgattgatagagataaaggattttatttcgaaagtttaaatggtgatatcattgatcgtaatatgctttcatcgggagaacaaaaccaaatagttcttctttttaatttgattttcgatctggtttcacaaaaagtaattcttatagacgagcccgagatatcattgcatgtcgcttggcaacaaactttcttagattctctcaaaaaaatacaaaaaatcaacgagtatgaaaaggtcattattgctactcactcaccacaagtaatcagtaagaattgggaattaacatacgatctttatgaaatgattaaaaatagaaatgaaagccaacagtcttcagaaggaaaagagtga

SEQ ID NO: 267851 - DNA, 480 bp, Klebsiella pneumoniae
atgagaaaagtacaattagacaacaatgatttattaacatattttaatacgattgaagaactcaaaaatcatccatcaatggatgaatatagaacaggataccgtaagctacgcgatgatgatgcatttgcatatgaaataaaaaaatataggtctgcacataccacactgcgcaggcttgataagaaaagacaatctcttttggctagctttattaatgagcttaatcctataagtagctcagcagctaacaccgctgctaaagcttcaggaagtcttgataaatttcatgaacgtatactttacaggaaaaccatcgaagaaaaaagtgatgccgaaattattgctctggtgataaaacaacgtacagaggccgctcttgagttccagcgctctgttgagctgagtcttgaacagctttcttctatctcatcagattttggaacatcaaataaaaaacgcaggaaaatgtctgtttaa

SEQ ID NO: 267852 - DNA, 1329 bp, Klebsiella pneumoniae
atgcgtatcgaccaagctctcgacttcattcacgcctgtcctcccggtaaatttgagtccttatccgacttgctatcacctgaactggtgcaggcttgcctggccgagacgggctccgtctccttgcgccgacggcgcatgcccatggagcgggtgctatgggccattatcgggatgtccttgtttcgtcatgtccctatggcccagctggccaaccagctcgatatcctgttacccggtgaccggccgtttgtcgtccccagcgccttcatccaggcgcgccaaaaactggctgaccaagccgttcgacaggtgttccagcagaccgccacactctggcatcagcagtgtcagcaccccacctgggccggcttgcagctgctggccgtggacggggtggtctggcgcacgcccgatactccggacaatgccggcgcctttgccaagtcgaaaaccggccagggggagacgcagtatccccaggtccgcatgttgtgtcagatggagctgaccagtcatctgctgacccagacagtgatggactcctgtgcggtaaacgagatggtgttggcagagcaactgattgaaaaaacacccgataatagcctgaccctgttcgataagggcttctactcactggggttactccatgcctggcaacgccagggcgtagcgcgtcactggcttattccgctgaaaaagggggctcaatacgaggtcatccgcaagctggggcggcaggatgtgctggtacgcctcagtgccagtccgcaggccaagaagaagtggagcgagttgccggagcagttcgaagcccggctgctgacccggacggtaaacggcaaggagcggcaggtgctgacctcgctcaccgacccgctgcgcttcccggccagcgagttgatggagctataccagaatcgctgggaaatcgagctgggctatcgggagatgaaacatagcctgcaacagcacagactgacgctgcgcagcaagaaacccgatggagtaaggcaggagctatggggcttggtattggcctataacctactgagatatcagatggttagaatggcggcgagcttaaagggctatacggccagccagttgagctttcacatggcatcggtgtatctgctgcatgagctcagttgcctgccgtttgtgtcaccgggcatggttccggggcgtgtcgccgagttggacaaacaggcggagcagttcaagttacccgcccgccgagaacgaagttacccaaggtgcatcaaagccaaaccacagaagtatgcgacgagaaaacctagtaaaaacaatgccagtcaggcttaa

SEQ ID NO: 267853 - DNA, 1134 bp, Klebsiella pneumoniae
atgaatataccgggtaatggcctgggccggtttggcctggccgggcttacgttggccgggatggctgcaatatggtgggggatcacccgctatggcggcatgctgaatatcaatacgcggggcgagcaggtactggcgtttgtcctggtctgtctggcgttggtatttgttttttaccttcctgcaatgtcccgccgtgtgaaggagagtttatatcgccggcagtcgcagcaggacagcgtcttacccggcgaagaagggcgcgtggcgctgacacctccccatcatattacggtgggggaaattcgccagactctacgctatcagtatggacgcgcctggtcccgcaaagtccgtattctgctgataattggctcagtcagagacgtagaacaactgaccccaaagctcacgcaggaactctggcaggaagatcagggtacattattgctgtggggtggagaccctggggcagcggtagataacgcctggttcacagcgctgcgtaaactgcgttatcgcccggctgatggtatggtgtgggtaacatcgggctttgacggcgttttgacaacgatgaacagaacgaagcccaggctcacgccagatgaaatggacagtgtgtctcactctctaaagctacgctacgaagctcttggctggaaactacccctatacgtctggtcgctgtatgaggggggcaacgaaaaaaatggacgtatcactcagcctgtaggctgcctgttacctgcaggttgtacgccgcaaatagttgccgaacagttcactgccctggcgtcgttactgatagagcagggcatccagcagatatgcgggcaaccacagcacaattttttactcgcgctggccgatcagttgacccgtaaaccggaaacggtgacggagccgttatcggtattgcttaatccttaccgcccgcagccgctggccggggtggtatttagtgaggcgtcagtagaggctggtcgcagtgtccgtcatcactggggacgggataaccgctgggaaacgataccagactcagtgctgtggttgccagccggtctacgtccgcgcaaacagggagtcaactggatgcgtgggatgagcgtggccgccgccgccctgatgtaa

SEQ ID NO: 267854 - DNA, 2262 bp, Klebsiella pneumoniae
atgacagtctcttttatcgccaaccgccacctggtggcgatcgcacagcagcaggtgcagcaggcctcggcgggaaaacagccgctggccgtacgcctgcatgcgctctccgcgttacagaaaacgctttctcaactggaataccgctcgcagcacggagcgccgtggtacctccgcgctggcctcagtcagaacgatgacctgctggcggcgctgttcccgcgctacggggagatggcgcaaccgctgctgcgcgatgcggcggcgcatcatctggaagagcagctcaccgccttcgtgcagctgccgccggacagcccactgcgtgagaagatgacgaagaccgcttacggacaactgaaacaatatctgatgttgacccgcccggaaaaaatggacgccgcgtggttcgccactacgctaatgcaggactggccgcagcgctcaggcatcgccgacgccgtctggcagggcagcggcccttcgctgctggcattttatgccgccagtctggtgtcgcatccgcattggcgtctgcctgtcgatgacggtctggtcagccaggtgcgcacacggttaattcgccaactgggccagcgcaacagtgagtccacgctttaccagaagatgctcgcgcaggtggcgaatcagtatgccgatatgcgcctggcggatatgactgccgacaccgatgcttcgcgtctgttcagcactgatgaggtggtgccgggaatgtttacccgtcaggcctgggagcaggccgtgcagccggccattgagaaagtggtcgcggaacgccgcgatgaaatggactgggtgctgagcgatacgaagcagactgccgcgcagtcgacgtcgccggaagctctgcgagccaggctggcggagcgttatttcgctgatttcagcggcgcctggctggatttcctcaacagtctgcgctggcagcgcgcggcgaccctctccgatgctatcgaccagctgaccctgatggccgatgtgcgcctgtcgccgctggtggcgctgatgaacaccctgagcgtgcaggggcgaaccggccagaccggggaagccatcgccgattcgctggtcaaatcggccaggcagctgttcaaccgtgataactcgcccgccatcgatcaacggtccggcgcgcgcggtcctctggatgccaccttcgggcccgtactggcgctgctggacaatcgcgacggcgggacacccaccagccgtcttagcctgcagaccttcctgacccgcgtcacccaggtgcgtctgcgcctgcagcaggtcaccaacgccaccgatccgcaggcgatgacccggttgcttgcgcagacggtattccagggcaaggccgtggatttaaccgaaacgcgcgactacggcagcctggtggcggcggggctgggccagcagtggagtggatttgggcaaacgctgtttgttcgcccgatggaacaggcctggcagcaggtgctgaccccggcggcggaaagtctcaacgcccagtggcgcagcgcggtggtggaggactggaatagcgcttttggcggtcgctacccctttaaaaataccagcagtgaagtctctctgccgctgctggcaaaatacctcgacagcgagaccgggcgcatcgcccgctttctgcagacccggctgaacggcgtgctgcataaagaggggagccgctggatggcggacagtatcaatgctcaggggctgacgtttaacccggcctttctgcaggcgatgaataccctgagccatctctccgacgtcgcgttcgccaacggcgaagcgggattgcattttgcgctacgtcccggcaccgcggacggcgtgatgcagacggagctggtcatcgacagtcagaaacttgtctatatgaaccagatgccggtctggcggcggttcagctggcccgctgacaccgaagcgccgggcgccagtctgagctgggtcagtacccggacgggcacccgccagtatggcgatttcccgggcgcctgggggtggatccgtctgctggataaggcggtggtcagcgcttatcccggaacgagcagcagctggagcctgagctggaaagcgccggatggtctgttgctgaactacacgctgcgtaccgaggcgggggaaggaccgctggcgctgctggtgctgcgaaactttacgctaccggagacgatattcagcgtgcgcgcgtctgcggaacgtgttccgctgaccgacgatatacccggcgaagagggatattga

SEQ ID NO: 267855 - DNA, 1764 bp, Klebsiella pneumoniae; identical to SEQ ID NO: 225865

SEQ ID NO: 267856 - DNA, 1047 bp, Klebsiella pneumoniae; identical to SEQ ID NO: 225864

SEQ ID NO: 267857 - DNA, 537 bp, Klebsiella pneumoniae; identical to SEQ ID NO: 225863

SEQ ID NO: 267858 - DNA, 444 bp, Klebsiella pneumoniae; identical to SEQ ID NO: 225862

SEQ ID NO: 267859 - DNA, 1416 bp, Klebsiella pneumoniae; identical to SEQ ID NO: 225861

SEQ ID NO: 267860 - DNA, 915 bp, Klebsiella pneumoniae; identical to SEQ ID NO: 225860

SEQ ID NO: 267861 - DNA, 330 bp, Klebsiella pneumoniae; identical to SEQ ID NO: 225859

SEQ ID NO: 267862 - DNA, 1092 bp, Klebsiella pneumoniae; identical to SEQ ID NO: 225858

SEQ ID NO: 267863 - DNA, 585 bp, Klebsiella pneumoniae; identical to SEQ ID NO: 225857

SEQ ID NO: 267864 - DNA, 276 bp, Klebsiella pneumoniae; identical to SEQ ID NO: 225856

SEQ ID NO: 267865 - DNA, 1047 bp, Klebsiella pneumoniae; identical to SEQ ID NO: 214010

SEQ ID NO: 267866 - DNA, 1653 bp, Klebsiella pneumoniae
atgcctttccgcgccctcatcgacgcttgttggaaagaaaagtacacctccgcccgcttcacgcgtgacctgatcgccgggatcaccgtcgggatcattgcgattccgctggcgatggcgctggcgattggcagcggcgtgccgccgcagtacggcctctatacctcagcggtggcagggattgtgatcgccttgaccggcgggtcacgctttagcgtttccggtccgactgccgcctttgtggtgatcctctacccggtttcccagcagtttggtctggcgggactgctggtggcgacgctgatgtcggggatctttttaatcctcttcggcctggcgcgctttggccgcctgatcgaatatatcccgctgtcagtcaccctcggcttcacctcggggatcggtatcaccatcggcaccatgcagattaaagatttcctcggcctgcagatgccccatgtgccggagcattatctgcagaaagtggcggcgctggcgatggccctaccgaccattaacgttggcgatgccgccatcggcgtcgttactcttggcattctgatcctctggccgcggctgggtatccgcctgccgggccacctcccggcgctgctgggcggctgcgcggtcatgctggtggtcaacttgctcggcggcgatgtcgcgacgatcggctcacagttccattatcagctggcggacggcactcagggcaatggcattccgcagctgctgccgcagctggtattgccctgggatatgccgggctcaaactttaccctgagctgggcctcgctgcaggctctgctgcctgccgccttctcaatggcgatgctcggcgccattgaatctctgctgtgcgcggtggtgcttgatggcatgaccggcaccaagcacaaagccaatagcgagctgattggccaggggctgggcaacattgtcgcgccgttcttcggcgggatcactgccaccgcggcgattgcccgctcggcggcgaacgtccgcgccggcgccacatcgccggttgccgccgtgatccacgccctgctggtgatcctggcgctgctgatcctcgccccactgctctcctggctgccgctgtcggcgatggccgccctgctgctgatggtggcatggaatatgagcgaggcgcataaagtcatcaatctgctgcgccacgcgccgaaggacgacatcgtggtgatgctgatgtgcatgtcgctaacggtgctgtttgacatggtgatcgctatcagcgtcgggatcgtgctggcttcgctgttgtttatgcgccgtatcgcacgcatgactcatctggcgccggtcaacgtcgaagtgccagacgatgtgctggtgctgcgggtaattgggccgctgttctttgccgccgccgaaggcttgttcaacgatctggagacccggatcgccggcaagcgcatcgtggtgctgaaatgggacgcggtgccggttctcgacgccggtggcctggatgccttccagcgctttgtgaacaagctgccggaaggctgtgaattgcgcgtatctaacctcgagtttcagccgctacgcacgctagcgcgcgccggcgtcaagccgctgcccggacgcctgagcttctaccccgatcgtcaggccgcgctggctgacctgtga

SEQ ID NO: 267867 - DNA, 948 bp, Klebsiella pneumoniae
gtgcctgatatgaagctttttgctggtaacgccaccccggaactagcacaacgtattgccaaccgcctgtacacttctcttggcgacgccgctgtaggtcgttttagcgacggcgaagtcagcgtacaaatcaatgaaaacgtacgcggtggtgatattttcatcatccagtccacttgtgctcccaccaatgacaacctgatggaactggttgttatggttgatgctctgcgtcgtgcttcggcaggtcgtatcaccgccgttatcccttacttcggttatgctcgtcaggaccgtcgtgttcgttctgctcgtgtgccaatcaccgcgaaagtggtggcggattttctgtccagcgtcggcgttgaccgcgtgctgaccgttgacctgcacgcagaacagatccagggcttcttcgatgtgccagtcgataacgtgttcggcagcccaatcctgctggaagatatgctgcagctgaacctggacaacccgattgtggtttctccggacatcggcggcgtcgtgcgtgcccgcgctatcgctaaactgctgaatgataccgatatggctatcatcgacaagcgccgtccgcgcgccaacgtctcccaggtgatgcacatcatcggcgacgttgccggtcgtgactgcgtgatggtcgacgatatgatcgacaccggcggcaccctgtgtaaagcggcagaagcgctgaaagagcgtggcgcgaaacgcgtattcgcttacgcgacgcacccaatcttctccggcaacgctatccagaacatcaaaaactctgtcattgatgaatttgtcgtctgcgataccattccgctggcaccagaaattaaagcgctggataaagtgcgtactctgacgctctccggtatgctggctgaagctattcgccgtatcagcaatgaagaatctatctctgctatgttcgaacattaa

SEQ ID NO: 267868 - DNA, 852 bp, Klebsiella pneumoniae; identical to SEQ ID NO: 137151

SEQ ID NO: 267869 - DNA, 612 bp, Klebsiella pneumoniae
atgaatcgactgttccgcctgctgccgctggccagcctcgtcctcaccgcctgttctcttcatacgccgcaagggcctggcaaaagcccggattcgccgcagtggcgtcagcaccagcaggctgtccgcagcctcaatcagttccagacccgcggggcgtttgcctatctttccgatgagcaaaaagtctatgcccgcttcttctggcagcaaaccggccaggaccgctatcgcctgctgctgaccaacccgctgggcagcaccgagctgtcgctgaccgcgcagccgggcagcgtgcagctgatcgataacaaaggccagacctataccgccactgatgccgaagagatgattggccgtctgaccgggatgccgatcccgttgaacagcctgcgccagtggatcatcggcctgccgggcgacgccaccgactattcgctggacgatcggtaccgtctgcgtgaactgaactatacgcaaaacggcaaaacctggcacgtgacctacggcggctacaccagcgatacccagccagccctaccgtccaatgtcgagctgaacaatggcgctcagcgcatcaagctgaagatggataactggatcgtgaaatga

SEQ ID NO: 267870 - DNA, 1257 bp, Klebsiella pneumoniae
atgacccttttagctcttggcatcaatcacaaaacagctccggtcgccctgcgagaacgcgtcacgttttcgccggaaacgctcgataaggcgctggagagcttgctggctcagccgatggtgcagggtggggtggtgctgtcgacctgcaaccgcacggaactctatctcagcgtcgaagagcaggataacctgcaggaagcgctgatccgttggctgtgcaactaccacggcctcaacgaagaagacctgcgaaaaagcctttactggcatcaggataatgacgccgtcagccatctgatgcgcgtcgccagcggcctcgattcgctggtgctgggcgagccgcagatcctcggccaggtgaaaaaagccttcgccgactccagccgcggccatcttaacgtcagcgagctggagcggatgttccagaaatccttttcagtggctaagcgcgtgcgtaccgaaaccgatatcggcgccagcgcggtctctgtggctttcgccgcctgtaccctggcgcggcaaatctttgaatcgctctccagcgtcaccgtgttactggtcggcgccggtgaaaccattgagctggtagcgcgccatcttcgcgaacatcacgtgcgcaaaatggtgatcgccaaccgcacccgtgaacgcgcccaggcgctggcggaggaagtgggcgccgaggtgatagccctcagcgatatcgacgaacggctgaaagaggccgacatcattatcagctccaccgccagcccgctgccgatcatcggcaaaggcatggtggagcgtgcgcttaaggcgcgccgtaaccagccgatgctgctggtggatatcgccgtcccgcgcgacgttgaaccagaggtcggcaaactggctaacgcctacctctacagcgtcgacgatttgcaaaacattattcagcataacctggcgcagcgtaaggctgccgcggtgcaggcggaatcgatcgtcgagcaggaaaccagcgaatttatggcctggctgcgtgcgcagagcgccagcgagaccattcgcgaataccgttctcagtctgagcaggtccgtgaggagctgacggcgaaagcgctggccgcgctggagcagggcggtgatgcccaggaaattatgcaggatctggcgcgcaagctcactaaccgcctgatccacgcgccaaccaaatctcttcagcaggccgcccgtgacggggacgacgaacgtctgcatattctgcgcaacagcctcgggctggaatag

SEQ ID NO: 267871 - DNA, 1083 bp, Klebsiella pneumoniae; identical to SEQ ID NO: 214004

SEQ ID NO: 267872 - DNA, 849 bp, Klebsiella pneumoniae
atgacctttcaggcctggctgcagcaggcgatcgcccgcctggcggagagcgacagcccgagacgcgacgccgagatcttgctgggacacgttaccggccgggcgcgaacctggattttggccttcggtgaaacgacgctctctgctgacgaggcggcgaggctggaggcgctcctggtgcgacgccagcgcggggaacctattgctcatctggtcgggcagcgcgagttttggtcgctgccgctgttcgtctccccggcgacgctgatcccccgcccggataccgaatgtctggtagagcaggcgctggcgcgtctgccaaccgcgccgtgccgtattctcgacctcggcaccgggaccggcgccattgccctggcgctggccagcgaacgtccggactgtgaggtcaccgcggtggacgtgatgccggacgccgtggcgctggcgttgcgcaatgccgaacatctgggcatcgctaacgtgacgataagtcaaagcgactggtttagcgcgctggacgggcagcgcttcgccacgatcgtcagcaatcccccctatatcgacgccgccgacccgcatctcgccgaaggcgatgtgcgctttgagccgttgacggcgctggtcgcaggcgaccaggggctggccgatctggcgcatatcatccgcgagggacggcagtatctgcagcccggcggttggatgctgctggagcatggctggactcagggcgaggcggttcgcgcgctgttccgcgaagcgggctatctggacgtcgcgacctgtcgcgactatggcgacaatgagcgtctgaccctcggacgtttacccgacatggagaatgttggctga

SEQ ID NO: 267873 - DNA, 393 bp, Klebsiella pneumoniae; identical to SEQ ID NO: 225847

SEQ ID NO: 267874 - DNA, 813 bp, Klebsiella pneumoniae
atggggtcattagcggatttcgaatttaacaaagcgccattgtgtgatggcatggtcctcatttctgaacaggtccgcgacgattttccgtcgcgttttgtcgaggaagagctgcagcgattgctgcgcctcgcgcaggaggagattgcgccgtcgtgggaccaggagcgccagatagaacgattgctggagctgttttatgacgagtggggctttggcgcctcgcagggcgtgtatcgtctttccgacgcgctatggctggataaagtgctggttaaccgccaggggagcgcggtgtcgttaggcgcgatcctgctgtggatcgcccagcgcctggcgctgccggtggtgccggtgatcttcccaacccagatgctgctgcgtgcggacccggaaaccagcgaagagatgtggctgattaatccgtttaacggcgagaccctcgacgagcataccctggaggtatggctgaagggcaacatcgggccggtggcggaactgtttaatgaagatctcgacgaagcggataacgccgaggtgatccgcaagctgctggacaccctgaagtcggcgctgatggaagagcggcagatggagctggccctgcgcgccagcgaagcgctgctgcagtttaatccggaagatccgtatgagatccgcgaccgcgggctgatatacgcccagctggactgcgatcacgtggcgctgttggatctgagctatttcgttgagcagtgcccggaggatccgatcagcgagatgatccgcgcgcagatcaacacgatttcgcataaacaaattacattgcattag

SEQ ID NO: 267875 - DNA, 855 bp, Klebsiella pneumoniae
atgaaacaaaaagtggttagcattggtgatatcaacgtagcgaacgacctgccgttcgtgctgttcggcgggatgaacgtgctggagtcgcgcgacctggcgatgcgtatctgcgaacattatgtcaccgttacgcagaagcttggtattccctacgtcttcaaagcctcctttgataaagccaaccgttcctccatccactcctatcgtgggccgggtctggaagaagggatgaagattttccaggagctgaagcagacctttggcgtgaaaatcatcaccgacgttcatgaagccagccaggcgcagccggtagctgacgtggtggacgtgatccagcttccggctttcctcgcgcgccagactgacctggtggaagcgatggcgaagaccggggcggtgatcaacgtcaagaagccgcagttcgtcagcccgggtcagatgggcaacatcgtcgataagtttatcgaagggggtaacgacaaagtaatcctctgcgaccgcggcgcgaacttcggttacgacaacctggtcgtggatatgctcggcttcggcgtgatgaagaaagcctccaacaactcgccggtcattttcgacgtcacccacgcgctgcagtgccgcgacccgtttggcgcagcctccggcggtcgtcgtgcgcaggtgagcgagctggcccgcgccggtatggcggtaggtatcgccggtctgtttattgaagcgcatccggatccggaccacgcgaaatgcgacggcccgtccgcgctgccgctggataaactggagccgttcctcaaacagatgaaagcgattgacgatctggtgaaaagcttcgacgagctggataccagcaagtaa

SEQ ID NO: 267876 - DNA, 1101 bp, Klebsiella pneumoniae; identical to SEQ ID NO: 225845

SEQ ID NO: 267877 - DNA, 231 bp, Klebsiella pneumoniae; identical to SEQ ID NO: 225844

SEQ ID NO: 267878 - DNA, 681 bp, Klebsiella pneumoniae; identical to SEQ ID NO: 213997

SEQ ID NO: 267879 - DNA, 243 bp, Klebsiella pneumoniae; identical to SEQ ID NO: 213996

SEQ ID NO: 267880 - DNA, 354 bp, Klebsiella pneumoniae; identical to SEQ ID NO: 138919

SEQ ID NO: 267881 - DNA, 1182 bp, Klebsiella pneumoniae; identical to SEQ ID NO: 225841

SEQ ID NO: 267882 - DNA, 885 bp, Klebsiella pneumoniae; identical to SEQ ID NO: 213992

SEQ ID NO: 267883 - DNA, 789 bp, Klebsiella pneumoniae; identical to SEQ ID NO: 225838

SEQ ID NO: 267884 - DNA, 4068 bp, Klebsiella pneumoniae
atgacgcggcgactggtggtgatcggtaacggcatggcggccacccggctggtgcagcggctggttgagcgcgaccccgcgcggtttgccattaccgtcgtcggcgacgagccgcacccggcctataaccgcattcagctctcgccgctgctggcaggtgaaaaaacggcggcgcagatcccgttgctgccggcggagtggtacacccggcacggggtgtgcctgcggtctggcgaggcggtcgatgaagtcgatattcagcaacggcggctgcgcatcgcggaaacctggctgccgtgggatgagctggtgttcgccaccggttcgcggccctttatcccgccgctgccgggcattgatcgtccgcaggttatgcccttccgcaccctggcggacgtggaacgtattctggcgatacccggcccggcggtggtgattggcggtggcgtgctgggggtggaagcggcggcggcgctgcgtcgtcacggcggagaggtcactcttctgcatcgcggcagcggattaatggcgccgctgaccgacgcttttgccgccgatgagctcaggcagcagcttgaagtgcgcggcattcgctgcgtgctggcgtgccgcatcgccgccatcgacgccgatggcgtgcggctggcggacgggcgcgtattccgcgccgccagagtggtgctggctaccggcgtgcagcccgacagccgtctggcggcgcagtccggcgtgctgtgccagcgggggatcgtggtcgaccgtcagatggcctcctcgctgccggggatcagcgccatcggcgaatgttgcgaaattgacggccagacctgggggctggtggctccctgcctgcgtcaggccgaggtgctggcggatcgcctgtgcggcgcccccggcgagggctttgtctggcaggacgccgggacccgcctgaaggtcaccggcattgaactctttagcgctggcgagcagcaggccggcgaacaggatgacatttataccagctgggaccccatcgaccgccactatcgccgcctgctgctgcgcgatggccgcctgcgcggcgtgctgctgatgggcgactgcaccgccgccgccgcgcttaccgcgcgcctggaaagcgatgagcctgccaccgtggactggctttttgacccctcttcaacgcagccgcaggctgcaggaataatgacgatgacgaaacctgtattagtgctggtgggacatggcatggtcggccaccattttctcgaacaatgcgtgagccgcaatctgcatcagcaatatcgaatcgtggtgtttggcgaagagcgttatcccgcctacgaccgggtacatctctccgagtattttgccggacgcagcgccgagtcgctgtcgctggcggccggggatttctttattgaacacggtattgaactccgcctcggcgaggcggtggcgagcatcgaccgcgacgcacggctggtgcgggacgccgaggggcatgaaatccactgggataaactggtgctggcgaccggctcgtatccctttgtgccgccaatccccggtaacgatctcgcggggtgctttgtctaccgcactcttgacgatctcgaccgtatcgccgcccatgccgccgcggcgaagagcggggtggttatcggcggcgggctgctcgggctggaggcggccaacgccctgaaacagctggggctggagacgcaggtggtggagtttgccccgaacctgatggccgtccagctggataacggcggggcggcgatgctccgggagaagatcgtcgccctcggcgtgggggtgcataccagcaaagcgaccaccgccatcgtgcgcgaggccgacggcctgcggctgaactttgccgacggcggcgcgttgcggaccgacatggtggtcttctcggcggggatccgcccgcaggacgcgctggcccgcggctgcgcgctgcaggtgggcgaacgcgggggaattcacatcgacggccagtgccgtacctctgacccggacgtgctggcgataggcgaatgcgccctgtgggacaataaaatttacggtctggtggcgccgggctatcagatggcgcgcatcgccgcggccactctcgcaggagaggacgcctgctttagcggcgccgacatgagcaccaaactgaagctgctgggagtcgacgtggcctcgtttggcgatgcgcaggggcgcacgccgggctgtcagagctatcaatggaccgacggtccgcagcagatttacaaaaaaatcgtcgtcagtcaggacggcaaagccctgcttggcggcgtgctggtgggggatgccagcgactatgccacgctgctgcagatgatgctgaaccgcatggcgctgccgccgcgtccggagagtctgatcctgcccgcgctggagggagccgcgccgaaggcgctcggcgtcgcggcgctgccggacagcgcgccgatctgctcctgccataacgtcagcaaaggcgatatctgccaggcggtgaacaatggggcgggggatatgtcggcgataaaaagctgcaccagagcggctaccggctgcggcggctgcagcgcgctggtgaaacaggtgatggagtatcagctggcggagcagggcgtcgaagtgaaaaaagacgtctgcgaacatttcccgtggtcgcgccaggagatctaccacctggtgcgggttaaccatatccataccttcgagcagttgattagccgctacggccaggggcacggctgcgatgtctgcaaaccgctggtggcctcggtgctggcctcctgctggaacgagtacctgctgaagccggcgcacctgccgctgcaggataccaacgaccgctatttcgccaatatccagaaggacgggagctattcggtggtgccgcggatggcggcaggggaagtgacgccggacggactgatcgccatcgggcagatcgccaaacgttaccagctctacagcaaagtgaccggcggccagcgcatcgacctgtttggcgcgcggctggaacagctgccggctatctggcgcgagctggccgacgccgggtttgaaaccggccacgcctacggcaagtcgctgcgcacggtgaaatcctgcgtcggctcaacctggtgtcgctacggcgtgcaagactccaccgggctcgcggtacggctcgagcatcgctataaagggctacgcgccccgcacaaaatcaagatggcggtctccggctgcacccgcgaatgcgctgaagcccaggggaaagatatcggggtgattgccaccgacaaaggctggaatctgtacgtctgcggcaacggcgggatgaaaccgcgtcacgccgacctgtttgccagcgatctcgacgaagcgacgctgatccgcagcatcgatcgtctgctgatgttctatatccgtaccgccgatcgcctgcagcgaaccagcacctggatggataacctggagggcggcgtcgcctatctgcggcaggtggtgctggaggatagtcttggcattggcgaggagctggagcaggagatggcccggatcgtcgacagctaccagtgcgagtggcagaccaccctcaacgatccgcagcgtctggcgctgttccgctccttcgttaatagcgaccagcccgacgaggctgtgcagcgccgcgatctgcgcggtcagccgcagccgctgctgactgagacgttgcccgaaggcgaactcccatcccgaccgtggcaggcggtatgcgaccttgacgccattccggcgcaggcggggatcggcgcccgcttaggggagcggcagattgccctgttccgcttcggcgagcgggtctacgccctcgacaaccgcgagccgggcagcacggccaacgtgctgtcgcgtgggctgttaggggacgtcggcggcgagccggtggtgatctccccgctgtacaaacagcggatacgcctgcgcgacggctggccgtgcgacggcagtgaacaggcggtacgcgcctggccggtgaaagtggaaaacggcaaagtgtgggtgggcaaccagcagctgctggcccgcgcggaggcctcctga

SEQ ID NO: 267885 - DNA, 2601 bp, Klebsiella pneumoniae; identical to SEQ ID NO: 213989

SEQ ID NO: 267886 - DNA, 1383 bp, Klebsiella pneumoniae
atgcctgtgtcgttccgtttgttgccaacgttgacctttctcctgctgttgccgggcgttcccgtctgggcgctgaccgccagcgacaccacccgccctgcgcaagcgcaagatccgctgcccgatatggggattgctccccaggttgatgacgacgcccggcactttgccgaagtggcgaagaagtttggcgaggccagcatgagcgacaatggtctgacggcgggtgaacaggcgcagctgtttgccatcagtaaaatcggcaatgaagtgagtcatcagctggagagttggctctcgccgtggggcaacgccaatgtcgacctgctggtcgataaagaggggaaattcaccggcagtaaagggagctggttcgtgccgttgcaggataacgaccgttatctgacctggaaccagtactcggtgacccggcgcgagcacgatctggtgggcaacatcgggcttggccagcgttggcgggttggcggttggctgctgggctataactcgttttacgataaagtgctgagcgaaagcctggcgcgcggcagcgttggcgccgaagcgtggggagaatatctccgcctgtcggcaaactattaccatccgctgggcgactggcagctacgcgataatcagactcaggagcagcggatggccgcagggtatgacgtcaccgcccaggcgcggctgccgttctaccagcacatcaacaccagcgtcagcgtcgaacagtatttcggcgatagcgtcgatctgtttcactccggcaccggctaccataatccggtggccgtctccgttgggctcaattacaccccggtcccgctggtcacggtgaccgctaagcataagcagggggaaaatggcgtcagccagaacaatgtgggcctgaagctaaactaccgctttggcgtaccccttaagcagcagcttgcggcagacgaggtggcgatcagcaactcgctgcgcgggagccgcttcgatagtccggagcgggataatctgccggtggtggagtatcgtcagcgcaaaaatctgacggtctatctggccacgccgccctgggatctgcagtccggggagacggtgcagttgaagctgcagatccatagtctgcatggcatcaaggcgctgcactggcagggagacacccaggccctcagcctgacgccgccggtagatgccagcagccccgatggctggagcatcattatgccggtgtggaacagtgaaccgggcgccgcgaaccgctggcgcctgtcggtggtggtggaggataaacaggggcagcgcgtctcctccaatgagatcgccctggcgctgaccgagccgctggtcaagtttaccacgccaggcgtctcctggacggactcgccttag

SEQ ID NO: 267887 - DNA, 651 bp, Klebsiella pneumoniae; identical to SEQ ID NO: 213987

SEQ ID NO: 267888 - DNA, 1389 bp, Klebsiella pneumoniae
atgagtcaatcttccctcccggagaaggctaaccgctcggtcataaccgactggcggcctgaagatcctgaattctggcaacagcgcggccatcgtgtggcaagccgcaatttatggatctccgttccctgtctgttactggcgttctgcgtttggatgttgttcagcgcggttgccgttaacctcaacaaagtaggctttcagtttacaaccgatcagctgtttatgctgaccgcgctgccggcgctgtcaggcgccttattacgcgtgccttacgcctttatggtgccgctgttcggcggccgtcgctggacggcattcagcaccgggatcatgattgtgccatgcgtctggctgggcttcgcggtccaggatacctctacgccgtttagcatcttcgtgattatctctctgctgtgcggcttcgccggagccaactttgcctccagtatggctaacatcagcttcttcttcccgaaagcgaagcagggcggggcgctcggcgttaacggcggacttggcaatatgggcgtcagcgtgatgcagctggtcgcgccgctggtggtctcgatctctatctttgccgtttttggcggtaacggtagcgagcaaccggacggctcgatgctgtatctggaaaacgccgcgtggatctgggtacctttcctgattattttcactctggcggcgtggttctttatgaacgacctgtcggcttcgaaagcgtcgctgagcgagcagttgccggtacttaagcgcctgcatctgtggattatggcgctgctctatctcgcgaccttcggctcctttatcggcttttccgccgggttcgcgatgctgtcaaaaactcagttcccggatgtgcagatcctgcattacgccttcttcggcccgttcattggcgcgctggcgcgttcgatgggtggggcgatctccgaccgcctcggtgggacccgcgtaacgctggtcaactttgtggtgatggctgtcttctgcgcgctgctgttcctgaccctgccgaccaacggccagggcggtaactttatcgccttcttcgcggtgtttatggtgctgttcctgaccgccgggctggggagcgcctccaccttccagatgatctccgtgatcttccgtaagctgactatggaccgcgtgaaggcccagggcggcagcgaagcgcaggcgatgcgcgaggcggcgaccgataccgcggcggcgctgggctttatctccgccattggcgctatcggcggcttctttattccgaaagcgttcggtatctcgctggatctgaccggctcgccggccggggcgatgaaagtgttcctcgtgttctatattgcctgcgtggtgatcacctgggcggtatacggtcgtaagcgtcagtaa

SEQ ID NO: 267889 - DNA, 1536 bp, Klebsiella pneumoniae; identical to SEQ ID NO: 225833

SEQ ID NO: 267890 - DNA, 711 bp, Klebsiella pneumoniae; identical to SEQ ID NO: 225832

SEQ ID NO: 267891 - DNA, 678 bp, Klebsiella pneumoniae; identical to SEQ ID NO: 225831

SEQ ID NO: 267892 - DNA, 837 bp, Klebsiella pneumoniae
atgggaataccttttccttttttttataagttttccgcgttgaacataaattcgttgtcggctttagccgaagggaaggcttggttttcaagattagctgatttcaatgatccttttgaaggtcagtttcttgttaaacgtccagacttgaacgccgacaaggaacgtctattacgacatttagaaaactaccttcccaaaaatgtgatgtcagaacccgcttttgatgtggtttggcggaaatacctggcagatccaaaggaatttgatgaactcatagagcaaatgatatctcagacctctactagattttataatgcttttcagaatgtaagtgcattttgcttagccagtgatatacctgatgttaatgcgtcacatgttagtaatgttatgatgtggtcacattatgccgatggtatgaaaggtttttgcataaaattcaagccggattgtttattggcatctttagaaaaattgaatgaagcaaatttcaatgttgcccaagttcactatcaagatgatatgtatggtgttgatttttatgatttaattgatttatctaaaaatgtctatacccaagcaatacacactaaacatacaggttgggaatatgaatatgagtgtcgaatcatcactgaaaatcctgggctatataaatactctcataatgcaatagaatgtatatttattggcagcaagatgccgttatctcaccagaaaatattaattgatatatgctctattaatataccggatgtagatatctttagtgttagaacccatgcatcaggttacgctgtagagttagggaaatatcagaaagtaccaaagtaa

SEQ ID NO: 267893 - DNA, 516 bp, Klebsiella pneumoniae
atgaatattgcagaaaagatctctttgtggtccatgataggcacttggttttcaggcatagcgacagttgcagctgttttaatggctttccatttagcaaataaaaggccaaaagccattgttaaatgtactgtttcaagatcagtgttttttatccaaaatgatactgggactgttacagagaaaggaattcaaattaaggttgtgaacaacggaatttacccaattacaatatcatcagttgaatgggagtatggtggcgatagcgtaatagctaattacttttctgatattaaatcacataagcttccagcaaggttagagcatggagaggttgccaggttttggattcctcttttccctgatgaaagaaattggttgaagcgacttgctaaagagatcaggcacaagggcaaaaatcccatcaaagttaagtgttcaattgaattaacaactggggacaagtttaagactaaacccgataaagagataattcgaatacttaaacaatattaa

SEQ ID NO: 267894 - DNA, 726 bp, Klebsiella pneumoniae; identical to SEQ ID NO: 25060

SEQ ID NO: 267895 - DNA, 180 bp, Klebsiella pneumoniae
atgaaagtagcaatcgaagttaatggcgaggttatctggtaccgcgacagcgataaacaggtggggatggcgtcggtaggttatttaaaggacggcacacagcagaaaatcattgccgcccttgaggatgccttaactcaggcaaatggtgaaaatttatgctgggatgacgttaattga

SEQ ID NO: 267896 - DNA, 1806 bp, Klebsiella pneumoniae
atggcagaagttccactcccaaccccgactaaggtcccggtacccagtactgatattcgtaatgcggtatttgccggcgcgaagctggacgaagaggttactggtactggcgatttctatactgatcgccttgatgtgaaacgcctgaccaatacggggcgaaataaccagtttaatgctgcgcagcaagaaagggccgaccagttccagcagttcctcctttcgtccggttacgtgttcctcggcgactacgaagacggtccgtttcagttcagcgcccgcaatcagtatatccgctacgacaatcagtattaccgcctgaatgccaccacggatgtcggatttacgacgaccggtacgacagcggccagttttgcaaacgacgtcagccatttcgttttgatagatggggatacgctgcgacaggagttggcatcaggtggagagggggctggcgatgccctgttagcggtaaaacagccattccccggatcggtgctacgaactcagcatgataaaaatgcggaatttgttagcctgatggatgttggcggcgatcgtaattcatttgacccagagacactggaattattggtaaaggcggttgctaaccagttgcgcattccttacctgggcgcacaacaatttgcgttacccggccagacactaaaagcctggcggtacatggacggatttaaagaccgtggtgctgtcgcttcgttcatgagtgtggactccccagatagttcagagcctactactcaggtgcttgggttatctgatgcctcagcactaggaaaatatagtgaccgtgataccgttgtactttttgctcaagcagaagggcagccaccgctactagcaacttccaataccacgtttacagcaacaactgtaacatccccggattttgcgactgttgctgataaattgcgtcgaaaacagataattgacgttgttgacgctactaacccttctaatacctatagcggctggatagttgcgtttgatgccgcaacaaacacgataactgtagatacagcgtggtatttaaaaggtggcaacggggttactacaggaactccaggttccggttcaagtttgaaactggtccccaatactaaaatatggggacagaataccaacgttattttgaaaccaacttccgacgcaacatcgtttgcggggtttgaactcgggctgtacaacaataagatagacggctatgtggggtatggctacgatgtctattctggcggcgattacagtgcgctaaacggattccaggcgcgcgggaaactttattgcggattcagaaactactcccaaggggagtacggttttataggtgggggcaatcaatacggatactatgactctgggagtgttcgcgggttgttcgcctggaataatacctatggcgtgaatattaaaagccccacttcgtatgcgctaattttgcagaatagcgcgaatgaatttatgaccggcatgaatgctgtcggggcgtggcagggattaaagttttacggggcatcaacaaatataagtggaactgtatccagctacgcgactgttacgacagtaaccccgacttcaaatagtgataagatcacgttaccagcagtattaaccggtaaagttctgactgttcataatttgtcagacacttataagatttatttgaccgggccttatcggggcggcaaaggtggcattagtttagctgctggtagctctatcacactctggagtgatggcacgtactggtatcccgtgggtggttttgctccggcatcggcataa

SEQ ID NO: 267897 - DNA, 615 bp, Klebsiella pneumoniae
atgaaaacaaaacgcgaacttgaacttgagattgagttgtactctgcccgtgaacagctattgagagcgaattatgaaatcatgatgcgggataaagaaataaacgaccagttactgagtaatgcacgatttgagatggataattttatccatcaggaagaagaaaaaacaaatggcgatgcaaaaaattctacaagccctgatgtcaaaaaactgacactggagcaggcgctaattatctcaggttttactggtgttcaagcctgcagcgcagaagcgttgaaagccgatgcagagaaacgttttggtgaacaagctggtgacatcagcttatctgatcgggggcaggataaagtaagagccctttacaacggcgattacgcaagactctgcccatacgcgaacccggaaagtgacaacgggctgacagaagaacaggccattatcgttactggctatacgggtatgcttttgggcgacgttgataaattctacgctgaccttgaaaagcgccttgggcggaaaatcgtaaacgcagaacttccgtcaatcggtcaggataaaatcagcctattgtatgaaaaagacttcttacaaatatcgagttatatgtaa

SEQ ID NO: 267898 - DNA, 780 bp, Klebsiella pneumoniae
atgcaggtattcatgagccataacggggaagataaacccgtagttgaagaaattggccgttttttggaaaaaaaaggctttacagtatggattgacaagtggtgtatgactccaggggactcactgattgctaaaattggtgatgctatagattcatcaaataaacttatagtttttttgtctccatcatcagttgagtccaattgggttaaattagagatagcaactggtaaattgatggagctagctaacgaacgtggtattggagagaaatttataattcctgttctattaaaacattgcagagtcccgtggttcttaagagaaaagatatatgttaactttacagataagtcgtttgaccaggcctgtgaggagataatccgtggtttaaccgacaaaacagctgaccatagcgatgaaaaattagtaaatgaaactataacgatctactggagcactagaagagaagatggtaaatattcgacactattcgaattcggcgccatggtaagccctatttcatctatgaaaatgctagtggaaatatctaacaatgatgttgtgtcatgggattactgggtaaacaataaaaacaccaacacgcctcccgatgtttcaaaaataaccggggtgaggaagaatataggtaaacagcatattgaaatagaattaatggatacaactataacttcaatgaaaagtttttatataagagcaacaactaactctccgttaacggaagatgatgtaggaatacagacatcagcagaatattaa

SEQ ID NO: 267899 - DNA, 204 bp, Klebsiella pneumoniae
atgagcaaggttaactttaagtgccccggctgcggccataacctcactgtacgcagcggagtcgaaatcaagagtgtagaggatatcgaaggaaccacctgtgccaactgcgggagggtcattcacaaatctgatatcgccaatcaggcacgtaaccatgtcgataagcttgtccgggacattctcgggaagcacttcaagtaa

SEQ ID NO: 267900 - DNA, 549 bp, Klebsiella pneumoniae
atgatactactgcaactgtcggccggaaccggcccgattgaatgctgccgcgctgtggccctggcggtgcaaaccatagagcgggagtgtcaggcgcaaggcataggctgcgagttgttggaggtgactcaggcaaacgctaaaaccggcgtcgcctgcttcaagtcggtcttgctgcaactcagtgccaatgatgaagcccgggccaagcacttggcgctgtcttggcagggagccatgctctggagctgccaaagccgcttcagacccgggcacaaacgcaaaaactggttcttcagcggccagatgtttgaggtcaatgacaaggctctggataagcaaatccactttcaggcctgccgcgcctcgggcgcaggagggcagcacgtgaacaccacagactcggccatccgcgcgacccacatcgccagcggcctgtcggtgcgggttgaaaccgagcgcagccaacatgccaacaaacgcctggcaacggcattgcccctgtcggtgttgcttatgcagtctggtcgggactcggcgtcgtcataa

SEQ ID NO: 267901 - DNA, 1164 bp, Klebsiella pneumoniae
atgggcagatccgtccaaaaacttactgaaagcgtcagcctgattgcatccaaagaaacctgggtagaagggctggcaatacaacaactgattaaaacctctgaattggcctgtatgcagcacgtggcaggaatgccggatctgcaccccggcagaggctatcccattggtgcggcgttttttgccgtcaacagaatctatcctgccttggtcggcaacgacattggctgcggcatgtcactgtggcagagctcgctgaagctatccaaggtcaagctggataagatggcaaacaagttcaaacagatagaacagcctctggatgaaacctgggcgcaaacaattgccgagcgcaagcgggaaaaaggcatagccatcacaggctttgaccaggcgctgggcaccataggtgccggtaaccattttgccgagtttcaagcgatagaaactgtctatgaccaggcggcgctgcaagagctggggctggacagccgctatctgcaactgctggtgcattccggctccagaggcctggggcaggcaattttgcaggaacatatccgccgccacagccaccaaggcctgagtccggaagatagcgagttcagcgactatctggccaaacacgatgaggcgctacgctgggctgagttgaaccgcgagctgatagcctgtcgcttcctggaagcgatcaacagctctggcagcttggtgttggatgtgaaccacaatctggtatcccccaagtgcataaacggaacccaaggctggctgcaccgaaaaggcgccaccccgagcgataagggttatgtggtgatcccgggatcccgcggcgactacagctacctggtgaaaccctgcgccgctgcgggcgatgccgccgacatcagcctgttttccctggctcatggtgccgggagaaaatggcagcgcggcgagtgtcagggccgcctggcgcacaagttccgccgtgaagatctctacctcaccgccctgggaagccgggtgatctgcggtaacaagacactgctgtatgacgaagcgccccaggcctacaaaaaatgtgcgactgtgattggcgatatggtcgatgccggtttgattgaggttgttgccaggctgcgccctgtgctgaccttcaaaaccaacggggagtgctgctga

SEQ ID NO: 267902 - DNA, 348 bp, Klebsiella pneumoniae
atgaagaatataataattgctatcgttttgaccggcctgatggcctgcagcactacccccaacaccatagtcttcgacggcagcagtgcagagtcgacccaacaggatgtcatcagactcatggcgcagctgaactcccatgacaagcaggaatttgtcatggccttgttggcaatccaactggccgagttcgacaccccattggcagcgctgaaccactcggatcgcaacggccagatggacttcggcctgatagggcaaaagattaatggtctggactttgaacaagtgcttgaactggcacacagcaaaagtgacaaggccaagccccgccaaccgctgccttaa

SEQ ID NO: 267903 - DNA, 435 bp, Klebsiella pneumoniae
atggaactggaaatccaagtcacttttcgcactggagacagcataagaacccggcgttacaagagtgagcaaggtgccctgcgcggcatttggaaatggctcagcaagcatcaggacaaggccgatattcaggccagcttcttttcccccgaactcggccaccgcgcctttgagcatccggagcagctcagcgagttcgagcccaaaaccatagataacttttatcaatccagagcctggctggcactcagatatcaggtgctgcaaactcacgaacacaaatgtgtagagtgcaatcgcactaaagccgaacacaatatagtgctgcatgtagaccatattttgccccgcagcaagtacccgcacaaagcgctggatattaataacatgcaaatactttgtgaagattgcaatctgggtaagttggataaatga

SEQ ID NO: 267904 - DNA, 276 bp, Klebsiella pneumoniae
atgaagactcaactgcaagctgaactggcccaggtcaagcgctctttggtaatcactcaactgcttggggcccccggcatgttgcttataggcctggcactctatggcctggttgtcgccgaaggtgatgccttcgccccggcgctcaataaccccatcaactgctatctgctgatcgccataggctcggccatcgccctctgggaggcgttgaaggtcatcaagctctccaaaaaacaaacgcagatcctcaaacagttggacgaactcaactaa

SEQ ID NO: 267905 - DNA, 759 bp, Klebsiella pneumoniae
atgcgcttgctgcttccgctattgctctattgttgcagcgttcaggctgccgtggggcttggtcaactcagatatctcacggaagagtatccaccctataacttcagcctggataatggggaagtatccggatttgccaccgatgtgctgcgggccgtttggcggcggacaggtacagagccccagaccatagaacttctgccctgggcccgtggttactatatgttggggagtcgcgataacgtggtgctgttttccacaacccgtactcaggtgagggaaccgctgtttcaatgggcctgcagccttggcaccctggagctgaatctctatgcgctcaaacgctcagcgcctgcgctgaccaagttggaggatgccaagcatttgctggtggcaaccgtcagggaagatgtcggcgagcagttgctgctgagccagggtttcgatccggcttttttggtacgtaccagtagcctggagcaggcagtcaaggtgctcaacagcggccgggccagcttgctgtccagcaataggttaaccttactcagcactctgagacgcgggggctacgaccccgagataatgcaacccttggtcaaggtgagtcacaggcccttgtgctttgccttcagtgccaaggtgccgcctgaactggtaatgcgctttcaagctaatttggatcaggtgttgaactctgaagagggcaaaagtctcagaaaacagtactttcacggcgagaccttactgagcctgccctaa

SEQ ID NO: 267906 - DNA, 480 bp, Klebsiella pneumoniae
atgcaagttgtcagctttaccgccataggccacgccgaaacccagtacacagaactggccaacatgccgattcagggcagcaaggtcgccgataatcaaggggttttggtgatccatcccgactatgccgaagggctggcggacctcgatggtttttctcatgtttatgtgctgtttcatctgcatcaatgcaagcagggcgcgctcaaggttaaaccttttctcgataaccaactgcgcggtgtatttgctacccgttcgcccaagcgccccaaccccataggcctgtcgatactggaaatcgaccggctggagggcaaccgcattcatgttaagggaatcgatatgctcaacggcacccctatcatagatatcaagccttatattcaggcatttgattgcgtgcaaaatacccgtgatggttggtacgagcagggcaaagatccgctgcaaaccctctctgacgacagatttgcctga

SEQ ID NO: 267907 - DNA, 240 bp, Klebsiella pneumoniae
atgaaacaaacagtggtaattttgctgcttacggcagctttgtccgcctgtggtggcggtggcggcgatgattcgcctgctcagaagaccaacgacaagacaattcaccaagggctcaaggtgcaggatctgcagctgagctacagtgccaatcaaaggttgcaagtcagtgtgcagggtaaggtggggcagctcagctatcagttgaacgagccaaatactgatatcctgcgggtatag

SEQ ID NO: 267908 - DNA, 1059 bp, Klebsiella pneumoniae
  misc_feature (812)..(844): n is a, c, g, or t
atgatttacgcatcagtccaagaaatgaagagtgaggaatatatctatatattaaggaaagataaagagttgtatgatgagtatgaggaaatgataaacgaaaaagaaattctatctgattatgaatacaataatatgcttcatggttttgcggtcgatgattgtaagcctcatgtctattttgattatttggccattgggtatccatctaagtttaatcacactatattgggtgacgaaggttggaatgtagaaagagtcattaaatatggtaaatttaaaaaaaatgaattgttaactgatgaaatgataattaatgaattgaaaggagatgcaggagagaataaaactagatatgtaagggatatagttaataaaaacaaatcatcctatgaggtggttagaaatgaaataaaggaatgcttgatagataataaagtatggcagagcgggattttacatgcactagaagaaatatataatgattctaaattacagtcgtgtcagatcgcaatatataacccaatgaatatattgagaagtctacatcacgtttatgctgagttctgggcattgccctctaatcaggggttgaaaaatgctcaccaatggatcccggaatataaattatattcagaaggagatgataaagagtatatgtatgtagggatgttgaaagataataagaaaagattaaatcttgaggaatatttctcaagattttataatggcagggagagtatctatttttattcttttttaagcactggatataatcatggtgatgtaaatgaatcaaagcaggttgggtnnnnnnnnnnnnnnnnnnnnnnnnnnnnnnnnnatgcgaattataaaataatccacgataatttaaaaaatgcgactgagtattttttcttcaccggttttgaatatgaaaaaattgattgttttaaattgaatgatgatataatcaaatttgcattatctgagagtgattttatggatgaactaaatgatctctttgaacgaagatttttttctaatggtatggttgatttatcagaaaatgaatag

SEQ ID NO: 267909 - DNA, 216 bp, Klebsiella pneumoniae
atgaaagatgttttagacactttgcgccgagtgcgtgagaagagcaaacacactgtagacaatagctctttgaaagaactggatgatgcgatacaaacccttgaagagagaatcaaggaaaattcaaaaggctggtctgccttagattatcttccctatgttgctaggatcttggctgtagttaagtttctacacggtgattctgatattcattga

SEQ ID NO: 267910 - DNA, 387 bp, Klebsiella pneumoniae
atggctgatgcgctggagcgcggccacgacgaggacgatttagcgctgatgtttggcgtgagtgtccagaccgtacgcgcaaccctatcactgctggatgccacccaggcagtcaaagacgctgtagagtccggcacagtgacggttacacaggcgcgtcagctggcatcgcttaaccctgaagagcagcgggagaaggtctctgaaatcaaagcggcaactgctggcacaaccggccatgaaaaagccaggcgtcagcgagctgtgcttggcgaaactaagccacgtctgaaaacccgtaaagaaatcacaaaagccctcgaaggtgctactggcgattatgctgcggctctgcgctgggtgcttggggaggccagccatgactga

SEQ ID NO: 267911 - DNA, 195 bp, Klebsiella pneumoniae; identical to SEQ ID NO: 252333

SEQ ID NO: 267912 - DNA, 264 bp, Klebsiella pneumoniae
atgctcagggtgaaagctaaagtgccggataaatccacactgattagtgcgcttggtcagcaggcgctgcgtgaggccatagccgaagattacttcttatccgagcaggaagcctcttgctgtgttgtatttcacactgagttgcgctgtgtagttgctgaatacttatattgtggcagcagaacagctatcgcgccgataaaccttgcagatatgagatatctcaatggctatgcagtaatgttcaggaacggtgagttttag

SEQ ID NO: 267913 - DNA, 270 bp, Klebsiella pneumoniae
atgatggaaatgagcggtcacgatcaggccgcaatgtcccatgaaatgatgcaaaacggcaattctgccgcccatcaggacatggctgaaatgcataaaaaaatgatgaaagccaaacctgagaacacccaagaaactgctaagccattttccgaaatgagcgagcatgagaaagccgctgttgtgcatgagaaggcgaataatggccagtcttccgttattcatcagcaacaggcggaaaagcatcgcagccagatcacccagaattaa

SEQ ID NO: 267914 - DNA, 327 bp, Klebsiella pneumoniae
atgaatgaaaagtattactatgtcctgttggatggtggaagagctactgatatgggcgaactaaacttaagtgatctattgtatggtttcaagaaggctcgtttaccaggccacgaacatcttggttacgaacgtttagatggggattacattattcacgggtcagacttggaaaattattatctttctaatagaagtagatgcttctacgcaatcatgcaagggaaagctcctgagcatacaaaagatgagatattttccttaaagatatttgattctatacagccaattgcattggtggaatgggttcctaagaataaaaaatga

SEQ ID NO: 267915 - DNA, 522 bp, Klebsiella pneumoniae
gtgtcgacgcgcggttcggtagcctttctcaataaaggtcccgaccttctcgtttttgaagtccagcagtcgccagccttcatcgataacgttaagttttttcaggctgcggggagactggtacatccggttctcgatatagatgatgagcgagaacatcaccgcgaccagcagggactggcgcgactccagcccgcccagttcaagaaccaccatccgggcatcgtcgtgcagggacggctcatcagagttgaaatactccccgtacagcccgttcacggtgtactggtcgagcaggatgatcatgtcatcaagacggctgcgcactcccggggagtcggcgtattcctcactgtctttctcgctctggaggaaggccaccacatcatcaatacgcgccttgttgcgcttactcagccaggccgcccggaccgcctgcaggagaagaccttcgtgcacttcatccaggttgccgttgggactggccatcaccgacatctgatcgcgtatacgttctgctga

SEQ ID NO: 267916 - DNA, 555 bp, Klebsiella pneumoniae
gtggtgacgccgctgggtgtcggatctcatctgcgttactgggggatgaaaccagagattattgacgagcgagactggaaccagtctgtgcgcatcagtgatgaattgacggtgcatgtactgccagcgcgtcacttctccggacgcggtatcaaacgtgatcaaaccttgtggggcagttttatgttcgtcacgccagagcagaaggtttactacagcggtgactccgggtacggcccgcacttcagggctatcggcgaacagtttggtgaggtggatttagccattatggaaaacggccagtacgaccaggactggaagtacatccacatgctgccggatgaaacggcgcaggcttcagccgatcttaatgcaaaagccgtcgtgcccgggcataacgggcgctttgtactggcgaaacacacatggaacgacccgctgatccagctggcaaaagccagtaaggacaaaaactatcggctgctgacaccagagttgggcgagcctgttcgggtgagcgataccacgcaaacatttcgtgaatggtggaaataa

SEQ ID NO: 267917 - DNA, 342 bp, Klebsiella pneumoniae
atgaccatttccgctcaagtcattgataccatcgtcgagtggatcgacgacaatctgcatcagccattacgtattgacgagattgctcgccacgcgggttactcgaaatggcacctgcagagactctttatgcagtacaaaggggagagtctgggacgttatatccgtgaacgcaagctgttgctggcggcgcgcgatttgcgcgaatcagacgagcgcgtctatgaaatctgcctgcgctacgggtatgactcgcagcagacgtttacgcgtatttttacccgcacctttaatcagccgcctggagcataccgcaaagagaatcatagccgggcgcattga

SEQ ID NO: 267918 - DNA, 249 bp, Klebsiella pneumoniae
atgaaacacccgttagaatcgctgctcacagcgggaggcattttattgctggccctgctttcgtgcctgctgcttcctgcgccctcgccaggactggtgctggcggagaaactggttaccaccttccatatggtcgatcttaaccagctttacaccattttgttctgcctgtggtttttactgcttggggttatcgaattcttcgtgttgcgtttcgtctggcgtcgctggttttcactggcgtcgtaa

SEQ ID NO: 267919 - DNA, 402 bp, Klebsiella pneumoniae
atggacaccccgctgacgctcggccacgcgatcaatatcgccgggctgatccaggcgacctcgcactggctgctggctacccggccgtttatacaccaggaaaaagactttctattgtataactttaaccgttttcaggcctgtcgttacgggttagaaggtattctgacggacgtgcataccggtgagcaaaaaacggtggcagaagatattgcctggctgcttgagcaggttgcaccgtccgccgggaagctcggtgctacaagcgcgatgacggaaatcgccctgctgttaaaacagggcaagagcgaagcgcaacgtatgcgggattttatcgccgacggtggctcgcttatttctctggttcagaaacactgcgagctgtgggcaacgcccccgtaa

SEQ ID NO: 267920 - DNA, 696 bp, Klebsiella pneumoniae
atgtggcttatgaagacattactaacatcggggtgtactaatcaacggggagcaggtcaacgccgctatatcattaccatgatcgacgagcacagcgactatgcgctggccctggcggtcccttcactcaacagcgatattaccagccatttcttcagcaaggccacaaagctctttcctgtcgctatcagacaagttgtcactgacaacggtaaggagttcctcggtaactttgataaaacgctacaggaagcctcgattaaacacatctggacctatccgtacacaccgaaaatgaatgcgacctgtgagcgatttaaccggacacttagagaacaatttattgaattcaatgaattgttgctttttgaggacctgaatttgtttaatcaaagaatggctgaatatctggtgctgtataacagcaaaaggccacataaatcactcgaactgatgacgccagtggactatattttacgtgagagtaaaaattgcaatatgtggtggacccatacaactcctgtcaacgcaaagcagaagtgtcaccatcggtgcgaaacagagatgtcatgctttggttcagagaatgcgtttgaccgcctcgctatatacttccgagcgttctcttttcccaacagaaatcacgaaaacgacaactttctcgtctataacctggtatacaaggcgatagcctga

SEQ ID NO: 267921 - DNA, 588 bp, Klebsiella pneumoniae
atgttgatgcagcatatcggtgtcggctattttgggtattaccgagcaactgcttatgcgatgaaacactctcttatgcccgagattgcgaagttaagaatgaaggctctgaacttctgggataagcacgggatccgtgccgcagctgatgcttttgacgtatcaacgcgaacactctactggtggcgccggttactgcgcaccggtggtccagaagcactaattccaagaagcaaagcccctctggttcgccgttcaaggcactggcatcctgatgtactcaaggagatcaggcgtctgagaactgagttacccaatctcggcaaagagcagatttttgtcaggctgaaaccatggtgtgaagcgcggcattttacctgtcccagcacgtcaaccattggaagaatcattgctggtgctcacgataaaatgcggatgatccccgtacgcctcagcgccaggggcaaagcccggttgataaaaaaacgctcagtgaagcccagaagaccaaaacaataccgcccggtaaaaacaggcgaactcatagggatggacgcgattgaactcaggatgggggacctacgctga

SEQ ID NO: 267922 - DNA, 402 bp, Klebsiella pneumoniae
atgagtgatgatatgattaggaaaaaagttgggagcttagtcgttgaaataccttcttcaatgattgtcgacggtgaagaattacccttatcctcttctgacttagagcctgtatttgcggaaggcggagatccagatgacaatactcctattggttttaatttagttcatgaagtgcctggcaatggaactgtgaataacggtatctatgttgataattggggggaaatccatgtaacaccagggccattagacgaacgcgatgactacgaacactctgatgatagtccgatagatacctacttcactcctcctgatgattttattcaaaacgtcaacgtatacgtcgaatacgatgacgaggaggaagaagaaagcaatgatgaagatctagacgattaa

SEQ ID NO: 267923 - DNA, 1407 bp, Klebsiella pneumoniae; identical to SEQ ID NO: 209002

SEQ ID NO: 267924 - DNA, 2010 bp, Klebsiella pneumoniae
atgataattggtgtgtttctgagaaatataaagtcatataggaatctaaactatgttccattgacatactcgcaggctattagtggtattatcggtcttaatggttcagggaaaagtaccatactagagtcatttgatgttttttttaatggtaagaacgcaagtcagataaggaataattcatcatcaaacctctccaatatagttcctgtttttcacttaaaaaaaactgaggtagagacgtttttatcagagctcgaaggtgaaaataaagaatcattcatgacattcttacagagctcaaactctaaattgagagaggtgctaggtgatgtatctatgtcaagcagtcagtatcaatacttaataccgcttaagcttcaccttgagaggctcattgagttcaatgttatcggcgatgatgatgttttattctcccctggtatttctttggatggaaagggtaaggtgagttactgctcttttgaaaatctagggattacagaggatgagtcgcaggagttggttgttaactatgtaaaagggttttatagatacttgtatatcccgagagaattgaatgtttcttcttttgaatctctatcaagtgataacatatactacttattggaagagagtttatctggctacatagaaagaataatacctagaactgagttttctaaaataacaaggatgttgagagggttgctgacatcgatcaacacagttattggcgactatcagtttaaagggaggaactctattgaaagagagagccttataaaaaaagatatcttctatggtctgtttgtgaaggagttttttgcaaacaagatactgcactatacgccatctggttctacgaggaacctctcaatagagaatatgagctcaggagaaaggcaaaaggctcttgttgatataatctataatttattatcagtggataatgtacaggtcgtaggtgttgatgaagttttgaagattgaaaaatcagactcatcaaaattaataattgggattgacgagccagattcatctttacatgtagcggcttgtttcgaacaataccaaaagatacaggatattgcaggagtctgttgtcagacatttatgacatctcattggtatggttacataccagtatcacaagatgctgcaactgtttttgttggtgctaaggataaagagggggcgactacttttaactcatcattttgtttatctaactcgaactttgtcgatgatcttaagtttatcaaaagaaaaagaaaagatttttcattccccatcacaatagggactaaaggcatttctgatttaaccatgtcaatcatgcacgccatatctggaggcgttgattgtaattggattgtttgtgaaggtgcttccgataggatttacttagatgcttacatgaaaaaagttggtgagaaagtaaatgtaatatctgttggtggtgttgataatttaaaatcaatctatagcataataaatgctcattaccatgagtttaaaagcagcataaaaaataaagtaatatttattagcgatacagatgctaattgtgttgatgattcaggcgtcactagagccaaaaacttaagcgaccatatatcttggtttagaatagttaataagtcatcttctgatgagacatcacttctcgaagttaatgactccctaaaagcaccggtgacgacagttgaagattcattaaatggaaagttgtatcgagaggctctactaaagcttcacaatgaattaccttctgatgttcatcattttatttcaacaagccaaccaagaaatgaatttattccatctgtatctctaaacttcaatatagaaatacagcggtccttaaaagaatggttcgagcatcacctatatggaaacaagcgaaagtttgatgttgcgaaagcatatgttgagtcaatgagtacagaggaatacgcgatacctaactggattcttaaaattcaggagaaactcacaaggaagtga

SEQ ID NO: 267925 - DNA, 393 bp, Klebsiella pneumoniae; identical to SEQ ID NO: 191070

SEQ ID NO: 267926 - DNA, 372 bp, Klebsiella pneumoniae; identical to SEQ ID NO: 234816

SEQ ID NO: 267927 - DNA, 1002 bp, Klebsiella pneumoniae
gtgctggggctgctgagtatgccattcctggcgctgctgccggcctcccatccgctggcggtgccgagctggctgctgacgctgagcggcaaaatcctctgctacgccattgtggcggtggcgctggatctggtctggggctatgcgggcatgctgtcgctggggcacgggatcttctttgccctcggcgggtacgccatggggatgtacctgatgcgccaggcggcgggcgacggtctgccggcgtttatgtcttttctctcctggagcgagctgccctggttctggtggggcacgcagcatttcgcctgggcgatggcgctggtggtgctggttcccggtctgctggccctggttttcggctggtttgcctttcgctcgaagatcaaaggggtctatttctcgatcatgacccaggccctgacctatgccggtatgctgctgttctttcgcaacgagaccgggtttggcgggaataacggcttcaccggttttaccacgctgctgggctttcctgtcaccgccaccggcacccgcgccagcctgtttatggccacggttttgctgctgttgctgaccctgtggctgggctcggcgctggcgcagagtaagtttggccggatcctcaccgcggtgcgtgacgccgaaaaccggctgatgttctgcgggtacgacccgcgcggcttcaagctgctggtgtggacgctgtcggcggtgctctgcggtctggcgggggcgttatatgtcccgcaggtggggatcatcaaccccagcgaaatgtcgccgaccaactccatcgaggccgccatctgggtggcgctcggcgggcgcggcaccctgattggcccggtgcttggcgccggattggtcaacggtgcgaaaagcattttcaccgtggcgatgccagagtactggcagctgtttctcggcctcatcttcatcattgtgaccctgtttttaccccgcggggtgatgggcctgctgcgtcgaggagaccgctaa

SEQ ID NO: 267928 - DNA, 486 bp, Klebsiella pneumoniae
gtgggggaagaggagctgcgcggcatcgataccaaaccgctggtcggcaacctcgcggcatggaactactttgaatccgtcgataatccgaccaacaaagccttcgtcgccgattatcgcgcgtatgccaaagcgcacaagctgccgaatgccgatacggtggtgaccaacgatccgatggaagcgacctgggtgggcctgcatatgtgggcgcaggcggtgaccaaagcgggcaccaccgatgttaacaaagtacgcgaggcgatggccgggcagaccttcaaagcgccgtccggatttaccctgaccatggatgccaccaaccaccatctgcataagccggtgatgatcggtgaaattgaaggcaacggccagttcaacgtggtctggcagaccgatgagcccgtccgcgcgcagccgtggagcccgtggatccccggtaatgataagaaacctgaccatccggtgaaaaccgtcagccagtaa

SEQ ID NO: 267929 - DNA, 276 bp, Klebsiella pneumoniae
atgtttgatcttttgcaggctatcgctggccgcctcgcgcaccgccgcatccggctcatgctgggcatcggtaaaggggatcagcagcgcctgggtttccggatccgcggaatggccgagcatcgtcacggcggccagccgcgcgctggcctcaggctgagtgagctgcaggcgcgccagcgccacctccagcagaccccgcacattatcatcggtttccgcctgcagccgctgttgcagcagcgcggccatggccggagtcgcttcccgctgtag

SEQ ID NO: 267930 - DNA, 261 bp, Klebsiella pneumoniae
atgctgggcatcggtaaaggggatcaggagcgcctgggtttccgggtccgcggaatggccgagcagcgtcacggcggccagccgcgcgccggcctcaggctgagtgagctgcagccgggccagcgccacctccagcaggccccgcacattatcatcgctttccgccttcagccgctgctgcagcagcgcggccatggacggggtcgcttcccgctgcagggtgcgcgccgcggacgctcgctctgtgacgttgtcacttaa

SEQ ID NO: 267931 - DNA, 138 bp, Klebsiella pneumoniae
atgatttgccacaaattagtaagttttataatgaccattggatacggccaggacaaaatacaaaagttgagggttttacaaaaattgaaaatggatgctattggtaatgtcgaaattttaaagcataataataaataa

SEQ ID NO: 267932 - DNA, 408 bp, Klebsiella pneumoniae; identical to SEQ ID NO: 267600

SEQ ID NO: 267933 - DNA, 342 bp, Klebsiella pneumoniae
gtgctcattaaaaatctgaaagaagaaatgttaaggtttgaagatgaagccaaaactgactggctgtttcctaatcctatgccgtttggtctggaacgagttatgattcaccagtgggtgcgggcttatctaggatttccgatggtttacgttgaagcaaaaattgttatgactgcttataggggggaaaagatatataccttacctatacctcatcaaaatagttctgtcggatttacctataacaaggatttattttcagaaaccgtgactttttatccactggagcgagcaaaggagattcatattgcgctggagaaaaagcgacttggtggcaaatga

SEQ ID NO: 267934 - DNA, 123 bp, Klebsiella pneumoniae; identical to SEQ ID NO: 191000

SEQ ID NO: 267935 - DNA, 213 bp, Klebsiella pneumoniae; identical to SEQ ID NO: 190672

SEQ ID NO: 267936 - DNA, 495 bp, Klebsiella pneumoniae; identical to SEQ ID NO: 190671

SEQ ID NO: 267937 - DNA, 822 bp, Klebsiella pneumoniae; identical to SEQ ID NO: 190670

SEQ ID NO: 267938 - DNA, 432 bp, Klebsiella pneumoniae
atgtttactcttcagcaagagcctaccatcatcaaaaccaatctcgtccattcccggggtcgtagtaccttctggcgtttctatttcggcacggtacctggctgggagcgtttagagggcgatatcttcaacctgatggacaggatgtgtgaggtctatcagggcgctttctgggaattcagtatgctgtctaatggaggggcatttatctggcctgatatgcccgaaacctcgctgcgtatgtttaatccgcataacggccataaagcggagttaagtctggaagcagccggtatcgcggtatgcctgatggcttacagtatctggtcgttcaaaacagaaagtcctgtgctggtggagtatttttaccagttgcgtgactacgctattcagtatccggaacaggcgaacatctttcatctgattgactga

SEQ ID NO: 267939 - DNA, 855 bp, Klebsiella pneumoniae
atggcttttaaagatgactttaaaaagtattcattccacagcaatgatataaatgaatcgagatatgttttacataggctaaataaatccttaaacattattgaaactagcaggtatttagaaaactcatccaatacagaattaatatggagaataaataaaataatcaatgaggataatgctgagaaatacgtcagggaatactcttcagactacaaaaagacatatgctgaatttgtaaatgtcgatctgtcatggataaagagtgattttaatgcaggtttgtatttatggtttagcttgtttgtttctaaatttgaaagtaacagggaaaggttgacagcagaagaaagggaatggtttaagaaggcaaggccaatttcatcagaaaacattattgtagatattacgacctacgccttgtcaaaagtaaaacaaataccatctattaaaaatgaggttaattttattcataaagaatatcagcagttaacagggaggaaaaggcttgggtggttaaaaaatgacaaagagcaggcaacttgggcatatcggtacctggaagagaaggatcgtctatttaaacggctatacatgggtgacagcgtaaatgcgcttgattttatcaaggtgtactacgatttacatatcgatgatagtggggttagacttactttcatagaaatgagtaatgcttggaatcagcagagatatcgagccaaaagaaaacaggatgacaaaaaagcactaagcggctatataagcattgaggccaagtcaaagctaaaagaaatagcaaaaaaagaaaaactctctgagagcgaaatgatagagtttcttattatgacctactaa

SEQ ID NO: 267940 - DNA, 567 bp, Klebsiella pneumoniae; identical to SEQ ID NO: 190667

SEQ ID NO: 267941 - DNA, 525 bp, Klebsiella pneumoniae; identical to SEQ ID NO: 190666

SEQ ID NO: 267942 - DNA, 222 bp, Klebsiella pneumoniae
atgacgacacaaacaactcccgccaccagcctgttgaacgaccagcttgttgatatgaagtttctgacacagttcacgggtctcactgataagtggttctacaaactcatacaggacggtgagtttcccaaacccattaaactgggccgcagttcacgctggttacgcagtgaggtggaaacctggatgcaggcgcggattgaagattctcgtaccgcctga

SEQ ID NO: 267943 - DNA, 2895 bp, Klebsiella pneumoniae
atggtaataactgattatcaagcaaaatactttgcgcaggaattaaccattcgccacgctgaaaatggcgttgataaattgtctcaatctctttttgatgccagtgttgatctcaatccgcaccaaattcatgcggcactttttgcgctcaacaacccgttaagcaaaggtgttgtactcgctgatgaagtgggcttagggaaaactattgaagcaggcttagtactgtcacagtattgggcagagcgtaaacgccgcatattgatcatctgcccggcgtcattgcgacgccagtgggcgcaggaattgggcgataagtttaatttaccaacgcaagtgcttgatgcaaaaacgtggcgcattagtgttaacaatggtcaaactaacccgctagctaatcactgcgtttctattatgtcctatcactatgctgcgagaatggaaacgcagctaatgctagaggcatgggatattgtcgtcatcgacgaagcgcacaagctacgtaatgcacatcgtagcagcagtaaaatgggtcaaacgctacgccgcgcattagatggcagtaaaaagctattacttactgcaacacccttacaaaactcgctcatggaattgtatggactttcaaccattatcgacgatcaaatcttcggcgatgagcgaagcttcaaacaacactttgtcaataacgaaagtgcgctagggcatttaaagaaacgacttaccgggtttattcagcgtaccttgcgcaaagatgtactcgaatacgtccgctatacccaacgtcaaacactcaccgtaccgtttacaccctctaatgctgagatggcactttacgaaagtattagtgccttattggaaaaggacgagagctatgcactacccaagagccaacgtcatttaaccggccttatactgagaaagctattagcatctagttcgcacgcagtgctcaacacactcgaaactataaagcgccgattggttgacttgaaagtacaggctaaatcggacctcgatattatcagtgagcttgttgagagtgatgatttaggagaagagtacagcgagtatgtagaagaaacacaaagcaatacccctgagagtgatattgactttgagttactcaatgctgaaatagccgagcttgagcattatatcgagcaggctaaatccattaccaccgacagtaaaacccaagccttgctaacggcgcttaatcaagggtttgccaaaatggaggagatgggtgcgccgcgtaaagtcattatttttaccgaatcgaagcgcacgcaagaatacttagctcgtttcctcgaggcgaatggctttgctgataaattagtcacttttagtggcagcaataaccatccagaagcaaccaaagtttatcagcagtggttagctgaaaaccaaggtagtgataaggttagtggttcaccgcaaattgaccgccgtaccgccctaattgattacttccgccatcatgccgaagttatgatcgcaaccgaagcggctgcagaaggggttaacttacagttctgttcgttactgattaactatgacttaccatggaacccacaacgggtagaacaacgtattggccgttgtcaccgctatgggcagcaatttgatgttgtggtgatcaacttcctcaacgaagccaacaaagccgatcagcgtgttttagagctactaacagaaaaattccatctgttcgatggcgtgtttggtgcatcggacgatgtgctaggcagtatcgaatctggtattgattttgaaaaacgcatccaaaatatatacgagacttgtcggcaactggcggaaatagaagcagcttttgatcaattgcaaaaagagctagaagccgacattaaccaaaaaatgcgcgagacccagcaactgctgctggaaaatttcgatgaagatattcacgacttactgaaaattcagcttgatgccgcgcagcaacgcctcgataaagtaggccgttggttttggcaactcagtacgcatgagcttgcagctatcgcagacattgacccaagcaaccatagttttacgcttaatcagagcatcaatcaggctcctacaggtagctaccaacttgtacgccgaggacagcaaagcggcagtattgaaaccggcaaactagccaatgcccatgtttatcgtatcacccacccgctgggtgaatgggtgatcagcaacgcgcttcaacgtgaattacctattgccagcgtaatttttgattacagcaaccaccaaacaaaaatcagtatgctagaacccttagtgggttcgtcaggtgtactaagcctacagaaatttagtgttgaatcattggagcgtagcgaagaccatttactgttcgcagcgcaagatgaacatggtcacccgttaccaagtgaagtcgtgcaaaagctgatgcagcttagtgcctgtgtgcaaagtgtagtcagtgagcaagaacttgccgccttatatcctggctatcaaaatgcgctgcagcaagcgttacagcagtcgagactaggcatcgaaaagcaagttaacgatcgtaatctcagcttcttcgagcaagaagtaaacaagttagattcttgggcagacgatttaaaagaagggcttgaacaatccataaaagagcttgataagcaaatcaagcaagtacgccgcgaagccaaaatagccccaacgctagaagagaaacttgccctgcaaaaacagcagcgccagttggaaagtcagcgcaataaaagccgccgcgaactttttgataaacaagatgaagtggacgaaaagcgcgaacagcttattgaaagcttagaaggcaaactgaataaaaaaaccagccaagagaccctatttaccattgggtggacggttcaatga

SEQ ID NO: 267944 - DNA, 930 bp, Klebsiella pneumoniae
atgagccgcaaaccagtccctaaagtcgcttttactaagccccctacaagctttagcgatcaaatacgcttgttgcaacagcgtggcctagtgattagtgatggccctaaagctgagttttacctggcacagctgaactactatcgttttgcggcttattgtttgccttatgagcaagatcacgccagtcatgcgtttatcgcaggcacccagtttgaacaaatcctaaacctatatgtgttcgaccgtgaactacgtttgttggtgctagatgccatagagcgttttgaagtgtcattgcacacacaaattgcgtatcagttgagccaaaaataccaaacggcgcaccctcatttaaaaccagagctttttggtgatttattagaatacgccagcagccttggcaaactcacgggtgaggtaaagcgcagtcgtgaagagtttattaaacacctgactcaaaaataccaagagccactaccgcctatttgggcctgtgttgagttgttaaccatggggcaactttcccgttggtacagtaatatcaagctgcgtgccgaccgccaagtaataagtaaaagctacggcctagatgaaaaaactctgacctcattctgtgaacatttatcactagtgcgtaatttaagcacccaccattctaggttgtggaaccgcgactttataaaaaccacggtactgccacgccatggcgaaccggcactgatccaaagcttgcaaaacttgcccgatagcgaccggcgtttgcgaaagatttataacaccttggtgatgttgggctacctcatggatgtgatcagtggtgaacatcactggaagcaacgactcatccaattgattaatcatcaccaaatagacattgaccgcatgggctttccagccgactggcaagcgcggccaatttggcaataa

SEQ ID NO: 267945 - DNA, 1836 bp, Klebsiella pneumoniae
ttggcagcattacaaccacaatttcttgccccattaaaggaactgctacagcagcgttttgtgccacatttaccgccattacttgggcaaggtggacaggaagataaacctaaaaagcaaatttccagggcttttagcgcattcgtactacagcaaaaattcgatttagacgtagtgaccgcaacaaaagctgtagtggatgactacgaagatcatggtcttgatgccatttattaccacgaagctgatcagacgttgtaccttgtacagtccaaaatgaaagtagatgcccaattcacattgggtgaagctcaagcctttatagaggggattaaattacttttaaataagcaatttaatcgcttcaatcagaacgtacaaaaccttcaagcacagattgaaacggcactagatgaatgcgagcacattcaactgctgatagcatacacaggtagtggcattacaatgcaagcacagaactacttgcagcctgccatacaagagcttattgatgaaggtgaagagcaaatcgaacctggttatcaagagttcactgccaccgatgttgagcaggctcttcgcagtgaacatgcggttgatacggtaaacgagcgtgtcgccgtatataagtttcgagtgcaagaacaaccacgaaaagtcgtatttggtatcgccaaactaaccgatttaattgctttgcacactactcatgatcgtaaactctacgagaaaaatattcgctattttattggttcaggtagccgcggtgtaaataaggctattaaagatacccttttacatgagcctgaaaattttatttatcttaacaatggtattactctggatggcaatgcagtaaaaccaaaagggaatattagaggccacacaggtagcaagcatattgcagtcgatggcctatctgtcgttaacggtgcacaaaccatcgccagtgctgcgcaatttatgcgtgaaaatcttgatgccgatatcagccaagctcaagtgatggtaaccattatcaacacgggtaacgatgcatttcacaagcaagtaaccaaagcgcgtaacctgcaaaaccctgttgatttagcaaacttcgcggccctagatgatactcaagaacgtctacgccaagagatgaaaatgttcggtgtcgaatacctctatcgcccacaacaaagcgctgcagcgggtattcgcagcattactatagaaacgttggcaaaagccttggcctgtatgcaagcagatgtgcgcgtgccttatcaactaaaagcagagccgagtagatttataaaccaagaaagtgtcgagtatcaggctattttcaacccagatttgcaaggggtcatggcaattaatgccgtcaatatttacttagccatccaagctttatgtacagctgcggaacgcagcagcccaagcccggaaaaactggtttaccgccattttacctactgtataaccacgttattaatggcgcagtttaaaaacacaattaccgccgttgaaatcaccgagcaagaagcattcgaaagattaattagccgagcctttgatgaacttcgtcagaagttctccgatagttttaggacattagtattcggcagtgcgccgcacgcctattttaaacgccttagcgatacagcacggttaatgcaaacggtgtgggtcagccatttaaacttggcagaaaacccagctgtgatagctaaacaacggctgcaaccgaatgacccatacaaccggaatttattcagttacttagccaaacaagcgcaacgccgacaagagcaaaacgctcaagctgccaatcggcaagtacagcaggcgtag

SEQ ID NO: 267946 - DNA, 1707 bp, Klebsiella pneumoniae
atgagcaaaactaaattagaactgacctggataggtaaaaacgagcgcaaaaagctagagccgcgcattttattagaagacccaagtaagtcttaccatgccagccaaaaattcaccgaaaacgatatttttgataataagctgatttttggcgataacttattggcactgaaggcactagaacaagaatatgctggtcgggtaaagtgtatttatatagaccctccctataacactggcgcagcgttcgagcattatgatgatggattagagcactcaacgtggttgtctttgatgaaggacaggatgctaatactaagatctcttttgcataaggagggggttattttcgttcaaatagatgataaagaaatggcttatcttcgtattttaatggacgaagtatttgaaagaagaaacttccttaatatgatggtagttaaaacatcagacccatctggccacaaaacggttaacccttctccatattctcaaaccgaatatattcttatgtattgccgagataggcagagttatcaatacgagcaacagtatataaaagctgaatacgacgcatcttacggtaaatatatcaaaaatattgaagagaattattctgattgggaaagctgctctctggttgagatagttgcacaaaatcatggatacgaggatgccagagcagcaagaaaggccataggtaagctggattttgaagtgttggtcgctgaatttgcaaacaaaaactcggattcagtctaccaagcaactgctataagtaatgctgcgggaagagcaatagttgaaatgcgggatgagtctaagtctaatcctggagttgtatataaatttcctcgagatgactacgatgatgtttatattctgaacggacgccagatctatttttactcaaataaaatgaaggaagttgaaggtgagattgtccctgcgaagcctctaacaaatttatggctagatattccatggaatggtattgcgagagaaggtgacgtaacgtttaaaaatggaaaaaagccagagaagcttattaagcgctgtattgagatgacaacaaagccaggggatattgtactggactctttcgctggttcaggcacaactggtgcagtagcccacaaaatgggtcgtcgttggattatggttgagttgggcgagcattgtcatacccatatcatcccgcgcttgcaaaaagtgattgatggtgaagatcaaggtggtatttctaagtctgtaaactggcaaggtggcggtggcttccgctattacaaacttgccccgaccttaattgtgaaagataagtttggcttggaagtgatcaataaagagtacaacccagaaatgctcgccgaagccgtttgtaagctggaaggttttacctatgcgccatcggaagtgaattggtgggatcacggttattcaaccgagacggatcatatttatgtcaccacacaaagcttatcggtagataaattagaagcgctgtcagaagaagttggcagtgaccgaactttactggttatgtgtggtgcatttcgctgcgagccaggtcgttttaccaatttaaccttgaaaaaactgccaaaagccattttagacaagtgccaatttggtcaggacgattattcgttaaacgtggcaaacctaactgacgatgcgtctgccgatgacgatgcagcacaagattaa

SEQ ID NO: 267947 - DNA, 2739 bp, Klebsiella pneumoniae
atgaccatggatttatcaagcttaaaacccgaccaattacgtgccattaataatattattggccgtttaagcttacgccagccgcagcaagattcgctgcgtgcgttggcagtggcgattagtgcttctgagcacaaactactgaacccaaaacgcgatgtgccggagctattagaaaccttaaaagcgcagtttcctaagctcagcgattttgaacgtgactttccttcactgtgttttgccttggcaacaggtgtaggtaaaacccgtttgatgggggcgtttattacctatttgtatcaggtacatggcattcgcaattattttgtgttggcacctaacctgactatttatgaaaagctgatcagcgatttctcgcccgcctcaccgaagtacgtgtttaaaggcattaccgattttgtgctagcaccgccagaagtgatcaccggtgataactatgagagccgcggtgcacaagtcatgggcgatctatttggttcggttcggatcaatgtgtttaacatcgcgaaaattaacaccgaagtacgtggaggcaaagccccgcgtattaagcgtttagcggaaaccctaggcgaaagctactttgagtatctatcgaacttacctgacttagtgctgctgatggacgaatcgcatcgctatcgtgccgatgccggtatgcgtgcgctcaatgagcttaatccactattcgcattagagctaacggccacaccatttaccgaatcaagtcgtggccctgtgcactttaaaaatgtggtgattgattacccattggcctgtgccatggatgatggttttgttaaagagccggccgttgttactcagcgtaactttgatgccagccaatatgataaagacgaactagaaaccattaagttaatggacggtattcgtttacatgagcaaaccaaggtggatttaatcacttatgcacatgaaaacgatgctaagttagttaagccttttatgttggtgattgcccgtgataccacgcatgcagcagagcttttaaccaaacttgaaacagtgtttgacggccgctaccgtggcaaagtcattcaagtggatagcagtaaaaaagaagaagaaactattcaagcactgctcaatgttgagcatgtcgatgagccaaccgagatcgtcattcacgttaacatgctgaaagaaggttgggacgttactaacctgtacaccattgtgccactacgtgcagccaacgccagaaccctaattgaacagtcaattggccgtggtttgcgtttaccttatggcaaacgtacaggtgttgaagccgtcgatacgctgagcattgttgcgcacgacaaattccaagaaattgttgatgaggctaacgacccgaataacccactgcgcctgaaaacacgcgtattagatcgcccagaagacgatgtaaccaaacaaagtgtgcaggttaaatcgaacctagagcagcaactgactggttcaggtgtaaccgcaaccggtgcagacgttaaccgtgaggtagaagaacctaaagccacttataccacgcctaaccaacaaaccgttgcccgcgctgcattggacgtgatcaagcaatatcaaacacgccctaccgatgcgccgaccagcaaagcattgttaacgactgaggtaaaagcacagatcaccgaacaagtaaaagctcagttaacccaagagcaacgggagctatttactgaagaatcggtggatattgcggcgattgttgagcaagtcacccagctcacggtggataacaccatagatattccgcgtattattgtttcaccatcaggtgaagtacgtaccggctatcacccgttcgatttggacattgctgccattaaaggtttaaaacctatcgaccgaactctgattcaacaaagcctgcaagacaatcaccaaaccattcgtggcgaaggcgattcgggcaactacgagccggtgaaacaaaactatattttgaagaagctgttcgattacgacgatattccttacgacgagcaagctgaacttttgtttgacctagccactcaagctgtcaatacactggccgctgaaaacgacgacgatgtggttgagaacattctgcaaaaccagagtgatgcgattgcgaagttaattcatgcgcaactgaacaaccacttctttgaagaagcaaccgagtacgtcgtcgatgtacgcagtggctttagtaccttacgtgactgcgcttacaccatagcgcaagaccagccggtgcaaagctaccgtgatacagtacgcgatgtcagtcgcatcaaacaaatgctctttggcggctttagccgttgtctatacccattgcaaaagtttgattcagacactgagcgccgttttgcggtgattttagaacgcgactgcgagaagtggtttaagcctgccaaaggccaattcaaaatgtactacaaacgcggtagcgagcatcctgaatacgtgccggatttcgttgctgaaaccgccgactatgtattgatgattgaaactaaaagtactcaacatcaaaaccaagacggcagttggaatgaggaagtcaccgaaaaagcccgcagtggtgtgaaatggtgtagtcatgccagtgaataccttgcacagcacggtggcaaaccttggaaatacttactcattccgcatgatgccgtgaaagaagctaattcattggcttacttcacccagcagtttgctaaagctgagtaa

SEQ ID NO: 267948 - DNA, 765 bp, Klebsiella pneumoniae
gtgttatgggcaagtggcaacgattgggatagagaatggatacagcaggtggtcgctttactggttgggcatggtgcgtttactctctacccagcattaagccagtgcgataatgcggccgaacgcttaacccgctggttgacctatcagttaccacgcgttaaacaagcgcacccaggctgcccgattcaccaatggctaaatagcattggcgcacaagtgagcgtagaaaaatggcaaagccccgagcaatggccaaacctgtattggctacctttacctgaggttgatggcaacgcacaaggcgggttagctttgttaccagcgcatttattaccggcagattttttatcgttatatgtggatggcacgattcaaaccagaacattgcaagcaaacacaccggccaacacctgtattttttggtgcatcacacctttatctaaaacaggaaagcacgctaccttgcatcccaaacagcaaaaccgagctttttgcctgcccagctcgccggagcaaatgggtaaatcgtgcacaggtttattactgagcggtttaagaaaagacaatggaaaacgaaacggcaacgtgatcagccaccagatcaacctagcgctgctgcaccatctttgtagaccggagaatgatgtttggatgaaagcgagttttggtaccctcatcattgagggtaccaacagcaaaatactcggcgaatgctattgtctaagcacagcgccaagccttagcggcacgaatagttgttaa

SEQ ID NO: 267949 - DNA, 339 bp, Klebsiella pneumoniae
atgcaatttatgatgcgacttgcccccattacctttccaatcgccatgctggcaggccttggttggtgtattggcattgccttactcgaacagccttatggtataggctacgcacttactcggcatagcctgatggtattcgtggtgctcgctccttggctgatgctaaaaaccatgttctatgtgattgtcagtttaggacgcaaactgggactcatcccgcctgcacgcccaacgcacagcttggggtatgaagaatcactctattggttcagagtattggcttttttcgatggcaaacgcagtcgcatgccaaaaaggcccatcaggcgaaactag

SEQ ID NO: 267950 - DNA, 297 bp, Klebsiella pneumoniae
atgaatatgctagaaaagatagacgcgttattcgagacactttatagcccatttattaagcaaaagcaggccatagctagaaattatatcattcaagacagcattacttgtaagtgcaaaggattagctattccagtgtacaacaccaccaataaatatctttgtcttcgttgtggttcaagatttgcaaatgccagacatcacgttacatctaacatacaaagccatgatggaatcacccagatcacttacgacaaggtcgtggagcagttaagagccgaaacatctaatttttaa

SEQ ID NO: 267951 - DNA, 669 bp, Klebsiella pneumoniae
atggctgtagatgatgtggttgaagtgcaggaaccaccaaaaaagagagttcagtgtttcatcgatggatacaatctttatcacgccattgatgaaactagagaaacaaaaaatcattgggtggatctatggaaattggcatcgcgatacatttctaaaaacacttgtgttttaaatgatgttttttggttttctgctcccccagtacatttacctaaaagaaaacaagaaattcatgcaaattattccgcggcattacagcattgtggtgttagcgtagtctctggaaagtttaaattaaagaaagtatcttgtaatgcgggaagtggttgtgggaagtcatttgaccgtcatgaagaaaaagaatctgatgtgaatttggctattggattggttagtgctgcatgtaatgatgaatttgatattgcaatcgtcattacggctgattctgatttatgtccgccaataaaatatgtcagaaatagattcccaaacaaacaagtttggattttaataccacctaaaagacgatctcgcgccaatgatctaaaagcgattgctaatagagaatttgaaataactaataaagatttgagggcgtcctgccttctccagttttatagaaacaatactggagttgttgctcagcgcccacctgaatggtcatag

SEQ ID NO: 267952 - DNA, 567 bp, Klebsiella pneumoniae
atgaaagaacatagtgtactcagcaagttctggggggacgaggccacatcgatggggtggactggcctacccaacacgttgttaattcttcaaagtgatttgggtatttcaagcactgaaatgtgtgttctcatgaatattttgatgcatcaatggccgcaaaaagaaaaaaacatatcctttccatcaattgagttattagcaaaaagaataggtgtgagtgagagaagcatacagcgaacaattaggagccttgaaaagaaaggattcataagtatattaccaacagaaaggagtaaccagttaactaaaggtgcaaatatatatgactcatccagattaaaagtaattcttaatgaaaaaagtattgaagcaaagaaaaaaaaccaaggaatcaaaaaacaaatagccggtataaaaatgccatttatatgccgaatctgcttaacgtcaaaggctaataacgttattgaatttagaaaatcatttggtttcacaagaacaattgctggggatattccaaataaaatatgcaaaaaatgtgcaaacaaaaacgatattttttag

SEQ ID NO: 267953 - DNA, 1275 bp, Klebsiella pneumoniae
atggctctgactgatatcaaagtacgttctgctaaaccacaagaaaaagagtacacgctggtggatggtgacggcatgtttttgcttattcatccgaatggctcaaaatactggcgcttccgattccgttttgctggtaagcagcatcttatggcatttggaacctacccagaagtctcattggctgatgcacgacaaaaaagagaagaggccaggaaacagattgctgcgggtatcgatccccgtgaaagtaaacgcgcgataaaagaagaacagcttaaagaggccattaccttcgagtcagtggcaagagactggcatgcagcaaataagaagtggtcagagtctcatagtgcgcgggtattaaaaagtctggaggataatctcttcggggccattggtaagcaaagtatcgccgagcttaaaacgcgagatcttcttactcctattaaagccgtagaggcgtctgggcgtcttgaagtggctgcgcgcttacaacagcgcacgaccgctattatgcgttttgctgtacagagtggtttgatcgattataaccctgcccaagagatggcgggtgcagtagctaccagtaatcgacaacatcggcctgcattagaactcagccgtacacccgagctgctttatcgtatcgatcactattctggcagacctttaactaagctagccgtagagcttactttattggttttcattcgttcaagtgaactacgctttgcccgttggtcagaagtagattttaaaacggccatgtggacgattccgggcgagcgcgaagcgattgacggtgttaaacactctcaacgtggatcaaaaatgaaaacacctcatcttgtacctctttcccgacaggcagtaacaatccttgaacaagtgaagattcttagcggcgatcatgaactgatctttattggggatcataatcctcgtaagccgatgagtgaaaacacgatcaataagtctttacgcgtaatggggtatgacacacaagctgaggtctgtggtcacggtttccgaacgatggcctgtagttcattgattgagtcaggattatggtcaagggatgctgtagagcggcaaatgagtcatatggaacgtaactctgtacgtgctgcttatatccataaagctgaacatcttgatgaacgcaggctgatgctgcaatggtgggctgattttcttgatgcaaacagagaaaaggccatctcaccttttgattatgccaaagtgaataatccctttagtaatcatcgttaa

SEQ ID NO: 267954 - DNA, 300 bp, Klebsiella pneumoniae
atgcgtataactgcgacggcttccccatgcctaaaatcggggatgatttctatttttattacgaatttaggaaaatataacgaaggtgaactggttggtgagtggcttgagcttccggcaacctcaaaagaaatcgaacactgtttagtgcagattggcattgatggtattcactatgaagagtattttttgaccgactatgaatcttcaattgatggcctttcttcttacatttcagtattgaagtggtcaacaaaaactggccaccgcgttagagtttttccagtatcggttttctga

SEQ ID NO: 267955 - DNA, 546 bp, Klebsiella pneumoniae
ttgcaaaaagatgattactctgttggtgtgacctggcaacaggcaaaagattattgtcagtggctaggtaaggagtccgataaaaatattgatttaccgacagaagcacaatgggaatatgcggcaaggtcaagagggcagtatcttcctttttcgactgataatggaaatttcgagcttggttctaatatacctgaacaaaagaaattagatgaatacacagatggttatggttttcctatttatccaattgggaaatatcctccgaatccgctaggtttatacgatatggggctaagtggagccgaatggagtaatgattggtattcaactgattattattcccactcccctgtttatgatcctcaaggtccagttaagggtaatgaaaaagttttaagggggtatgttggcggagatcgtcagtatgccttgactatattcaggcaatcgtcacaacctgtgccaaaatttgctgggcgtgatgattatcaaaagtttggagttagtcctctttttgtatttcgttgcgttattaataaataa

SEQ ID NO: 267956 - DNA, 954 bp, Klebsiella pneumoniae
atgattaataaaattgatttcaaagctaagaatctaacatcaaatgcaggtctttttctgctccttgagaatgcaaaaagcaatgggatttttgattttattgaaaatgacctcgtatttgataatgactcaacaaataaaatcaagatgaatcatataaagaccatgctctgcggtcacttcattggcattgataagttagaacgtctaaagctacttcaaaatgatcccctcgtcaacgagtttgatatttccgtaaaagaacctgaaacagtgtcacggtttctaggaaacttcaacttcaagacaacccaaatgtttagagacattaattttaaagtctttaaaaaactgctcactaaaagtaaattgacatccattacgattgatattgatagtagtgtaattaacgtagaaggtcatcaagaaggtgcgtcaaaaggatataatcctaagaaactgggaaaccgatgctacaatatccaatttgcattttgcgacgaattaaaagcatatgttaccggatttgtaagaagtggcaatacttacactgcaaacggtgctgcggaaatgatcaaagaaattgttgctaacatcaaatcagacgatttagaaattttatttcgaatggatagtggctactttgatgaaaaaattatcgaaacgatagaatctcttggatgcaaatatttaattaaagccaaaagttattctacactcacctcacaagcaacgaattcatcaattgtattcgttaaaggagaagaaggtagagaaactacagaactgtatacaaaattagttaaatgggaaaaagacagaagatttgtcgtatctcgcgtactgaaaccagaaaaagaaagagcacaattatcacttttagaaggttccgaatacgactactttttctttgtaacaaatacggctttgttgaataaatcagatttcgggtaa

SEQ ID NO: 267957 - DNA, 408 bp, Klebsiella pneumoniae; identical to SEQ ID NO: 267600

SEQ ID NO: 267958 - DNA, 1437 bp, Klebsiella pneumoniae
ttgaacgtcacctccgccgtacgccaggctgtcgaacggacatcctggtttaaaaaacgtcagcgttatcgtgtgctgtactggcgcgaaatcagccctctcgctgtgcccattctgctggaaaatgcctgtgtgctgctgatgggggtgttgagcaccttccttgtcagctggctgggaaaagaggccatggccggggtggggctggccgatagctttaacatggtcatcatgtccttctttgccgccatcgatctgggcaccacggtggtggtggcctttagcctcggcaagcgcgatcggcggcgggcgagggcggccgcgcgccagtcgctggctattatgacgctgttttccattttgctggcgggggtgatccatgcctttggccaggagattattgattttgtcgccggcgatgccaccgcccaggtcaaggacctggcgctgacctatctggaactgacggcgctgagctacccggcagcggcgattgcgctgatcggcagcggggcgctgcgcggcgccggcaccaccaaaatcccgctgctgatcaacggcgggatgaatatcctcaatatcttaatcagcagcgtgctcatctacggcatcttctcctggccagggctggggtttgtcggcgccgggcttgggctgaccattgcccgctatattggcgcgatagccacgatctgggtgctgatggtgggcctcaatccggcgctgcggctgtcgctgaagggctacttcaaaccctttaacttcgccattatctgggaggtgatggggatcggcatcccggccagtatcgaatctgtcctcttcaatggcggcaagctgctgacccagatgtttgtcgccgggatgggcaccaacgttatcgccggcaactttatcgccttttcggtggcctcgctaattaacctgccgggcaacgccctcggctctgcctcgacgatcattaccggcaagcggctgggaaaagggcagattggtcaggctgaattccaggcctggcacgtattttggctgtcgacgattattctgacgctgatcgcctggggcagcgcccccttcgccggctttatcgcctcgttctacacccatgaagaagatgtaaaagaagtggttaaacagctactgtggctcaacgccctgtttatgccgatctggtcgctgtcgtggactttaccctgcgcttttaaaggcgcccgtgacgtacgctacaccatgtgggtgtcgatgctcggcatgtggggctgccgggtggtggcgggctataccctgggcatcgtgctggggatgggggtgattggcgtctggttagggatggtgctcgactgggcggtgcgcggcgtgctgttttatttccgcatggtgagcggccgctggctgtggaaatatccgcgcgtgaaggcttcatcggaggaaagctga

SEQ ID NO: 267959 - DNA, 1455 bp, Klebsiella pneumoniae
atgaatatcaaggccgccagtctgaccccggaacaagcgcttgccgagctggaagcgcgctatgaagcctcggtcacggcgttacgcaaagccatcggcgactatatcgaccataatacgctccccgataccgaagcccgcgcggaaggtctttttgtctatccgcagctgtcggtctcctgggacggcgccgatcataaagccctcaaaacgcgcgcctggggacgtttcacccatgccggttgctataccaccaccattacgaatccgaaactgttccgcaactatttgctggaacagctgaccctgctgtatcaggactatggcgcgcatatcagcgtcgagctgtcacagcatgagatcccctatccttacgtgatcgatggttccaccctgacactcgaccgctcgatgagcgccggtctgacgcgctatttccctaccaccgagctgtcacaaattggcgatgagaccgcggatggcctgttccatcccaccgagttctatccgctgtcgcactttgacgcccgccgcgtcgatttttcgctggcgcgtctgcgacactacaccggcacgccggcggaacacttccagccctacgtgctgttcaccaactatacccgctacgtggatgagttcgtcagctggggctgcagccagatcctcgatcccgacagcccctatatcgctctctcttgcgccggcgggatctggatcaccgccgagaccgaagcgccggaacaggccatttccgatctggcgtggaagaagcaccagatgccggcctggcatctgatcacccacgacggcaaagggatcaccctgattaacattggcgtcggcccggctaacgccaaaaccatctgcgatcatctcgcggtactgcggccggacgtctggttaatgatcggccactgcggcggcctgcgcgaaagccaggccatcggcgactatgtgctggcccacgcctatctgcgtgacgatcatgtactggatgcggtgctgccgccagatattccgatccccagcattgccgaagtgcagcgcgccctctacgacgccaccaagcaggtgagcgggatgcccggcgaagaggttaagcagcggctgcgtaccgggacggtggtcaccaccgacgaccgtaactgggagctgcgctattccgcttcggcgctgcgctttaatctcagccgcgcggtagctatcgatatggagagcgcgaccatcgccgcccagggctatcgcttccgcgtcccctacggcacgctgctctgcgtctcggacaagccgctgcacggtgaaatcaagctccccggccaggctaaccgcttttacgagggcgctatctccgagcatctgcagataggcatccgggcgattgacctgctgcgcgccgagggagatcacatgcactcgcgtaagctgcgcaccttcaacgagccgccgttccgttaa

SEQ ID NO: 267960 - DNA, 246 bp, Klebsiella pneumoniae; identical to SEQ ID NO: 136434

SEQ ID NO: 267961 - DNA, 1623 bp, Klebsiella pneumoniae
atgaagcatctatttcgacactggcgaacgtcgggcgccgttatcggctcactgctgaaaaaagggagcattgcggtactggcgctgctggtggtctttctcgccgggcggatctatgagtcccagcgcggcccggccctgcatcgctggcatacctggagtggcaacgagatgtcggccgaagagatcgaccaggcgacctttgcccagtatctggcgcgggagaagacgattttcgccgatctccagcgtgaggtgacagaggctttgccggaggaagataaaaccccggtcaaccgcttttatcgtcacagccgggtctggccggggcagtttcagcaggactggaaccgttcttttgtgctgctgccgctgggcaagccgcgcggcggcgtggtgctcctccatggcctgaccgattcgccctacagcgtgcgctatctggcgcaactctggcagcagcggggttatgtggcggtggtgccgcgtttgccgggacatggcaccgcgccgggggcgttaacggcggttgactgggagacctggctggcggcgacgcgtctggcggtacgcgaagcgacccgccttgccggggcggacgtgccgctgcatctggtcggctactctaacggcggcgcgctggcgctcaagtatgccctcgatagcctggaggatagccacctgcgtcagccgcagcagattattctgctgtcgccgatgatcggcgtgaccgcgtttgcccgtttcgccggcctcgccgggctaccgtccgtcttcccggcgttcgcccgcgcggcctggctgaatgtggcgcctgagtttaatccgttcaagtacaactcctttccggtcaaggcggcgagacaatcgtggttattgagccaggcgctgcagcagcagattatccgcgcggcccggcagggcgagctgaaagcgctgccgccgatcctcacctttcagtcggtgatggattccacggtcagcacccgcgcggtggtggagtccctgtatcgctatctgccggataacggcagcgagctggtggtgttcgatattaaccaggcggcggatctccgggtcctgtttcgccctgcgctctatgcggcggtgaatacgctgctggccccggcgccgcgggcctataccaccacggtggtgaccaacgcgacggcgcacacgctgcagaccgtcgcccggaccacgctggcccaggaacgggaagagcatcgttatcctttacacctggcctggccggcggatatgtactctttgtcgcatgtggcggtgccgtttcccctgagcgactcgctgtatggtcgcgagccggacgagaagaaccgctacggcattagcctgggcaccatttcactgcgcggagagaccgggacgctgagcgtggggctggagacgttaatgcgcgtcacctccaatccattctttccatggatgatgacgcgcgtcgatgagcgcatcgcctgcggcgaacaggcggcggtggcggcctgcctgaaagcgcagaccagagcagaggcattaaaacaggatcaggtgcagaacggtacgcagcaggataccgatgatcgccgcgggagccacgaagcggaacaggcggacaaaccgtga

SEQ ID NO: 267962 - DNA, 933 bp, Klebsiella pneumoniae
atggatgtcataagcatcattatggcggcgggcaagtcgtccgttgacgtcgcgctgtatacgctgttgccgatcatggtgatcatgctgatcatcatgaaataccttgaggtccgcggtatcctcgatgtgattgttcgctgggtggcccctctgctgaagcccttcggcttaaccgggatgagcgccttcgccctgatccagattaactttgtcagctttgccgccccgctcgccacgctgtcgattatggataaacgcggcgtctcggaccgacaaatggccgccacgctggccatggtgttcgccatggggcaaggcaacgtcttctatcctcttaccccttttggtctgcactggctggcctcgatcgttatctcggtggtcggcggcctgtgcgcggccgccgtcgcctggcacgtcaccggacggcgcttatcggtcgccgagaacccccgcgcggaagcgctgccgaacgccgagcagaacagccagggaattctggccgtgattaatagcgccggctccgacgccatccgcctggcgctcggcgcggtgccaatgctgatcctgtcgttaaccatcgtcgggctgctgcagggcgccggggctatcgacctgctgcagcagctgctgaagccgcttctcagctggctgcacatcccgcagaactttgtgctgccggcgctggtgaagtgcgttgccgggggcaccgcctactttggcgtcatttccgagctgatccagcagggcaaagtcaccgtggaccaggtcaacgcctcggcaggtctactgatccagatctttgatcttcccggtatcggcatttttcttggcatcagctcacggtttgtccgcctgttccgcttcgtggctcccgcggcgatcatcggtatcctgctgcgtaccgttctgcacctgatcctgttttaa

SEQ ID NO: 267963 - DNA, 705 bp, Klebsiella pneumoniae
atgaatcctgatacctccgccgtcgtgaagccccgccgcggccgtccacccaaggtcgatcgccagtttgacgatacgcgtcaggcgctgattcgctcaggccttgaagtgctgaccgaaacgggctatctcgcggcgggtattgatgcggtgatcaagaatatcgccgtgccaaaggggtcgttttatcactgctttaaaagcaaagaggcctttggcctcgccgtgcttgccgcctatggcgacttctttgcgcataaattagataaattcctgctggacgacgccatgccgccgctggaacggatggcggcctttgtgcgtcatgccggtcagggaatggagaaattccagtttcgccgcggctgcctggtgggcaacctgctgcaggaagccccgttgttacccgagacgtttccccaacggttgatggctatcctggcggcatgggagtcgcgcgtggcgcgctgcctgcgcgaagcgcaggcagccggggccatcgccagcgacgcctcaccgcaggcgctggcccaggtgttctggatcggctgggaaggcgcggtgatgcgcgccaggctggtccagtctgccgcaccgcttaaccagtactgggatttttttgcgcacagtatgacaacaaaaacacctgcacaggacggcgctagcgccgataacccccttccgacgaggaatactctgtcatga

SEQ ID NO: 267964 - DNA, 498 bp, Klebsiella pneumoniae
gtggaagccgctatcaatgactgggcgccgcccccgccgccacgtccggtcattaagcaggttgtgcaggggccgcagacgatccgcctcgatagcatggcgctgttcgataccggcaaatcgacgctgaaaccgggttcgacaaagctgctggtgaactcgctgctgggcattaaggcgaaacccggctggctgatcgtggtggcaggccataccgacagcatcggcaacgataaatccaatcaacaactctccctgaagcgtgccgaggcggtccgcgactggatgcgcgataccggcgatgtgccggagagctgttttgcggtgcagggctacggcgcaagtcgtcctgtcgccagcaacgagacgccagaggggcgggcgcaaaatcgccgggtggagatcagtctggtcccgcagaaggacgcctgtctgacgccgggcacggccaatacctcaggagcagagactaacggattaaaaagcgaaaccgagtaa

SEQ ID NO: 267965 - DNA, 1962 bp, Klebsiella pneumoniae
atgtttaatacggattcgcttgcctggcagtggcatatcccggagctggcccggcagatttacccgtgggtcagctggctgtaccgggagtattacagtctggccggtttttttctggttatcggcctgtttttcggtctggcagaactctgggccgggcggatgcgattcgtggggctgagtcataaggagcggcgggagtatgccgatcgctataagcgcgataataaccggactgcgccattttcggtgctggcctcgctggattcgcccgggcggatggtcagggcacggcgacatgtctggaactacgcatactggctgaccggcgctgccggtctggcccttctgggggggctggttgtcgccgtgtttatcgagagctggggagaaaccgtcctgcgtccggacctctacgcgaacgcagattattacctgctgcagccggctaacctgttcgggattgcctggtgtgccggaggtcttgtcgcaggcgtcctcctggcgcggctgctggcgttcctgctgcttgacgggcattttgcggccgctgacgaggcggtgaacgcgaaactgaatcaggagagccggcgcagcagccagcggaccggagaaatgaccgacgtccgccacctgcatttcggggagccggtaccggttaacgcgctggccgatttttccacggagcaggcccggaaacagcaggcggtgtttctgggtaaggatgagcagggccagccggtgctggtcccgcgtgatacctggcgcaagaccaacattcagatcctcggcctgcccgggagcggcaagagcgtgatggccaccaacgcgctcattcgctgcgtacgcgatttcggggacgcggtggtgtacttcgacccgaaaggggacgcgtgggcgccgcacgtcttccgggcgcactgcccggacttcaccctgctggatctgcggccggggaaaccggcgcagctgaatctgttccgcgatctcgaccagtacgccctgaagaatcttctggttgccggatttaacctgagtgagaccggcgacgtggcggaccactaccgcatcagcgagcagaaagcggcgaagctgattgcggagcagtttccgcagggggcaaatattcagcaggtgctggcggcggcgtacgcactgccggaggccctgaaaaaggacgtgaaggggctgatcaccaagctggagaacgtggccgacctgagcgtccttcagacggacagcggcatcgacgtggcggggataatcaacggcggcggctgcctgtacgtcatcggctcgatggacgatgaggcggtgatccgggtgcagaagatgctgtttgcccgctgcgcgcaaatcatcattgcgcgggacgagttccggtggtggccgcacgcgagcatcatgctcgatgagattaaatatctgctgtcgaagtacgtgctgaacgcgctggggacgctgcgcagccgggactgcaacctgctgctcgcgcaccagtcgctgggcgacttcggccagtgcgggcaggatctgcccgctgattttgtgaaaaccacggtactggataacacgccgatccgctggttctaccgggcggccagccaggagtccgctcagtgggcggccggacagaccggggagatccgggtggacgtggagcgccgccgggccagccgggaggcggggaacgtggagcatatcagcggggacagcttcatccagaaggaggcgcggccgctgtttgacgtgaacaccctgcaacatctgcctgacgggttcgcggtgatgaccgggctgggcgtggcgcggctggcgttcagcagcccgctgcgtgttgatcgccgggaaattccgctgaaaaccttccctgtgctggcgaaaacggacccgctggcggagtaccagtcggaggccgggcggcagcggccgggtgatgatgattttgcggggctgtactga

SEQ ID NO: 267966 - DNA, 732 bp, Klebsiella pneumoniae
atggcactggagcgatacaacgtcagccacgcgaagcggcaggcacggaacgcggagaaaacacggctgaccctgcgctggctgcgggaagaactgtgttccacggcggagctggttgcgcaacggctggggattgcggcggtacagccggtttaccgcttcctggacagcctggtggcgaaagggctgctggtccgggcgaaatacccggttgacggccgtcaggtcagcgtgtgggggctgacgccgcacggggtggcgttctcgttcgacgaggacgagccgctgacggacattattccgtttcagccgtcgcgggtgtcggcggcgcagctgccgcaccggctggccgtgcagtccctgcgcctcgccatggaggcccggggggccaccggctggcggtacctgcaccgtattgccctgaaagggatgaaggtgccggacgcgctggcggagctggacggcagaacggtggcgtttgaggtggaacgtaccgtcaagagccgtcgccggtatcaggaagtggtgtccgggtatctgttcaaccgtaaggcgaacggcatcgatgaaatctggtacatctgccctgaccggccgacgcttgtccgggtacagcgggcgattctggcggtggatgaaatcgtgaacccgcagaccggcgaggcccgcaaaacggcggagctggaccgggagaggctgttcgcatgctttaaatttatgacaacggagtga

SEQ ID NO: 267967 - DNA, 204 bp, Klebsiella pneumoniae
atgcgcaccatcgaagaaattagcaagcgtgcagcgctgctgaattgtaagcgccagtttggaccgttcgaggaatgcccggtttgtttcggcctgctgcgttcctgtgagctgtgccacggtagcggcaaggtgattcaggaggatatcgactcctggaataacccaatcaccaagatgagacgggaggcgaaaggtgcctaa

SEQ ID NO: 267968 - DNA, 141 bp, Klebsiella pneumoniae
atggcagttggcctgcactgctttgttgtgcgccagaatgtcgcgcttggtctgcttatccagcacgtcaatatcgtggtcggtcaggtagataatgcgaacccagttgcaggccgtatcaacgactaccggggcgggtaa

SEQ ID NO: 267969 - DNA, 516 bp, Klebsiella pneumoniae
atgcttgctgaattttctgctgctatggctgcgataaaagagacagctgcactcgcaaaattaattactgatgcaaaaactgattcagaggtgaatgctgcggtaagtgatttggtgtcaaaacttacgtctgtacagcgcgaatgcatatctctcgttgagcttgcacgatcgctccaggaagaaaccgtaacgctcaaagcaaaaattgcagagttcgaaaactttaatattcaatctgaaagttatgcgctttacaaaatggaaagtggaacgcttgtgtattcgacacagataacgcacaacggtgtgcagtttacggtgaatgcctgcccacactgcttccatcaaaagaaaatatcgatacttcagccgggcacagaaaagggttttagaggaggctactggattcatttttgtccttcctgcaaaagtgatttcacaatggatcaaaccccagcagcgaaaaatcccgcaggcgtagctcgtcgtcttaccggtggtcaagcttggtag

SEQ ID NO: 267970 - DNA, 267 bp, Klebsiella pneumoniae; identical to SEQ ID NO: 267308

SEQ ID NO: 267971 - DNA, 309 bp, Klebsiella pneumoniae
atgactgataaatgggctgactacctcatttctaaggtccggtacaatgattcccacactcacattacccacgtgtatgtacacgttgataagggggcctctgttggagaggggacatcagaaacgcgacaatgggtagtaaataagatcgatagtggttatacgttttacaccatcttcaaagacgataatggtaaatggagcaagggacagaaagtgataaaagaccccgtaaacgggactaactacatcactacaaggcccaatggaaccgctaaggacaaccttgagaatctcccggaatactga

SEQ ID NO: 267972 - DNA, 321 bp, Klebsiella pneumoniae
atgagactgaccaaccgcaaacaagaaatattgagctacttcgaacctgataaacgtgactgggtgacggatgagatcggcgcacctccgcttgttgtatccggcgtggcatacctgatgtatggaacaggcctcaaagacaaccggcactgcctcgaatccactaggcggacgctggaagcaatgctgaaagacgggttgctggagaggtaccggagccgtgaggcgcggagcatcgttctgggcggcgaaacgagcgctaccattgtccgctatggcctgccgggtacagtctcagtggttcgcaatgcggaaaactaa

SEQ ID NO: 267973 - DNA, 762 bp, Klebsiella pneumoniae
atgtgtgtgtatttatgtgggtgtacaggtgatctgatttttatttcacctcataaaaaaaatccgagcactttttttcagtctattcttagatttagagtgtcgaagcactctcatgtcgcaatatcggtagaacaatatactgtgattcactcatcaccaattgacggcgttaaacatgatattatcagagggttgcttaataatacagattgtgatttttctgttttcaggaataaatcaattcaagaaaatgagccacttcttattgaattgaaacattcactgctttatcatacttctcagggttacaactatggcttttttattaaaagcccatggcattcatctttttgctcagagcttgctgttcgagctttccatttggtaggcataaaaatatctaaccgccctcctcaaaatactcttccagtcgatatttacaaatatgttctagaagcacctgactggatagatgttacagatgagtacaagaaagattatttgggggattcgtatcttacagtgtatgataaagcggcggaatttatgataaagttagaaagtctcaaccaagatatgtcatttagtcagaagttgttacttgataaattaaattctgtaacgaaagatagtgagaatccaaccaattataggccagttagagattattggacaaatttcttaggggaaagatttagcttgaagttttttttaaagtataatcttaggaggttttttggagggactaaaaataaatga

SEQ ID NO: 267974 - DNA, 192 bp, Klebsiella pneumoniae
atggtgttaaaacagaagaaaatcgaggcggtaattgaagagctggcccgcctgcaggggcatgagttaaacgccgccgatatgctggagttacgttgcagggttgcgggaacgctcgctgcaaaagcacggcaccgtcagcgcatggccgctccggattactactggcgcaagccagcacctcgccgataa

SEQ ID NO: 267975 - DNA, 588 bp, Klebsiella pneumoniae
atgtcactaatgagcgtcagccagtacgcaaaacatgccggaatgagccggcaggctctgtataactgggagagccatgaaggatttccgccacgggttgacggaaagattgaccaggatgcctgcgatgcctatctggcccgataccggagcgccagtgatccgcgcacgaagaatgccagaagcaaaacaaagcctgcacgagcgggtgaggtgccgggtaatacgctggtggaaatgagtgttacggagattaagcgcatcgtggcatctggcgccggcaaggtggccgggatggacccggacgaacgcgctcagttggccgccaaggccgtagagctgtttttaagcgaaggcccctataacccgccagtgacatttggcggctaccggctgtcgattgttgaaacgccagatgatgaaatcgggcagatcatcgcgggcggtgcgtttggcctgtctgctgatgatgtggtttttgaatgccgggattacaccctgactctcatgagcgatgaaaccgaagaaacagccatgcggagggttatcccttcgttactgtatgccctggccgacgataccgactaa

SEQ ID NO: 267976 - DNA, 1434 bp, Klebsiella pneumoniae
atgatccagccgaaagtatttatatcctatagttggtccagtaaaactcatcagcaacatatcaaggatatagctgaaagattggcggcagatggggttgaaactgttatagatatctatgatttgaaagagggggatgataaaaattattatatggaacgtatgattcaggataaaactgttacgcacgttttagttatttgtgataagaaatattctgaaaaggccgaccttagaaaagatggtgtcggtgtggagtccatgataatttcgcaggaaatatattcatcagtttcacaatcaaagtttataccgttgatatttgagtatagagaaaatggtgagccttatacgccgatatttctgaattctaggatttatattgatttctcaaccccagaaaaagaaaatgataactgggaacgattaattaggctgctttatggaaaacctgagtttacgaaaccgccattgggtaagccgcctgtttatttgcagcaagattcatcaactcccacatatgagattcatgcaaaatttcagacattaaaatcagcgataataaatcaaaagcaaaacattaaagaatgcagaagacaatttcttgagatatgtcgaaattattgtgtgtcgttacaggtagtaacgggaccaactgcggatgattttgcagcagaaatattacaaattcatagggaacttatcccggtaagggatgcaattattgattggatttctcttgagggagagactcaaagcgaggatttctctaaagcacttctacaatttatggaagtactattagcgattagaagtcgaccaaagagtgtcaactcatggaatgatttatggttcctttcccatcaggttttttcttatgaaacattcttatatatactggcagcattaataaaaattgaagcatttcagcaggtatatattttactacatacatcctatcttttacctgatcatctaactagtccaggaatggaatttgctaattatagtgagttctttgtaagttctgacttccttcaaagtaaattggcacctgaaaattatcgtcttcattcacctgtggcagagttggttaaactaagcgcaactagagaggatgtgtcctttgatgatttgaaacaggctgatctcgttgctcttatgatatccttcgttaatccagagattcattggtacccacaattattattgtattctgggcattatgataaatatcctctttttaccagagcaatacagcatagagggttcaaaaacattgcgaccataactgggattaacgatagtaagctattggttcaaaaactgactgaaggcgatgctaagaaaaacactaataactggcaccagttcagttttagtagaaacttccttgagaaaatgaataccagccgtttagacagcattaattag

SEQ ID NO: 267977 - DNA, 597 bp, Klebsiella pneumoniae
atgaatattgctcaaagagatcgaatcctggaacgtgtaaaccaggtcattgggtctaaagagagtgttgtacctaatactccagaaagtaattcacacgatcgtttattgcggataagcgcgggtctcttacacctgttaaatgaggtccttcctggcattgccaatacgactgaacgcgacgaaatagaagaaatagcagtgtgggtagatgcgatgcattccatcacgatgatagaagcgttagatgcaaaatcactgcgtcccacaaccgtaccaggcttgcgcaatgaagtacctgtgccgactggtggtgatgccgcaaccacggtgcgttatgcggcagagctacaggaattgtgggggcttcatcttgatgctcgcttgcgtgctgccaaccctaaagctggcgccagattatggacgctaatcagcgaacttaactacgcagctcagcgtacggaaagcagatataaccgcctgctgttaaagctggaggctatggcgaatatcactacgccttcggagcagagggaaagtgcggccccttcaactttagagacattccctttatgtcaggaggttcgccatgagtga

SEQ ID NO: 267978 - DNA, 789 bp, Klebsiella pneumoniae
atggcaataccattacgtgagtattatacattatctcgtgctgctgaattacttgattgtaaggtaaatgatttaattcattgggcgtttattggggggattaatatatacctgtcgattgagtcaggtatgggatacttgcacttctgtaatgaaaatgatgagttagaaatggattttgaagaaaaattatttgcacgtgatggattttcgactgtaagtgctatttatactttggaggatggttccgctaaaaatttcttccagaaagagccaccttttgaagggttccaaccatgcacctttaatggattgtgggctttgcctcgttcggcatattgttatgatgatttaatggaatttaaacctggcttttttgatttgtggttatcgtcaaataagctgatgtttatagcttttgacgatgatagttacataaatccccttgaaagtgttctttatttaatgaagtctgatttcttattaatttcaaagataataaatggtgttgaaattacaagcaattttaaggaaattccaaactactttaatgaaggaagagaacagctaagtttaaaaattaatgaagatgctagttcaatttctcaagttagaacttccagaacagccagggatgcaataaaaataatggcaaaaaaacattatgctgaagttgctgggaattataaaaagtttgctgaggtgttgagtgcggaggctaacgagattgaagggatggcaggggttagatttgatgattctacagtcggtcgctggatgaaagactag

SEQ ID NO: 267979 - DNA, 1725 bp, Klebsiella pneumoniae
atgaatgaaatatgccagcgacagattggaaaaaagggatgggtgatagacttttacaggaagcgtttcaagcgtatctaccctgcgcttttcgtttccgttttaatgttttttattatttcaatcgtaatatatccgccatcaattactgagtctatatacaagcaagttattagcgcacttacatttacctcaaacatattctactggaaagatagttcagagtattttgtagatgatgccgacagtcttttccttcttcacacttggtccctctctgctgaatggcagttttacttaatattccctgcctttatctatgctgcaagtaagataaagaataaaaacataaaaccttatctgtatgccttagccataatcacgtcgttccttctctgcgtggttgttactaaaaaaagcccaagtgcatcattctatctgctacctactcgtgcatgggagttgtttctcggggcatttgtatcttccttagcggtaaaaaacaaatacccaaaagcaacggagataacatctctactggtcataattgcttttacattgacggtgaaagaaagcgccgcatggccgggtatgatgacgcttatccctactgtagcggcggccgcattgattcacgcagctgttaaaaatgaagaaagtcttcttagattttctccactacagtcaataggcacggcatcatattccatttatctattccactggcctattgtttctatattttatctttatcagatcgagttctcggctttcaatgcaaccattggtgttattctgtcaatcgccataggttttgcatcttatgccatgatagaaaaacggatgaggttatccataccagtattgatctcctcatctgtcacagtaatggttgtatcttttgctatgtctggactaggtgtttcaaaatactggctaccacaaagtgttatcgcgcttgataagtatcataattattttgaaaccgaagaagggatgactcagtttggtaataacggtcgtacctgtttcctgaccagcgtgcgaaataatgcatctctattcgatgaggatacatgcctcatcaaagacggttccaggaaacgacttttgttaatcggcgatagtcatgctgctcaattctatgatgctgttaaagaatcattccctgattatgatgtaatgcaggcaacagcctctggatgtttgccattactttccccggtgggggagaagcgctgcacttcattaataaataaggtttatgaaaaatatatccataaatacaagatagatatggtagttgtaaccggaaactggattaccgaggcgaaacgacttgggaatatgaactctctggttgagagaatggttatatctaatgctgcattaaaaaaatcagttgagaacgtgttctttatcgggcagacaaaaatatttaaatacccgatgtacagaacagtacaggttgggaatgaagaaaacatagcatcgcaagagttaattgacattaaagagttcaatgactcgttagttgctgcactttctggaacaaacataaaatatatcgatatatatagttatggttgcagcgacagtgattgctcttatgttgataaatccggaactcctttcatgtttgatagtaaccacatgacgatgccatggtcagtttctgtaatgaaggatgtaagttcagcaataaacaatttaattaaacaataa

SEQ ID NO: 267980 - DNA, 870 bp, Klebsiella pneumoniae
atggaaagaggtgtgatttttactcgaagtgaattgattaagattgctggtggtcaaggatttcgaattggtaaatcaattaacagattagatataaattattttttattatactgggaccgactggtctcacccacaaataatatggtttttttgggttttccttgcgaggaagagttaacacgccttggtaaacttgagactcctaagttctcgatcagggacattaggaacatggaaggctcatatgctgactttgacgccttatctcagaccaggaccctggacttgatgagaaagaagcataaaagtactgactggcgaattcactctctaaatgatgaacttaatttttctgacagtgattccgttgtaaagcaaactttgagatttgatttatgcaaccttctgcctgtgccgggcacagatgtcaaccttaacgaaattctggagttcaaagaaagaagagctgatgaattaataacacttcactcgtatatagatgagctttactttgaagttattaattctggtgattttgagttatctaaagctaaagcatttgatggcttcaaaagagctatagcggatttggatgcattaaactcacaaggttggagaagtccaattaaatttgatatttcttcttcctttgagttcgacctgaatcaggtgatgactgttgcaacagcaggtgtggccgccatgaacagtgagaaccccttagcgatgttaagtgttggagcggttgcctctgttctcgggggattcatcaaagttactccgaaaatgcaaagtgtattgaaggaaggaaataaaaacctttcctaccttgcaaaaggaaaggtcgaaggtgttatagctaaataa

SEQ ID NO: 267981 - DNA, 276 bp, Klebsiella pneumoniae
atgacgctggagatgatcgttggtcttgctgcgttggttatctctgctattgctggcgcttttggcctgggacatattcgcggtaccaacaaagcagaagcgaaagccgaacagcaacgcgccgaagagaacgccaccgccagcgttgccgcggctgaacggaaagaggaagccaccagagaggccagcaatgtacagcagactgttagccatatgcctgatgacgatgttgatcgggagctgcgcgaaaagtttacccgccccggtggtggttga

SEQ ID NO: 267982 - DNA, 543 bp, Klebsiella pneumoniae
atgaccagagacgaaatttttaatgccatccttggcaaagagggcggttacgtaaaccaccctgacgacaaaggcggcccaacaaactggggtattacgcaagcggtggctcgctctcatggctatacaggagatatgcggaatcttacccgccagcaggcactggatatcctgaccgctgactactggacaggcccacgatttgaccttgtttcagaagtgtctcccgccatcgcagccgaactctgcgacactggcgtaaacatgggcccggctgttcagaccaaatggtttcagcggtggctgaatgtgttcaacgttcagggaacgctctatcccgatcttattgcagatggctttatcggcccccgaactatcagcgcgttaaaaagttatctatcgcgacgtggaaaagagggcgagttggttatgctacgcgccctgaattgcagccagggtcagcgttatcttgaactggcagaacaacgcagcgcgaacgaggcgtttgtttatggctgggtaaaggaacgggtggttatatga

SEQ ID NO: 267983 - DNA, 306 bp, Klebsiella pneumoniae
atggtaacaagtgatccaagtgcgatggtcaacgctgttatttgtgcggtgatcgttatcgctcttatgttctaccagcgtggcgggtcaagacatcgtccgctgatatcactgatggcatatttcacggtgttggtgtacgccagcatccccttccgttacttattcggcctgtatcacgaatcacactggtttgtggtgctggtgaacgtcctgatttgcgctgctgttctctgggcccggggaaacgttgcgcggattattgacgccctgaggcattcacatgaccagagacgaaatttttaa

SEQ ID NO: 267984 - DNA, 396 bp, Klebsiella pneumoniae
atgtccgatcctgtttctgccacatcgatagctgccggcgggttgtttggtgccagcctgttcggcttggcaactggcattgattacggcgtggtgtttggcgctttcgccggcgcagtattctatgttgctacggcggtaaatattagtcgtcttaagctggtggcctacttcattacgtcattcatctttggcgttattggcgcaccgttgctgggctcatacttttctaagtggactggatatagtgacaggccgcttgatgcgctcggcgccgtaatcgtagcggcaattgctatcaagctgcttacttttgtgaacagccaggatttgggtagcctgtttggaattctctctcgcttacgaggtggaggagccggcaatggtaacaagtga

SEQ ID NO: 267985 - DNA, 951 bp, Klebsiella pneumoniae
gtgagccgggtagaggttatgaaagcagcacgggttacaccgtcagttaagtttatggaatttactcggatatactcttcaaaaggaaaagagcattgtgtgtcattttttgagggggaggatgctaaatactatacggtaagaataaataacattttaaacacacagcaaattacatcggtaaattgtggtggtaaaaagaatgtgataggggtgcgaaagcttattagagatcatagagattattcggatgctttctgtatgttttttgtagatcgtgactttgatgataattcagagttatcaaactggcaagatacatatgtcacgccctgttattcagtggaaaatttttacttgaatatcgaatcactttgttgtttcatgatggcagagatgaatatcagtccttatggagaagaaaaggattgttataatagagttcttgatatttaccgctcattcattagcgatgttgaacaaagattattagattttaatttatggatttatatatacaaggttaacgaaagtagagggcgatatgtagagctaaatctgaataatatcgatttagataaattggttgaatttgatggtttcgctttgagacgaatttatgggacgtgtcttgaactattccctaatgcttatgaggttgacgatgagatgttattatcggcaaggaactattttgaagatgtaaaagttcccttacttgataaacttagagggaagcaattgttagagtgtctcagaatatttctcgaggctctgaaaagagatcgtacgcaaaaaaaagataggattgtttttgagaatagaggcaacgtaaaaataatgcttacaaaaaacaatatgctttcagagtatagtcaatacgctcatactccaatatgtcttaaacaatttcttgcacaacagcctatacattattccagagcatcataa

SEQ ID NO: 267986 - DNA, 1320 bp, Klebsiella pneumoniae
atgttatcggaattttatgtgttaggtttattcggtgagcgagatgtaagaattgaatttaccgccccgtataaaatacttgttgctgaaaatggttatggtaagacgacaattcttaatcttttatatgcgacactttttggcgatgttgtgaaattaagaaagctatattttgaagagttgggtgtgtcatttttgtcgggtgaaaaaatatccattaaaaaagatgagttaaaacctgtatggaaaggtttaaaagactctcccttttttgactttatggagtctaacttaggcgagggttttattgttgagttaatcgatgatgttagaagatatccatattcgcgtatggagttatctgcgtactttcgagaggcgattgatgttttgaatgtacctaaagacgttctaaaagattttcttaggaacacaagacatgggaattatagaaagatcatcaatggtaagacagagcagaaattagatgctatacgtaagcattttccctataatcccttatatttaccaacatatcgaagggttgaagaggatataagaagtctcggtgtagatgtcgaggttaaatctttacgttattcatcaatcaactttggtatggatgatgtcaaggaaagtattactaaaattacaggtgaaatcttaagttcatccgttgagtggttttctaaaataaatggggaaatgctttctcaactggtaaatggattctcagttactgaagatatgaaaacttcaatttcagatcctaaggcggtacgtattgttttagaccgaattggagagcatatagatccacatgaaaaagataaaatacttggtttggttgaatcaggtgaaatagttaataatcatgagccactagtttattttgtagcaaaccttttaaaagtctataaacaacagcaaaaaaatgacaatgctattcagtcattcatatcagtaagtaataattatctaagggataaggagtttgtttacaacgagagcaatgtaactattgacataattagaaagaaaaatgggaatccagttgatatagatacactttcgtctggcgaaaaacaaataatttctttgttcgctatgttgtatctcaagaatgataccaatttagcaatattttttgatgaaccggagttgtcattatcaatggagtggcagaaaaccttgttgccggatatcgttaactcaggaaaatgtaatttcttattttgtacaactcactctccgttcatttttgacaatgaacttatagcaaatactacagacttatcatattacactacggagagataa

SEQ ID NO: 267987 - DNA, 2502 bp, Klebsiella pneumoniae
atgcgccacggcccggctcataccgttaccgtcgtcagcctctccatcctgctgggcggacagagcgcgctcttgcacgcccaggcgacctttaatatggatctgctggagaaaaacgaccatttgccggcagtggatctgcaacgcttcaatcagcaggcgggccagccgccaggcgcctatccggtgagctggcaggtcaacggcgtcacgctggacgcccgtaagaccgtcacgtttcgccagaacgatcgcggacagctcacgccctgccttaagccggaagatctgctgcaggccggagttaacccggccgtgctgtcccaggcgcccggcgcaacgccccgctcatgtcccgaactcaacgcgctgctgccgggcagcacggtcaatttcgattttgctcatcagcggctggtaatgaccattcctcaggcgctgatgacgcaccgggcgagggataatattccctctgcgctgtgggacgaaggtattagcgcctttcagagtaactatcgttattcaggcgccagccagcgtacccgcgagggcagcaccgagcgcgataactatctgatgttgaaaagcggcgtgaacgtcggcgcctggcgcctgcgcgccagcaatagcctgaccgctaacagcgatgataagccccagtgggcgaccagcggcgcctggcttgagcgcgacctgacgcgctggcagagtgaactgaccctcggggataccttcacgtcaggcgatgtgtttgacgcggtacagtttcagggaatatccctcgcctccagcgatgcaatgctcccggactcgcagaaaggttttgccccgaccatccgcgggattgccagaaccaacgcccaggtcacggttcggcaaaatggctacgtgctgtatcaaacctacgtcacccccggcgcgttcgtgattgacgatctttatcccaccgccagcagcggcaatcttgaggttgccgtcaaagagtcggatggcgaaatccgccgcttcacccagccgtatgcttcggtgaccagcatgcagcgcgaaggcagcctgaaatacaacctggtcgccgggcgctaccatagcgacgatgccagccagcggccgttgatgatgcagctgtcgctgatgcgcgggttcgcccataacctgacgctgtttggcggactgcagagcgcggcgcaataccataacctctcgctcggcgcaggacagggtttgggagaagccggggcgctctcgctgcagcagttaaacgcccgcgaccggcaccagcaggatccgatcgatggccgggcctggcagctccagtacagcaaaggttttgatcgtcttggcacgcagttgactttcaccggctggcgttattcgcatcagcgctatgccacgctgagcgaggcgttttccagcccgggtagcgacgacgacctgcaggatagcgacaacaaaaaagcaaccctgcaaatcaccgccagccagagcctgccgtacgatatcaccctctatctgagcctcgaccaggacagctactggtcagggggcgcctcacagcgtaccgccaatatggggatcagcagccaggttcacggtatcgcgtggtcgctcagctacagcgactcccgcagcagccacggtgacgaggaggatgacgagccgcattccgacaaagtggtgacgttgtcactttccgtgccgttgagccacctgctgccggggagctatgccggctataccctgacctcctcccgccacagcgttggcagtcagatggtcagcctcaacggcacattgctggacaatcacgcgcttagctacgccgtcagccaaacccgcgatcggcaaaacgggtccagcggcagcctgacggccgggtacagcagtggaaggggcgatctgaatctcggctacagccacgattcgcaggccgctcgtctgaactacggcgccagcgggggcattctgattcaccgccacggggtagtctttacgccggaaatgaatggcgctgtcgtcctgattgacgccggtggcgccggcggtgtgaccctcgccaaccagaaaaccatcgccaccaatggtgacgggtacgccgtgctgcccttcgccaccgcctatcaccgcaacgacgtctctctcgacagccattcgctgccggagaatgtggatctggccaacagcaccgtgacgctggtccctaccaaagacgcggtggttctggcgcgctttcacacccacgttggctataaggcgctgtttacgctgcagtcgcggggacaaccgctgccctttggcagcgaagtacgcgctaaggacaccaacagcatcgttgccagcgagggtcaggtgtacctggccggcctggcgccaaaaggcatcctttatgcgcaatgggggccgggccctcagcagcgctgtagcgcccgctacgatctcaccccgacgctggcgcagaccccccatccactcattttacagcagacgttatcatgtcctttttaa

SEQ ID NO: 267988 - DNA, 405 bp, Klebsiella pneumoniae
atgtttaacctaaccacattggaatatttgaaatgtatgggggtcggaattatcctaatcccctttgtctttgtatctatagtcatattgaaaaaaaccacaaacgagtataagaattttggtcttggttctgcttttttatttctaatctttaatattatatttttaattgctccaattggcattctcttttttacatatttagataaaggattagaggcattattaatatctttaattactttctttgttattgtatcttctgcatatatttatgaaaatatcatcaagctcactttcgtattaaggatcgatgagaaaaccttttatatattatatcatcttgcaaaggataataatgtttccatcaaagatatgattttggagaagataaaaaaagactaa

SEQ ID NO: 267989 - DNA, 837 bp, Klebsiella pneumoniae
gtgacactgcgtaaatcagccttccagagtaagggcctctcactggctggcatgttgtcaaatgttgacatctacaacctgtcaaaacctgacattcatcgccgcgccgttgcgacaaatgacgacattttagaggcgttttctgggctgcgaattgggctgcgaatcctaataaatcctaagtttttttcgcattttgcgaccagtacgcgcgagaaagttttttctgacaacactacgccagtggaaaattattccgctgtattgagtttttggagcattacgcgccagcctggggagttttcggactatttaaaaaagggcagcgcctacaggtcagaccaccagcaggaaaatcagtgttatagtcctcacgttgctgcaaaatcagcaaccgggattgagaccccgaacacactaagggcgacacagacgccgaaagcgtctttttttgtgtccaatcaccacgcacatcaaatcagcggccttgcccgtactgtatctatggtggcgtcagtggggctatcttcggataggccggtttcctttgtgtccggtagtctcaaccctgctgacgtcaccgccaatcatgacattgagacgtcaggcggtgactccttaaacacaaaggaggctgccgctatgctggctactaccccaacccaaaaaccatcatttatctggttaatcgcagcagttcgccgcgatatgccgacaattaccgccaaaattcaccatatcgccgcagagactgagcaggaagcccgccgttcactggcgcgggatcacgtttgctttttcgccggacgtattcgcacagggggcgcacatgcttaa

SEQ ID NO: 267990 - DNA, 318 bp, Klebsiella pneumoniae
atgagcctgtacaacgatttagttcgctgcgaatttggcaaaggtgccaccgttgacgagctgggcggcattcagaaccgcatggatggggctgtgagcgatttaatgctgggcgtcagtgccattggtagcctcatgttctgggcggctgatagcgatgaatacccggaggaaagcgctaaagctgatatgtacagattaggcgcaatgctgggtacggttagcgaggtggcgcgggcgctgaatgataacgctacaaacgccgcattcttgctctcaatcagtgaaaaagaagccaaagggagggcgggaaaatga

SEQ ID NO: 267991 - DNA, 786 bp, Klebsiella pneumoniae; identical to SEQ ID NO: 162827

SEQ ID NO: 267992 - DNA, 1128 bp, Klebsiella pneumoniae; identical to SEQ ID NO: 162828

SEQ ID NO: 267993 - DNA, 570 bp, Klebsiella pneumoniae; identical to SEQ ID NO: 162829

SEQ ID NO: 267994 - DNA, 396 bp, Klebsiella pneumoniae; identical to SEQ ID NO: 162830

SEQ ID NO: 267995 - DNA, 633 bp, Klebsiella pneumoniae; identical to SEQ ID NO: 162831

SEQ ID NO: 267996 - DNA, 1548 bp, Klebsiella pneumoniae; identical to SEQ ID NO: 162832

SEQ ID NO: 267997 - DNA, 804 bp, Klebsiella pneumoniae; identical to SEQ ID NO: 162833

SEQ ID NO: 267998 - DNA, 486 bp, Klebsiella pneumoniae; identical to SEQ ID NO: 162834

SEQ ID NO: 267999 - DNA, 507 bp, Klebsiella pneumoniae; identical to SEQ ID NO: 162835

SEQ ID NO: 268000 - DNA, 870 bp, Klebsiella pneumoniae; identical to SEQ ID NO: 162836

SEQ ID NO: 268001 - DNA, 1161 bp, Klebsiella pneumoniae; identical to SEQ ID NO: 205609

SEQ ID NO: 268002 - DNA, 1500 bp, Klebsiella pneumoniae
atgaatataacggattttctaaaaggctacagaaaccatccaatattatttgttggagcaggtttcagcatgagatacttatcaatttcttatagctggccggcactcttagagaaaattagtattgacctgacaaactctaatgaactatataaagatcttgtcagagaaaacagtaataaagatggtattatagaccttccaaaagtggcaacgcaattagagcaaatatttgatgcaacacttaaagcagataggaatggaaagttcaaaaatatcaatgacttatactacaactcggaagatacctcctcaaatattagcagatttaaaatctatctttcacagttagtgaatatcacagatttaaaattaggagttcaagatgaaatatctgaattagtaaaagcctccaaaaatattgcctctgtgattacaacaaactatgataattttatcgaaagtgcaattggttataaccctgtaattgggaatgatatacttttaagcaatccttatggttctgtttataaaattcacggatgcgttagcaaaccagaatccataataataactggtgatgactatgttcattttgataaaaaatatgagttgattcgtgctcaactcctatccttatttatacataacccgattatatttatggggtatagaataggtgaccctaatattaaaaaagtattaaaaacaatattttcatacataccacctcgttctaaaattgcagaaaaaataaaaaacaacttccttctgattgaaagagaagaaggcattgataatttaaacgttgtctctcacgatctcgaagtagaagatgctgggttaattagcattaataaaatcgttacagataacttctcagacatatataaagaacttgctcaactgcacttaccagtttcggtaatggatatacgcagagcagagagtgtctttggtaaaataaaggaaggcggagacataaaagtaaaacttgttggggatttggacacgctcagaaatgatgagcttgttctagccgtcggttctgttaactctataaaaatacacatgcaaacacctcaggagatgatggaaaactattttgatctaatttcaaatcaggagtcgcatgttgtcgagttgcttgacaagttcaccatcaataaaagatcatatttcccagcttatgcttttcataaattcagtccaggtgttaaatgcttaacatcattaatgaaaaatcaaaaaagattaatagcgtcaaactatgctaggttacccaagaatcaaagaatagtagaacacaccattgaagatatttacgctaaacattcagatattgatagcaaattacaaaatattattttcttcaatgctcatgatggacatatatccttggaagatttagaaaaacatgtccgagaatttaaggacaagtctcatactgattatcgcaaacttttagcattgtatgattacctcgcacacaatgtataa

SEQ ID NO: 268003 - DNA, 363 bp, Klebsiella pneumoniae
atgcaacttacccgcggcgtctggcagatgagcctggcaatgataatctccggctcgatcggcgcgttcgtgctgctctctggtttgccggtgactgatgtggtgttctggcgctgcctgattggcgcgctaaccctgctggtgtttatcgtgttaagccgccagcccttcaaccggctaacgcgtttcactctcgctctggcggtgattggcggcgcggcgctggtcgtcaactggctgctgctgtttgccgcctattcgcggatctcaatcggtatggccaccgtggtctataacacccagccgtttatgctggtactgatggggatggtgctgggggaacgggtcagcgccgtgaaatga

SEQ ID NO: 268004 - DNA, 966 bp, Klebsiella pneumoniae
atggtagaactccaagaattatttgacgtctgttatggcgtaaaccttgagttaaataaacttgtacagtctgataacggaattaatttcgtaagcagaacatccaaaaacaatggagtgtcagcaaaagttcaaaaattgaacgatatcgagccgattcctgccggagttttgaccgttgcaggaggaggttctgtactcgaaacatttttacaaactgagccgttttattcagggcgtgatttgtattatctccgtcctaaaatacatcttagcgatgctcagaagcttttctactgtgtttgcattaaagcaaatcagtataaatatagttatggtcgacaggcaaataggacgttaaaaaaccttctagttccttctattgatgaaatacctagctgggttaacaattctgacatcgaactttacaatggcgttaatcgccctaagcatgactcagaatgtactttacctattattaaaaactatatttcattaggtgaactattcactgtcaaaaatggaattgccgcaacaaatataaaagagttttctgaaccatttgaaaactcagtcttatttattaggccagcaagcacattctccaggactctcaggagttatattgacccttcatccgtggatagcgaagatatctatccagcaggaacactctttgtttcaacaaatggtgagggtagccactcctatagttatgtttcgactgataaatttgtccctaacagtgacgtatcagttttgatccctttgaaaaaaatgccattggagcttaaactgtattattcaaaatgcatttcggccaatagatatttattctcttatggaagaaaacctaagggtgacaaattaaaaaacatcaagctcccttatttcaacgcgagtgatttcgaattaatttcaaattttattaattcactgccatacagttccgtaatagattcttaa

SEQ ID NO: 268005 - DNA, 1881 bp, Klebsiella pneumoniae
atgaataacgaaagaattactgaaaatttagttagagagcttttaagaagtaaaaattacttcagtgaagataatggaattcagattgaagagcagaaaacaagagtaaaaagaattcaaactctattgaaaacagccagcaaatcccttacagggaaaccgggttatccagaattcattattacatgggatctagatccgaactttgtcattttaatagaatgtaaagcccagactaaatttcatgaaagtgcaaactgcgataatccaaaagactttgctgtagatggtgtattacattatgcaaaatatctttcgaaagatttttctgtattagccattgcagctagcggaatgacaaatgactctttaatcatttctaatttcatcgtaccgaaaggttcagacatagaaaaagatttagtaaatgagtcaggcttgattgtaaatgaaatactcacatttaatgattattatagattatcgtctttcgatccgttagttgagcgctccaggcatgaagatcttatgcggttttctaaagaattacatgaattgttatggacagccgcaaaaatatctgaagaagataaaccattacttgttagtggtacattaatcgctctaaacaataaaccttttgccaagtcatttgaatattacagttctaaagatatgccacgtaaatggctagaagctgtaaaagatgaactagactcagctgacataccgaaagcaaaaaaagatgcaataatagcttcttatgcagtagttgcaaatcaaccaaacttaggggaaccagatgctaaggtgaagaaaaactaccctaatggcgttatgtttgaagttatatctaagattaatgaaaaggtatggccctttattagtatttatcacaactttgatgttgttggccatttttatggggagtttttaaagtatactggtggtgacaaaaaagcattaggtattgttcttactccaagacatataactgagcttttttgtgatattgcaaacgtaacaaaaaaagacactgtcattgacatttgcgctggaacaggtggctttcttatttctgcaatgcaagcaatgttaaggaccgcaatctctgaagaagaacgcagccacattaaaaaatatcaactaattggcattgaaaacagtcctaagatgttttctctagcagctagtaatatgattcttcgaggtgatggtaaagcaaatttacatcaaagtagttgctttgaggactctctcaagagaagtataataaaaccagaaaaaagcaaaggtgtatgcagaccaaacattggcttacttaaccctccatttgcacaagcaaaaactgatgttgaacttcatgaattatatttcgtaaaagaaatgctcgatatgctcgtcgaaggaggcataggcgtagccatactacctgttagttgcgtcatctcagcaaaccaagccaagcatgatattttaaaatatcatacactcaaagctgtcatgtctatgcctagtgaattgttttatcccgttggtactgtaacatgcatagtagtgtttgaagctcataggcctcatttagatagtaaatcaaaaacatggtttggttactggagagatgatggctttgttaaaacttcacatatgggtagaatagatctacatcatcgttgggaaaaaattaaagagcggtggatagaatcatatagaaataaagagattcatccgggagaatcagttacagcatatgtcactgctgctgacgaatggatagcggaagcatatctagaaactgattattcaaaaataacaaaggaagatttcgaagcaacggttcgaaattatgcgatgtttaaattgattcacggtaaaaaataa

SEQ ID NO: 268006 - DNA, 921 bp, Klebsiella pneumoniae
ttggctgctgatgctggtgttttgtacactcatgtacagaatagtataaatgttgtttctttgttaaaattcatgaggcggttgaattataatctattcactcatatagcaaaaagattatatggagcagtttgggattatccatatattcccaataaagattcgttttcacatcctgtaaatgttatttataatacagtaggcggtgagccaaaaggaaaatctttcgacgatttacggtcggcagaattcatttctgttcgtgatagccgtacctttgatgcattgtctggaatccaaaatgttaagttagttccggattctgttttaatgctgtctaaggttgttactatttcggatatgttgaaaaatgtccagcatgatattgaaggatttgttctcgagaaagaattcattgtcattcaatgttgtccttataaagttacattcactgcctctgaattaagttcttgtattgacaatattgtcaatgaatatgatctcgatgtcgttttactaccgattggttatgccagtgggcatgatgacgttatcttcttaaaagatgtacatgagaaatgtaagaaaaaaacacatttattctatgatttaaatgtgtgggaaataatgtatttaattgctaattcatcatccttttatggaactagtcttcatggggtaattacggccatgtcttatagagttcctcatttttgtattaattctaaaatagaaaaacttacttcttttctgaaaacctggagtgtaagtccttataatcaggctattgattactctgatattaaaagaagtttggaacttattaccgatgaaagtaaggtcttgattgatgagaaagtaaatcttgcgcagtctattatagaagatagtttcaaagatatatataatatcattaaataa

SEQ ID NO: 268007 - DNA, 714 bp, Klebsiella pneumoniae
atgtcattatttattcaattgccagcatcagccccaccgacgataggaactatcgcaggcgccgacattgatatatttttgccattcgatgctgatgccacggagttctggaatttcaggaaggcgtctcttgttgcagcaaacaaccccagtaaatctctgacgccacatggtcagtattcgtttggcggtaacgctctaaacatcatgacaatacgtggcagcatggagacgggactggttgatacaggtgagttttccttctgcggggtagtaagtaacctgggtagcaatgcggccagcctgattattgctggtaactatcgcagcagtcccgtatcaggtgcgtcattgtataaggagcctagcggaaatttagcagtcagagctgcatcaaaaaaagtgacattatcagttcctcatgcaacctcaccgctattttttgggatatcagtgagcgcatcagcgccagcacttactattgttatcaaacaacctggttcaattgacgtatctgccgccggcagcagtttcccgagcagctatgtgtcatctacagacccggtaattatcagcaacatggctggaggcgaggccaaagagttaaacttttacgagtttgcgacgtactccagagcgctaacgttaaacgaactgaacacaaaatatcttcagtctcagatcaggatgaagggggtggggataaatatttaa

SEQ ID NO: 268008 - DNA, 1911 bp, Klebsiella pneumoniae
atggcctatattccacccgtcgggcaaacaacagaccctgatattttcctggacaacgtcaagcgggccgatcggttggttaacggccctgaggctaccgttcctgaccgtggcggggtacctctcgactcctggcggcagatgatggcgaagaatgatgaaattcgtcaaaacctgataccgctcagcaggcagtacatgacgcttgaggctgcacaggcggatattgccaatatccccgaagggagcacaacttatgtgcgtagccctgatggcggctcacttgctgatgaatacattaataacggcgggacgctgaccgccacaggtagaaaaatgccgtctcaggcatacattgatgctttcaatgaatatttttcagcaatgagcaaatatgtaaacatgatctctggatttacaggcagctcaccgtacccaatagctattagcaaggataataatattattctcggatacaatgagggaatgcaggctttgcaagggctggatatgcaaagcgcactgcagtatatctcaaatatgtccgggcttgggatgtcgaattttaaagggaattattcgagtgtgattcctatcgtggttggcaataacaacaacatcatacttggatatgatgtagcagcttcaaaaatagttggattatttcctgatatgggctccggagagcaataccctccatatatcatagagccgcttccattcaatattaaccaggtcaccattaattacataatggcatacgggcagtcattgagccttggtgttgaagctggatcgcttatttctataacccaaccgtacagtaacaaaacatttggtcgtggcgttagagggaacggcggtgatttttcttcacaaaagcctctggttgaagatgacgccaaaccgacaccagatgggtcgtctactccagaggcggaaacggtctgttcaggtatggcaaactatgccagcctgtgcgcataccgtgaaaatggcgtattgccagctgaccacgtcatatttagcagcactgcagggcatggttcgtatacgattgcgcagttatcaaaggggtcgtcatggtataattctgaatttctgaatcacatccacggagctaaaaatctaaattctgatatcgcgttgcatgcaatagcctggctccagggggaaacggattcgacaaacccgagttatacgcaagcgcagcatttagccgcattgctcaaactgcaggtggatgtaacagctgatgcccaggcaattacagggcagaccagccccgtcatgttcctgacataccagcacagctcaagagtaaaagttaatgatgcagttccgttggcccttctggaagcctgccaggtgagtgattatttttattttgtcgcgccaacgtatccattccctcacgccgcagatgggctgcatttactggcattagggtacaaatggataggggcgtattacgggagggcatataaacaagccgtgatcgacggaataaagccaaaggcaattaccccgaaaggtgtaatttggaatggcgataaagttaccgttcagttcgaggttcccaatccgccgttggtttttgatacgacaaacctggcgccgacgcaaaattatgggtttagcgtatatgctggaggcgtattacagtccatcagcagcattgaggtatctaatggcaatagcgtggtaataacattaggctcggctccaacaaccccgcctaaggtttgttatgcctttgattacctcgggtctggcctgaatatacaaaatggagcgagtggtaacttgcgagactctaacgctgatacctgtgtaatcaatggtgagcggaagccactattctacatctgccctcatttcaaattagatgcaattaccgaggaattctaa

SEQ ID NO: 268009 - DNA, 471 bp, Klebsiella pneumoniae
atgcccgtcgattttctgaccactgagcaggaacagaactacggttgttacgttgcagaacccaatgacgtgcaactggcccgctattttcatcctgatgagcgggaccttgctttcattaacctgcgacagggaaaacataaccgtctgggaatagcgcttcagctcacaacagcccgtttcctgggtacctttttgacggatttaacccagatcctgccaggcgttcagcgatttgtcgccgtgcaacttaatatcctccgcccggaaatactctctcgctatgctgaacgggacactacccaccctttaccaaccctgaatatcacgattaccgtgagcgaactccgcagtgtgagacggtccgtttggccgtgcctgatatacctaacagagagttattgcccctcagcatcagtgacagagtgcgcgccattgaaagcctgcaaaacgacacgccccgagcactga

SEQ ID NO: 268010 - DNA, 303 bp, Klebsiella pneumoniae
atggaagcaaatgaggatgatgacggctcgggcgatggtttttacgccacgcggcaaaagattttttcgttgctgggatttaaggccgtggaactctcacgggagctgcgttcagcctaccgcttgtcacccccctcttttgaacacagggacagagaaaaacgcattgaggaaaaactcaggtaccatgacggattcagcgtaaaaatacgcagaatagaacagcgtatcgcccgcaaggccaagatggctgccggtaaaatcacgcaggagaaaaaaagggactttaaagatgaggtttga

SEQ ID NO: 268011 - DNA, 741 bp, Klebsiella pneumoniae
gtgggctttgtcgttgacgctggtaatagattggttacggtcgaccactcgcataataatttttgtatcactacgccccagggaaatccggctgagatcaccttcggaacgttaaaggtaacgtctatattctcgcgaacgaagggtaagcgcgacatcagcgcccccggcgataatagtcctatgttgtatgtgttgaagggacttcacaacttacgtacacggcggcgcgacattggcatgttacatgccagtttccgtgaaattctaccaacatacgtaaatggtggctttcagtgggattggattgtttcgttaccttcatcgagcccggtttgtagccgctttgctgaacgggtttacaaactcacacagcaaggcgtttgccagcataacgcgctagttaaaataaccgccgttgaggtgctacgcagtgtcgacgctttgcatattaaagcgacggataaaaccgtacttaagacagatattttccggtttataagcacttatggcgaagaagcaccctttcaaattaaatcaattcgccgagttaagctgcgtaaacatatcaacccgctaacatgggggcgtgtatgggctacaccgccgcctaaagggattctgcttatcgatgacatggtaacttcaggagcctctttggtgaacgctgaggcgatattaaagcaccgctatccactggcgcgcatcgaggctctcactctgtttggatcatctaagtga

SEQ ID NO: 268012 - DNA, 702 bp, Klebsiella pneumoniae
gtgagtgatcaaaccctctcattaagaccccttgcctccccaacaggcgtggcaaaacataccccttgttacagcgtcacttcgcgcaggcgtcgtcgtttcttgaatcggtggattaaggcgctggcgaccgttgccgggcgcatcaaaatcaagtccgaactccgcagacgcatccggcataaccggtactgggtcaatgaagctaacaaatacggtatcgaaacgttatgcgagctgatgctggctattctcgacgatctcgatttgagagactggcagacccggcataaccttgaaacactggccgaacgtgccggtctggcaacgcacagtgacgcaggtcataagtcgatttcacgtgccagccgtggatgtgatcgcctcttctggctcaatgccattatcaccgagaaagcgcagttcaatccctatgatgcccgttgtgcgtgtaagcatatcgaggtaacagaggacttcttcgccatcctcggcataccgcttaaacaggtgtaccgcgaacgcgccaggctgcttaaggccgacccggaggaaatgattacctcatgggacagccgcctcattgctatcagggttgaaaactggaagcgcaaagcgatggcgggactcgccaggatgcaagccaagcgccaggcagctcgtgaacgcaaaaaggaatactactcaccgaccacagcctga

SEQ ID NO: 268013 - DNA, 357 bp, Klebsiella pneumoniae
atggtgccgaaacggttaaaagaagcgcgggaagccgccggtatttctcaggaaaaacttgctcaacttgttgatttagaatcggttaatagcagatcgaaaatttcaaactatgaagctggccgttttgctccctcgtttgagtttgtatgccgagtggctaaagccctaggttatcctgaatattatttctacacggtgagcgatgctacagctcaaatcctcttgcagcagcatcgggagggattccacttgcaagaaggtatcgccggtgaagtccaaaaaatggctgagcagctcgacgatgtaagaaagctggttgctgagctaaatgaatgcctgaagcaccgttcctga

SEQ ID NO: 268014 - DNA, 216 bp, Klebsiella pneumoniae
atgccgaaaagcgtaccaggcaaatcaagtacggcagtgatttacattggcaaaggccgatatcaggacctggctaaacacgcccgcgaaatcagctatctgtctgaggccaatatccgacccagtacctttctccactatctgatcgaccagttcagcgatcaggctcattccgagctgcttaagcagctgctagcagataaacagaaggagtaa

SEQ ID NO: 268015 - DNA, 222 bp, Klebsiella pneumoniae
atgcgtaaaccaagctatcacgtgtacgtcacgcaagaagttcccaccggcgagaacggcgaaaaaagcacgtactggacgaaggtaggcgcggcttttccccataacggaaaatcggggctcaatatcatgatcacgcccggtatctccgtctcaggaaagcttgtactgcttgagccgaaggatgataacgacgctccgcagggtgcccccgtcaactaa

SEQ ID NO: 268016 - DNA, 711 bp, Klebsiella pneumoniae
atgctttccacctcagcatttctggcggtggcaatgcagtgtgccgccaccgtacacccttccacatcgctcgatgtggtaagggtcgaatcaggatttaacccctacgccattgcagagatagtccccaagccagaacggcagccaggcgataagggctttatcactcacatgccaacaaataaggaggatgcgcagcgcatcgttacgcagatagaggcgaaaggtcgccgctattctgtcggactgatgcagatcaccagtaccaattttgatacctacggcgtcacggccagcgaccttttcaatccctgcaccaacctttctgtttacgaaaaaatcatcactgactgctatgagcggggcggcacccttaaacgggcgctgagctgctattactccggcaatttcaacaccgggcagcagccagagacggcgttagcgaaaacaagttacgtgcaaaggattggctattccccggataaaccgcgctatgccgtgccaggcactagtgaggacaaggtttcttcaccggcaaccctcacagcggtgccagtggaatctcccccaagccagcaagttatctggcctgccacggttgtgcgcggcgttcccgcacagctgcgacagaaaaaatcaccggctatttactaccccgcgaaggttattcgcggaagtcgagacttaaccaaaaacgaggaagacaaatga

SEQ ID NO: 268017 - DNA, 279 bp, Klebsiella pneumoniae
atgaatatgtttaaagcgctaacctgtgtttctccttcactggcagcattggcggccagtccggcatttgcggacgggtttacccgtgctaacacggttggtcaaaaaatcgctacagggctgcacgctcttgcggccatcactatcaccatcgcggtgatctggattggttacaaaaccctctggaatggcgacagccttaaaagctgtggctatatcgtcattggcgcggttctgattggcgggggcagtgaaattgccgctcttcttatgggctaa

SEQ ID NO: 268018 - DNA, 708 bp, Klebsiella pneumoniae
atgaaaactcgttttcgtgcactttttttcgtctgcatgatggcaagccccctggcaaatgccggtatccccgttctggttgatgctgacccgatgcgcgaggcggaatggctcaaagaagcgcagcgctggatggaaacggcgaagcactaccagagccagattcaggcgtataaagaccagctggcaaccgccaccggcgcgcgcgacattgctgattttgttaatcaggccaaaagcctgacagcagaccttgaaaggcttcgtaaacccggacaggcactcaatgacctgctgatgtccgggggggcttccggccagttcgatgagctgtacgagaagtacaaaatattcaacacctgcaacacaggccagtccgggagttatgcggatgtctgcaaacaggaggttatcaacaaggctgttcagctggagcagacaaacgacattcaacgggatgtagacaaaacactggcagaaatagacaggctttctaaccggatcgcactttcgaaagatttgaaggaatctcaagaccttgcaaacagcattcagctaaaatcagtcatgcttaatacgctgaccaatcaatgggaaatgagcgtaaaggctgctgaaaagcgtgaacaggtgcttaaggaagaaagaaacaagcaatggaataagcagcaactgaatgcaccaacagctgatctaaataacttatga

SEQ ID NO: 268019 - DNA, 243 bp, Klebsiella pneumoniae
atgttatcaaaaaaaacaattttagcttcatccctagcattatgttttgcggtaattgggtgtaaagaagaagctaaaacgacaaaatggtatcgggaacaccctaatgaattaaaggttgtttatgaaaaatgccaaaaatcgggagatgcatcggaaaactgcaagaacgccaatgaagcccattctcaaatcaagcaactaaatgcccccactccagatttaaacaacttagaggagtaa

SEQ ID NO: 268020 - DNA, 1188 bp, Klebsiella pneumoniae
atgagcgagctgagttatctggaaaaactgctggatggggctgaggttgagtggttatctcttgatacaataatcaaaaccgtaactgcgcgttcgaaggtaaagagcagctcttaccgtagcactggaaagcttccgattattgatcagggaatagactttatcgctggatacactgatgatggtgttattccagtagaaatgggggagtatattatttttggtgatcattcagagcatataaaatatgtgaacttccctttcgttcagggggctgatgggctaaaaatactttcttccatttctaataatgcaaaatatatatactatgcttttttaaacttttatatcaaagaatcaagttataaacggcattggtcaactgcgaaacaaaccttaatccccataccttgcccaaacaacccggaaaagtccctcgccatccagtccgaaatcgtcaggattctggataaatttaccgcccttatcgctgagcttaccgctgagcttaccgctcgcaaaagacagtacaactactatcgtgaccagttgctgagttttgaggatggtgaggttgagtggaaggcgttagggactatatgccaaattggcgatggcaatcactcatcaaagtatcctaaggcgaatgaaatgattgagcaggggatacccttcattcgtggtaccaatatggtgaatggtacaatatgcaatcaagatatgaagtacatatctaaagaaaaacacaatgaactaaaaaaggggcatttaaaagcatttgatgttttgatagctaataggggagaggttgggaaggtagcatatgttccagagggatattctggatctaatttaaactcccagttagcatggcttagagccaacccggaaattatcattaatagatatttatttttcattctttgctcatcaaccatacagaataaactttctggtgaaggaggggcattacaacaacttactatcaagaacataaaaaacattcagatacctgttccatcaataaccgttcagagcaatatcgtatcttttttggacaagttcgactcgttaaccaactcaatcagtgaaggcttgccacgtgaaattgagttgcgtcaaaagcaatacgaatactatcgggacttactgttcagcttccctaaacctgaatttgtaacaaactga

SEQ ID NO: 268021 - DNA, 258 bp, Klebsiella pneumoniae
atgaggacgataaatgctgcaccttcaactgtcggcgagattttatacgaagaattcttgaaaccattggatatgcctcccgcaagacttgctgaactgatggatacgacatatgaaaaaatttgggaaataattaaaaatgagcgagatataacccttgaagaagctactcaactctcgataattttcaacacagatgcatctttttggatgaaactgcaagagctacatgagacatggtttaataaacaaaagtaa

SEQ ID NO: 268022 - DNA, 1053 bp, Klebsiella pneumoniae
ttgaaaaatcatacaaaaatcaaggcagtggatcttttttgtggagccggggggttaacgcatggtctccagcgttcaggcatatccgtgaccgccggatatgatatcgaggaatcctgtcgttatgcgtatgaaatcaataacaacgccagatttataaaacaagatgtaactcatctttcaggaaatgatgttgcaaagtatctggctggcggcgattacaccctccttgctggatgtgcaccttgccaacccttctcaacatattccagagcaaatataaaacgaactacttcccctgacaaacgatggaaccttctggaaagctttgggcgcctgatcaatgagatcactcctgatttcgttacaatggaaaatgttcctggcttggcagaacagggagtttttaatgcgtttttagcaactcttcggcataacggttattcatttgattataaaatcgtattttgtcctgattatggaatgcctcaaactcgaaaaagattggtattaattgcatcaaaagttagcgagatatcaataataccagctacgcatactgcagataaatatgtcactgtaagagatgcgattgagcatcttcctcgcataacagcaggcgaaaaggataaagttgatcctatacatcgctcatcaattctaagccctataaacttaaagcggattcaatattcaaaacctggcggttcttggctggattggccggaagaattaagggctagctgccataggaaaatgacaggaaaaacttatccaagtgtttatggacggatgacatgggatgagccatcaccaacaattactactcaatgtaatggttatgggaatggtagatttgggcatcctgtgcaagatcgagcgatcagcctaagggaggctgcattactacaatcatttcctttagcttataagtttcatgatgatgaaaacccgctaagcgtcgctacattagctaaaatgatcggaaatgcagttccggtcaagttgggagagattattggccaaagtataattacctccttggccaaataa

SEQ ID NO: 268023 - DNA, 726 bp, Klebsiella pneumoniae
atgcaactagtaaaagatgtttttgatgaaagagttgctgatatcgagagctattttgaattggtgaataatgttgagcttgcaattggctctggaggagctatattcagcgttaatggaacaccgtaccaaataaatcctgaccagcagaagataatgtattctggaatatatcttcatttgtataatttggtcgaatcgacgatctctatgttaatagatgctgtcgaacggcacgcggcgcaaggaattaatgggcagctggttctactaactgaaaacatgaagaagctgtatgttaaatctgtagcagccccttttgaatcaataaataatgatttacggttagagaaagcgttagaactatttgaccaagtattaaatataaagcctcttgaacttaggatcccgccgggaggtggaggtaattgggacttaaaagaaatagaaaggataagtaagagtataggtgttgatatcactcttcccagagcgcttaggacaaaggtaaatgctccatttagagacgataaaggacctattcggctagttaaagaaataagaaacaaattagctcatggttctctttcatttacacaatgtggtacgaaccatgtagccagtgattttaggcggttgattgatatagtcaaagaatacttagcccatataatcctatcttatgaaaacttcataaccgcacaaggttataagattgcacaatga

SEQ ID NO: 268024 - DNA, 1050 bp, Klebsiella pneumoniae
atggaaaaggaattacagctcaaagctgatgaacaaataaaagcgtactccaaaaaaatcgatttttacacctcagaatatactgtagagatacttgcacaaaaagtgagcgctggtgagtatacggtacctgaatatcaacgcgagtatacctgggatgaaccaagaaaatgtaaatttattgagtcgctaatcataggtcttcctataccattcgtatttttctggatgaatgacgataccggaaaactagaaattgttgatggttcgcagaggcttagaacccttgatgaatattttaaaaatcgtttaacccttgatgggctagagcggctggatcttcttaatggtacaaaatttgaagatttaccattagcacgccaaagaaaaattttaaataaatctatccggggtatcatactatccgatgatacagatatggaagcaaggattgatttatttgaaaggataaacaccggtagtaaagttgctaatcctgcggaggttaggcggggggttttacgtggtccatttatggatttaattaatgaattagctgctaatgaattatttatcaaactagcgcctgtttctgcaaagcaaaaaaaagaacgagagccagaagaactagtaactagattttttgcgtactccgatgggcttgaaggatatagagatgatgtttcaccatttatatttagatatataaagagaatgaatgaatcattcaaggataatgcagatctggcccagcaatatagagagcgtttctctcggatgctatcgttcgtagaacaaagtttccgtctcggatttaagaaaacggttaaaggttcaacaacgccacgtactcgtttcgagtccatagcgataggctcgcatttagcattagaaattaatggtgcgcttcaagtaacgaaggaacaaactgacgaaatactagaaagtgatgcctttaaggctgaaattcgttctgatggtgctaacgcaataagaagattgcagggaagaattggttatattagagatgctcttttagagagggcttga

SEQ ID NO: 268025 - DNA, 204 bp, Klebsiella pneumoniae; identical to SEQ ID NO: 237949

SEQ ID NO: 268026 - DNA, 174 bp, Klebsiella pneumoniae
atgaataatactttgcagttgttctggagtggcgggctgcatatcgcgaaaatcttcatactgcacaaaaaaacatccagctggcacaagaaaaagaaaaaccaaaaaaataccatatcgcagtttaaaacgtttcaattcttgcctttctttttcatcggcctttattattaa

SEQ ID NO: 268027 - DNA, 837 bp, Klebsiella pneumoniae; identical to SEQ ID NO: 137381

SEQ ID NO: 268028 - DNA, 663 bp, Klebsiella pneumoniae
atgagtcacaatgatattgttaccccggttgctacggttgacaccagccaatgtatgatcacctcgccctggtttgttcagaatacggaatacccaccggcagtggcgacgtataagccgctggtaaacggtgaggaggcctttgcggcggtatatcgagccatcgaaaaggcgcaaaaatcggtggatattatctgctgggggtttcaaccatccatgtattttattcgtgacggacaggcgctgcgcatcggggaattgctctgtctgcttgcggaaaaacaggttcaggtgcgtatactggggtgggaggcgccgtttaataccgccggggttgtcggcgaggcaaaccttcccggaaaggggatcctgcatcttcaggatcgcgccgggcagagcgcgacagacgaacaatatgcttttgaccgcgattggtttacccgtcattcatatagtgacgatctgctggattccagcaactttttagccagcacaatcaataagcagttcaatcagtggactgtcaatcccctatttgtgggccgcgggtttaacaaagtagaacgtgcggaaatcgcctggcgggcgagatatcaggctctcgataaagggctcagtgccagcgcggtggggataatgacgctaaatagctgcgcggaatag

SEQ ID NO: 268029 - DNA, 1275 bp, Klebsiella pneumoniae
atgcgccagttaatattaattgtgatactgataacttgtatccagcacagcgcatcgtctgctaaaaaggacttatttgttaatcccctttccgatactcatgccgccctggcgtttacctgcgcacaccagattattcctgaggcgtctgctgataccgatgtcctgtttaaatatgcccgctggctgcagaaaaataacctgctgaagcaggacaaaagcgtcgatgcgcaaaccgaacgactgtaccggatagcggcggagaacgggcactataaggccagcattaatctgcagaacggtgcactgcgcgggcagttttcgctgagcagccatgagcagttccggctgagccagcaactgatcgctgccggggtggcgaccgggtactatctgaccgctatttatctggaacggggcgtcgcgggactgcagcaggatccggcgcttgccctgcggtattaccgcaaggcggcggacgagggcaatccgcaggcgcaggcatatgtgggggataagctggcgccggtggacagggcgcccgatattgcacgccagatgctacgttgtgctgctgaacagggtgatggtaaagcggcaggtgagcttggcattgatatgaaaatcaacaagcggtatcaggatgcgcttgaagctttccagttaggtgtggcggctggagacaccacctcagcgcttgctttaagtcatgggtttgatggccccgaatcttctgatgaactgtattatctggctcagcagaaggatccggaacgtgcccggcgctataaactgataacgaagatcctgagcaattattcctacgccagccccacggtcctggaaattaacgatatcgtaccgctgcccccggcgccgctgccggagtgggacggtaagctgaagtggctggaggaacgtgaggccaatatcccgccgccagcgcctgatgcgattctgatagagaaactggcgaaagcgaaacagctgaacccggcaacgggcaggccgctgccgacgtcaccggactttgagaaggacagcgtggcgcggctgcagtgccgcagcggcgagccctgcccgcaaagcggctactggcagccggcgtggcggccccgtgaagggatgagcgaacatgccatccgttacttccgcgagggagacatcatgccggtggagaaggtgaccttcgttcgcccgcgtccctggccactgcgtgacagactggtcgtggaggagcaggagacggtgtggcgccgtgtcggtgaggcgtaa

SEQ ID NO: 268030 - DNA, 294 bp, Klebsiella pneumoniae
atgattaatgtgttcaatcctatgcacccaggggagtatatccgcgaggtgtacatggagccgttcaacattcatgccgctgatctagcaaagtatcttgaggtctctccgtctacgttaagtcgaatccttaacgctaaggcagatctgagtgttgatatggcgtttcgcctgtctaaagttttaggcaggagccctgagtcttggataaatctacagacgcagtatagtctggacaaagctaggaaagaatcagcggacaatttttctgtattacgaccaattccactctga

SEQ ID NO: 268031 - DNA, 282 bp, Klebsiella pneumoniae
atggatgttcaattcaaaagtaaagcgtatgagaagttcattagcactggttcgactgctggtatcaaccagagttttgccaagaagcttcgcgctatctaccatacgttttcctcggcaatagagcttaacgatatatcttccgttaagtatcttgagtttcacgaactaaagggagacagaaaaaacgagtatgctgtcagcatcaatggtccatggagggttgtcttcaagaccgatggaaaaacggtgtatgacgttgacatagaaaactaccactga

SEQ ID NO: 268032 - DNA, 225 bp, Klebsiella pneumoniae
atggttgccgcgtattctctggtaactcagtttggtggaaaacaacaggacgtagctaaggttcttggttgctcaccatcgacggttcatcaatgggtcaaagagattggttttaaaaaagaaattgcagggctcaaacaagaacttagtgatgcaaatgaatatattgaggagttagctgaaaatcttggccttgaatatcattcagatgatcaagaagactga

SEQ ID NO: 268033 - DNA, 480 bp, Klebsiella pneumoniae; identical to SEQ ID NO: 30179

SEQ ID NO: 268034 - DNA, 483 bp, Klebsiella pneumoniae
gtgggacgtataaccacgcccgagccgttatccagctctcatcagctggctgagttcgtcagtggagagacagtcctcgatgaatggctaaaacagagaggtttaaaaaatcaagctcttggcgctgcccgaacgttcgttgtttgcaagaagggtacgaagcaagtagctggtttttactctttggccaccggtagcgttaaccatacggaagcgacaggtagtcttcggcgtaacatgccagatcctataccggtgattatactcgctcgcctggcggtagatgtctcattgtacggaaaaggggttggcgccgatttactccacgatgcagttctacggtgttatcgcgtagctgagaacattggggttcgtgcgataatggttcatgcgcttactgaagaagccaaaggtttctatgctcaccatggatttaaggcatcacaaactcatgagaggactctgtttctaaagcttccatga

SEQ ID NO: 268035 - DNA, 486 bp, Klebsiella pneumoniae; identical to SEQ ID NO: 95267

SEQ ID NO: 268036 - DNA, 267 bp, Klebsiella pneumoniae
atgaggtttttgacgaccatatgcacacgctatatcttcattttgaaatgctttaatgatattttctataaaattttcttcgggtattgcatcctgcgtcataaatatgaccacatcatattgctcaataaaatcatcgatagctttatttctagttccgccatggttgaattcaagcccggatattgttataacatcaaaatttgcgcttttcgcaatgaatgcagtattatccttactgctagaatcaataacatgaacgaataa

SEQ ID NO: 268037 - DNA, 306 bp, Klebsiella pneumoniae
gtgaactggaccggcggtaacctgctggctggcgcaacccccaaacaacagggctacctggcgaacaccgaagcggctggcgcgcaggatatccagctggttctgtctaccgacaacgccaccgcactgaccaacaaaatcatcccgggtagcggtgatcagcaaccgaaagctgttggcgatgctgctgccgtagcggatggcgcacgtttcacttactacgttggttacgccaccagtactccggataccgtcactgccggtgtggttaacagctacgcgacttacgaaattacttaccagtaa

SEQ ID NO: 268038 - DNA, 195 bp, Klebsiella pneumoniae; identical to SEQ ID NO: 210511

SEQ ID NO: 268039 - DNA, 294 bp, Klebsiella pneumoniae
atggactcggcaggcggctttgaagcgctgcatcggcgccagctggccgcagtcggtctggtcattctctaccaccaacgccatgccgctgtcgctgaggatatcgcgcagctcatccaattgctgattgtggaggaaatggccaagggagagcttcagccacagagcgttcagggtttgcgcttccgcgagcagcgtcgggagatccgggttaagctcgccgttgtcggtgaacagcgcctgcggcgcggagtagcaggccagcaggccgtggcgctcaatagtggccgctag

SEQ ID NO: 268040 - DNA, 150 bp, Klebsiella pneumoniae
gtggtgaccgacgatatcgtcgatacctgtgtggataccatcatccgtaccgcacagaccggtaaaatcggcgacggtaaaatctttgtcttcgatgtggcgcgggtcattcgtattcgtaccggcgaagaagacgacgcggcgatttaa

SEQ ID NO: 268041 - DNA, 177 bp, Klebsiella pneumoniae
atgaaaaagattgatgcgattattaaacctttcaaactggatgacgtgcgtgaagcgctggccgaagtcggcatcaccgggatgacggtaacggaagtgaaaggctttggccgccagaaagggcacaccgaactgtaccgtggtgccgagtatatggtcgattttctgcgaaagtaa

SEQ ID NO: 268042 - DNA, 1143 bp, Klebsiella pneumoniae
gtgctcacggtggacaccaccgtggcgccggtcagcgatctgcaggtgacggatgatgtggcgcagcacaccgggccgctgaccagcggcgggctgaccaatgatgcgacgccggccctgagcgggacggcggaagccggggcgacgctcactatttacgacggcagcacggtgctgggcaccgcggtggcggatgaggacgggcactggcgcttcactccggatccgctgggcgagggggagcaccgcctcagcaccacggtgaccgatgtggcagggaacaccagcggccactcgccggactttgtgctcacggtggacaccaccgtggcgccggtcagcgacctgcaggtgacggataacgtcggtgaggagcaaggggtagttagtaatggcggaataacagacgatacaactcctaccctgagtggtactgcggaaccaggatctacggtaactatttttgataaagggattcaaataggtacagcgttagttgctgaaaatgggaattggagttttacaacctcagcgttgcctaaaggcgagcattccttcacaacagttgtcactgatgaagctggtaatacaagtgattcatctcctccctttgttgtcactattgaactgatcgacgactccgatgcggatgcagactccgacagcgactctgactctgacagcgactcagactctgacagtgactcggattctgacagcgactccgattcggacagtgattccgactctgacagcgattcggactccgacagtgattcggactccgactccgactctgacagcgactcggattctgacagcgattcggattctgacagcgactctgactcggacagcgactccgactccgacagtgactccgattcggacagcgattccgacagcgacagtgactcggattccgacagcgactctgactcggacagtgattccgactccgacagcgattcggattccgacagcgattcggactctgacagtgactcggattctgacagcgattccgactccgacagtgattcggactctgacagcgactccgattcggacagcgactctgactcggacagtgattccgactctgacagcgattcggactctggattcagggggccagtctag

SEQ ID NO: 268043 - DNA, 477 bp, Klebsiella pneumoniae
atggatattgggatccagctgtttaatatcacccaccttcagctcttttccagtgctgggcatcacctgcataacgccgatggcgccgacgtggctccgtaccgactgattcagccgcgactcctggtatccctgggccgccatcagcagccagtcgacgtcataacgatcgccgtacttgcggaagacatctaccatcgcgaggaatttgcgtcgttccttattcgctgcggcatttttgacatatttagcatttttcaggtaacgcagcaggagagtattgcccagcgtggtgccctggcgattctttttgacgaagttgttcagtaccgtcagcagctgcgggctgtctttgcgtaccgcccaggcaatgtcgccgccgtcgcgcagcaccacgttgtcatggacctgaatttttggaaacacctgtttccagaacaacgctttatgctgatcgacgacgatcagcggaattag

SEQ ID NO: 268044 - DNA, 219 bp, Klebsiella pneumoniae
atggaccgtcagtttaacaccgggggttatggccttatggatgcttcaattcgttatgagctcggcaaactcgatccttctttacgcggttgcaaagtgcaactgacagcacaaaacctgctggaccgtaaagttgtcgcgggttgctattccagcgacacaggctgtttctggggtgcaggccatcaggtgattgccaaatttagttgggacttttga

SEQ ID NO: 268045 - DNA, 276 bp, Klebsiella pneumoniae; identical to SEQ ID NO: 233309

SEQ ID NO: 268046 - DNA, 456 bp, Klebsiella pneumoniae
atgacagaactttctaaagatgaagaatacggtattgtatctaagcatcttggtagcatcaccgctttaagaaaatttgcgcaaacgaaagattttgagtggctggaagaagttaaaggcaaacttgaagcgttaatcagtgagtctcgcgaagagtatgagttgaagaaacttgaggcagaagaactggagcaaaaaaggcagcaagcgcttgaatacatccgttctcttggcctcgatcctgaatcccttgcggaacctgtaacagttggtggcatcaagactaagcgcaaaaacgctaaaagtggtgcaagaaaagctaaatatcgctttaccgatgagggcgggaacgctaaggagtggtctggcaatggtaaacgtccatcagcgttgcagaagctactcgatgcaggccattctctcgatgagtatctaatcaataaagagcagccgtaa

SEQ ID NO: 268047 - DNA, 2307 bp, Klebsiella pneumoniae
atgagactgtttattgcagaaaaaccatctttagctaaagctatttttgaagggcttggaggaaatccaaatacagaaaagaaaaatggatactttcagcatggttctgatgttgttacttggtgttttggtcatatgcttgaactatgtgatccagaggattatgacgataaatacactaaatggcgattcagtgatttgccgatcaaaacgacatacccgcctacttacaaaataaaaagagaggcagaagcacaaactcgtatcatactgtcattgattgaacaagctaccagtattgttcatgctggagatccagatgaagaaggctgtttgcttgttgacgagattttaggttatgccaataacaaaaagcctgtagaacgtttattgatagctgatctcaaccttgcaccagtgcaaaagtcacttgtaaacatgcagccaaatgacaaatttaggggtatgacaaatagcgcattgtcgcgctcactgcttgatcagagcttcggttataacctaactcgcggttgtaccctcaaaggccaagagaagggctatgatggcaccctgaatgtagggcgtgtacagagcgcggttcttggtctggtgaatctgcgcacactggcaaatcagaatcatgccgaaagtttttactatgatattttcgcaacgcttgagatgaacgggcatcaggtaaaggctaaatatcaaaccacggatagtgatcagattgatgataaaaaacggctcatttcagatgcacaagcgcggcatatagctgaacgggtttcggggaaagaggcaatagtcacgatagctgccacaaaaccagaaaacactaagccaccgttgccgttagatctttcaactctccaacagatttgcgcgaaacgctacggctataaagccaaagaaactcttgaaatcatgcaggggttgtatgaaacacataaacttctaacgtacccacgcaccgataatcgctatctatcggatgaacattattatcaagctggcgatattgccgcagccatcagtgcgataatgccggaactggctacagcagccgcagatatggataagggacagaagcataaagcgtttaatgcaagcaaaattgaggctcatcacgctattgttccaaccactaagagcggtgcaggtatccagcttagcgaaaaagaaaagaacgtttatagactggtcgctacctactacatcggtttgttttggcctgatgctattcggaataaaacgaaagtacattttgatatcaaaggtgatactttctccgcgacacaaagtgttttagtgcagaaaggatgggaggcattgggtaaagacagtagcgatgatttagaatctgatgatagtgagcttacaggctttgatttatcaacactgaaatttaatgataacggcctttgtgaatctgctttagtagataagaagccagcactaccgccaaaatattttactgaatcaacgctaatcgcagcaatgaaaagtgctggaaaatttgttgatgatcctgatttgcgtaaagcgcttgaagctaaagagggaggcgggacattaggaacggaagctactcgtgctggtatattagaaaaattggcggctaatacagggctattagctattgagaaagaaaaaggttactcagagcttgtctggaaaacaactaagcaaggacaggagtattgtgctgcattacctagtgaagtggtaaaacctgatatctccgctcgttgggcagaaaaacaagctaaaatcaaagctggagagctggctgtaagtgatttcattaaggaaactgacgaatatattagtgagcttattagcgatttggataagaacggtataaatatatcatcaaatgcggctccctgccctgtatgtaataaaggctttttgcgtaaacgtaaagggcagaatggcttcttttggggatgttcatgctatcctgaatgtaaaacttcattccctgataaagatggaaaacccgtcactgacaagaagccagaaggagcaagctctcgattagagattccttgtccttcatgtggaaaagaaatactcatcaggccgaaaggttttttctgtacgggttgtgagtttaagatctggcaagaattttgtggtaaaaaattaacttcaaatcaagttgaaaaattgattaaagatggcaaatcaaatctgattaagggctttaaaaaacgtgacggtaacacgtttgataccgagcttgttttagaggataaaaagactggtaaacttggttttccagtaaagaaaaagtaa

SEQ ID NO: 268048 - DNA, 279 bp, Klebsiella pneumoniae
atgaaaacagaatcgtttaaagtcaatctggcagactggattaaacaagaagaggctgaatctggtgaaaatgcgttttaccaccctaatactgaatacttcaaagttatacgtgaaattaatcagcatgaaactgaatttatcgctaatagtggtgatttagtaaaaatggctgaaaagcattctgttacttataaccaactcaatgaagaagataaagagtttgttaattttcgcctagatgaagaaattttcttcataagttatgacgatgagtga

SEQ ID NO: 268049 - DNA, 273 bp, Klebsiella pneumoniae
atgaatcaacttaaaggtctggttgcggcacagcctgttacggtgacgtacacgcagacagaccgctacgggcgcattatcgggaacgtgttcatgacgaacggcactgaagccagccgattcatggtgcaatctggcgctgcatgggtgtatgagcgctataacacggataaggcattaccggatttgcaacgggaagctcagaagcaaaagcgcggcctgtgggctgacagtcaaccaatgccgccgtgggaatggcggcataacaaataa

SEQ ID NO: 268050 - DNA, 1863 bp, Klebsiella pneumoniae
gtgaaaaaatttaacaaacaacagtctgtatttatctttgggatcatgttggcctttacgtggttttctggttcgtttgctttctttgtcctttacttcaaccaagtgcaaaacattaaaccattgaaagcgatattcaaggcaatagacgcatataacatggactctttcatcaaaagcttggtgctgactggtgttgcagacgagataaggttgattgcatttcttgccctgtgttcaggctttgtgttgtcgttggcgataccagtaatggcattaatcaaactaaatgaggaaaaggaaaatgtgtttggtgatgcgagatttgccacgataaaagatgtaaaggagtcgaatagttttactcttgatggcgacgaaaaagagggaattattgttggccttaaagataaaaaaataattcgctatgttggagccgcttttagcgctatgggggcgggtactcgtgcaggtaaaggggcaggtatagttattactaacctgatgaaatattggtggagcgtgataatactcgaccctaagcgtgagtgtttcaacattaccagcctaatcagaagagtgattcttcgtcaggaggtgtttaaatttgacccctttagctctgtcactcaccgattcaatcctcttttttatgtcagtatgggaacaagtgaaggatttaaccagttagaaaatctcgcgctgattgtttacccgtataaaacagatggtgcagacgcgggtagttatctcaacaaaacagcagggagtttgtttaaatctcttgctgttactctttggtttatgatagcaaaggataaacaagcattaaaagagcttgacattgaacccttattttcaatgtcaaaaattaatcttctttttgaacgcgctgaccctgaaaacttactttcatttcttagtgaaatacgtggtgatttgaaaggtaaagaaaaaacactggttgatataggtgtgtctggtcttaaagcattcattgaaatggaggataaaacaaaagcacaacttaaaagcaatttccttaatggattatccccattctctaacccgaacgtggcgaaagctactgatggaaatgattttgacttacgtcaggttagaaaaaagagaatgaccgtttatttctgtatctcaggtgataatgcacgccttgccgaaaaagtgacaaacatttttttccagcttgctattcagatcaaccttgaaaagatgcctacggatgatccagagataaagcatgactgtttatttcttcttgatgagttcccgtcaattggtgctgtggattacatcaagagcaaatctggccttatcgctggctacaagctgaaattgttgattgtttatcaggttggctctcagcttgaagagatctatagctatgctggcagcaaaacgctactcgccagtgcgccatgcaaaattgtctattcagcttccgatgttaaggatgcgcgcgaactgtcagaggctatggggactaagacggtcactattggctctaaaagcaagagccgtagtcgtggcggcatgtctcgctcagagtccgagagtcttattgaacgtcctctggtaacgactaacgaactcctcacactaaaatttagtgaagaaattctcgcgatgaagggggaaaacccgattcgatgtgagaaagctttttactacatgaatgaatatttctttggcgattttattaaggtagcaccttctttggagagtgttttccctaaaaagaacggtaagttgtcaatgccacctcaaaaggtatttgaaaacgaaattgttgctaaaggctatctcgctataaaagatgttcctgatctcgatatggctgcataa

SEQ ID NO: 268051 - DNA, 1029 bp, Klebsiella pneumoniae
atgacgaataatgttgctccactgataaacaataaatctctggatttttataaacgacaagtttttcagccttatcttgatattgatggattaacagaaattgctgtaaaccgttcaggggaggtctggacggaaattaacggtgaatggtcagtgcatgatgatgagaaagtcacctttgacttttgtaagcgtttttctcagacattagcttcatttcgtggtgatgaagttggtgatacaaaacctttgctttcagcaacacttgaatcaggtgagcgtgtgcaggttgtttttcctccagcgtgtgagagaaacaccatatctattacgattagaaaaccatcaacaaggcaggtaacgcataaggaatatatagaaagaggattttacgactatgttcagtcagggaaaacgtatcatagccatgatgatacgcttcttgaactcttcaaacagaaaaaaattgcggagtttatggagttcgctgtaaaagttggcaaaaacatcgtttttgcgggcgaaacaggttcaggcaaaactacctatatgaaaagcctgattgattttattccgttaagtgcaaggctagttaccatcgaggatgcggaagaaatagagttctttattcataaaaacttcgttcatcttttttatccttcggaatctggaagtgattcaggctcaataatcaccgctgcaaagttaattaaatcttgtttaaggatgaaaccagacaggattttacttgcagaagtaaaaggtggtgacgcatgggattttatcaaagtagcgggttctggacacagaggcagcatgacgtctattcacgcaggttctgcgaaagacgccatcattcagatggtgacgaaatgttatcaaaatatggaatgccaaaacctgccatttgatgtgcttaaaaaaatcattctggacaatattgatattgttgttcatgtgggaagggatggtgttgttagacatatgagtgatatttattttaaaggggcagattgtgaaaaaatttaa

SEQ ID NO: 268052 - DNA, 1119 bp, Klebsiella pneumoniae
atgactgatataaaaaaaaccgatgatctggttgaagatgcaaatcaattgaggcaggagcaatcacagcttcataacattggtggagtaaaatctaaaaataatcgctttaaaatgggattgctgtttggttttgccacaattcttattgtggctattcttggcctgaaaatttacaaaaacttttactccgaagagcctcaagcagcatctactgtaaaggctgatgataatgcctcgcaagttggtaaggttcgtacaggtatgggacaaaattttgaccctgtagcgaacgagacaaccagcgggaatggtgcggaaacgacgagtaacaatcctgcaccaacggataagtcaacttccggccagttccagaagtatctctctattcctgtctcagggcagtcaggcagcaatagcgaacgtcaaaatagcacaggaacggttcaacaagacgaaacgagcacaagccagccaaaaccacaggctaaggctgtaactgcatcccgtatgcaggtatcagcaatcaagctagatccaaacctttatattgaagagaacaccattatcccgtgtgcactcacaacgcgctttgtttcagatgtgggcggacgtatcaattgcgtgatcacagatgatgtgtggagtgctaaccatcacacgaagctgattgagaaaggaactaaagcatttggcagttacaaaaccggtactctgaatcatggacaggggcgcatgtttattatctggaatcagttacgcacacctgattttaaaagaattgatttagtagatactgcggcagcaggtgccttgggcgaaatgggtattgatggatggattgactcacatttttgggatcgcttcggtggtgcaatgctagtagggatgattcctgatgcaatgcaagcacttagtggagcatcaaataataataaagataatcagaccgattatacagcaaacagtcgggaagcatttgccgagatagcgaaagaagcggcagcaaacagcgtgaatattccaccaactatgtacaaaaatcagggcgatatcatatctattcttgttggtgacgatattgatttttctggtgtctatcagttaaaggcaaaataa

SEQ ID NO: 268053 - DNA, 912 bp, Klebsiella pneumoniae
atggacactaaaagtttaattatcgctttaagcctgttttcacctttcttagtgaatgctgcggcagttcctcagtcgtcaggctatgacgcaaggatgcagaatgtgagttataacgctgcaaacaccactgtgattaaatcgaaaacaggttttttaacgtcaatcgtttttgacgaaggcgaagccgttataagtgctagggctggttttcctgctggttgggagattgataaagatgataacgttgtttatgtgaatcctcggcctgtggttcagcaacaagaaaatgcagaaggagagaaagaacaaaaaattttccaacctgtagctaaagagtgggacacgaatcttttcgtcagaacaacaaaaagagtgtacagcctcgatttagttatgatttctgatgaacaaaaaaatagccccgcatatgtagttaaatatagttatcctgcggaacaggcaaaattaagagcggaagaagctaaaaaaattcaaacgcaacaagaggaaataaaaaacaaaaaagttatagctaacaattttgaaagcgccgacgcaccaaagaattgggattattacatgcgagtcaatgaaaaatttgatagtcgcaggattgctcctgattttgcttatgataatggtgtttttacttacattggtttcaactcaagcaaagtgttccctgccccgtttatgtataaagatgggaaagaacaaacattgtctttcaatgttcagacgaaagggaaatataaaataatggttgttcacagtgtaaacgataagtttgttcttcgttatggtaacagtgttgttggtgtggttaatcagtcgtttgggaaaataattacagaccaaattaatacggcatcaccaaatgttgaacgtgtcgaggtgaaaaatgactga

SEQ ID NO: 268054 - DNA, 672 bp, Klebsiella pneumoniae
atgaataaaaaaattaaagagcaaattgataccgcaaaatctttcgaaactcagattcatgctgaaaacgaaaaatctaaaaaaactgcttggtgtgtggcttcggttgcatcactactggcaatttgtttgggggttgatgtcgcgattcttactcctttaaaagagaaagaactcgctattgttagcgttgacaatactactggacgaacagagttaatcacacaggtaaaacaggaacagattttacagtcagaggcgctggggcgttactttgtcgataagtatatctctttgcgagagggctataactatccttcattacaaagtgattatgaaacagtacagctatatagctctaatacggtgaaagatgattacctacgcctttttgccagtgatttagcccctgacaaagtgcataacaataacggggcttatgtagtagttgaacggttatctaacattataactgatgcaactgcaccagataggctttctacatctcgattcaaagtcattagtagaaatttcagaacagggcaagtgaccatctcctatttagctctgcgtgttacttatcgctttgatttgaagaaaagcagtgcaactaatccacttggatttactgtaaccagttatcaggcagataaagaaatcaggggggaataa

SEQ ID NO: 268055 - DNA, 135 bp, Klebsiella pneumoniae
atgaaattagaaaaattagttctattgattttcattttttcgattatcggatgttccagtaaggcaactttaccgtctgatgtctctggaaaacttgaaccaataaaccatagtcaggttattagctatgaataa

SEQ ID NO: 268056 - DNA, 1110 bp, Klebsiella pneumoniae
atggctggtcagggttttttcgttaagttcaataatacaataatggactctgtgcagaaaatcagtgactcctatcaaagccagtttgccagcgacattatgacgctggcggcggcttcggtaacattgtatgtgttgtggaaaggctatcagacgcttgcagggaaaacgcaaacaccacttcccgatctggcatgggatttaacgaagttcgccatcattattactttcataactaatgcgggaggttatttaaccagcgcaactactgcaatggaaggtattaaagacggtttatccggtggagtaagtgtttggcagacgctagataatctttgggcgagtacacagaaccttgctgaaaaaatttatcaaaaagataccgattatattcctcttgctggagcatttgggatggcgcttgtgtgggctggctcaatgattttaatggcgattagcacagtggtttatctcgccgctgatgtcacgatgaaactgctcattatcacagcacctatcttcatattctgcctgatgtttggtttcttgcgtcagatgttcaacaactggctacagttgaatttttctagcattctcacggttttatttgcctctctggtgatcagaatcggtatggattatcagggggaaattttacagcaagtatccaatgcagcaccaaacagcaacgtagttactgccggagctatggggttcatggcgggcttgttatcagcgctgttggttatgcttgcccgtatgttcgcaacacagcttgcaggtgctggcgtcgatggtgctgtgcagggtatggcaatgatggggttaggtgctgctggcgttggggcatcccgtttaggtatgtctgggggcaaggctggattcggattaatgaaagggcttacgggtaaagatgttggtaacacagcgtcaaactcaagtcgtcttggaaactttcttggtcggggaactcgttcagcgtctgaatgggctggtcaaaaaatgcaaggtgctgatgcgtgggcagggcaaaaaatacaaagcggcattaattcaatggctgatcgccgcagggcatcacttgctaaaaaaaggagtgaagcagcatga

SEQ ID NO: 268057 - DNA, 720 bp, Klebsiella pneumoniae
atgaaaaagacaaaggccgttttattctctgttctgctgtgtacttcatttttctccactgcgggtattccggttgcagttgatgcagatcctatgagggatgttcaatgggcgcaggattgggggcagaagattaaggaatggactgacactgccgcacattataaaagccagatacaggcttataaagaccaacttgctactgctacaggtgttcgtaacattgcatcgtttactaatgaattaagtaatctgcaatcagagttgacgaatatttataagcaaggggatagttatatatccagctttactaacgatcctactggctctttaagcagtgaggcacaaagtctttttaaaaagtacggtgcattcgatatgtgcaatacgggatatgccaaaaatgacaatgtatgtaaggctaaagtggtgtctaccgctgccagtatcgaacaagggaatgtaatcaataaacagttatcaaataccatgtcacagattcaatcattaagcagccgtattgaatcttctaaggatattaaagagtctcaggatttagcaaactctttacaggctcaatccctgaaaatgcaagcaatcaagatgcaatatgatgtatgggaaagcaaaaataaagctgatgcagaaatgttgaaaacgcaacaaaaagcagagtttaaacaacaacagttgcaagcggctgttcctgattttcaataa

SEQ ID NO: 268058 - DNA, 2748 bp, Klebsiella pneumoniae
atgtcgatactttataaggccatgacgcgccccgcaatgtatctgggtgtccctgtcgtcccacttactgtggtcattggggcattcttcttgtcaggggtatatgtaaacaaactggtctggttagcgatacctgtcgctattttcattttaagaatgatagcgaaacaagatgaccacatatttaacttgtttttcctgaaactaaagttgctgggaaattctgcttgtaatagatatttcggagcgagggcatttcttgcatcgcagtatgagccagttgacattgatgagttcactcaggctatgaaactaaacgaaagagtttcgctggaaaagcatatccctttttccagccatgtagataaacattttgttaaaacgaaaaatggtgattatgtcgccacatggcagctaatgggcgttagctttgaatcgttatcagaagctgcactggaagctatagattctcaggtggctactttagtccgctctttctcagggctgtctgtatcgttctataatcataccattcgtgagagtttctatgatggctttgatataaaatcaggtaataagcacgctgatattgtttctggtcgttattatgattcgctcaaggaaaataaattcaaaggtaatgctatttatttttctgttgtatatcgacctgataacaggcttgataaacttgaaaataagaaaaaaagccttaaagaaaaacaggaaagcattgatattcatatcagtaaaatgaatgatattatcaatactctttctagtggcttggataaattcacatctaatcttcttggtatgtatgaagaggacggtaacgttttttcatcacagctttcattttataattatctgttaacaggtaaacatcaaaaaatacgtgttaccaaaacacctatttacaatgtgcttggtggcgtggatgtgtttcttaatcacgatacagcacaggtgaaaagaatagatggtagccgttttttccgctctattgaaattaaagatttttccagtgaaacatcatctggtgtttatgatgcgctacatttttctgatgtagattatgtgattacccattcatttactgtaatgagtaagacagaagcattaaatgccattaagcgtacagagaaacagcttaaaagcaccgaagatgatgcagtaacacagttgcaggagcttgaaatcgcgaaaaacgatctcgttgctggggagatttcttttggctattatcattttactctaatggtgtttgccgactccattaaagaactggatgaatcagttagcaaaatatcttctgattttattgatttaggtatggttgttgtattatctacgttatctttacctgctgcttatcttgcgcagctcccagcagtatttaatctaagaccacgactatcacctatatcaaatgctaattttgttgaactggcatcgttccataacttctatcaagggaaacgcgataaaaattgctggggtgaagctctcgccattttgaaaactcctagcaaacaggcttattatttgaatcttcacaactctgtcttgtttaaggatgaagttggagagaaaaacctcgcaaatactaaaataatcggtactgcgggttcaggtaaaacaatgctgctttcatttatcgcctgtatgttacagaaatataataatccaagtacgtttgctaatagtgctagacagaaaaaaatgaccactgtttttctggataaggacagaggggcagagttatgtctccgcatgttgggcggtgaatattatacagtaaaaagcggtgagcctactggctggaatccctttgcgcttgaagcaactaaacgcaaccggatttttgtaaaacaactaatggcaatcctttgtacccgcaatggcgaaactttgacaacccgtgaaacactgctcattggtgagtctgttgatgccgtaatggattttccagcaggggaaatgcgggaatatggcatatctcgtatgcttgagcacctcatgcagaaagcagaccgtgatgagcaggaaaacgggatcattctacgtttgtcacagtgggctaatggtaacgcgaatggctgggtattcgataatgcgcaggacactttcaatattcagcatgtaaacaattttggtattgatggtacggagttccttgatgatccagttgtgtgtgcgcctatcaccttctacttgctgtatcgcattactcagcttctagatggtcgccgtcttgtcatcttcctagatgaattctggaaatggctacaggatgaagcatttagcgattttgtttataacaagctaaaaactattcgtaagttaaatgggcttgttattccagcgacacaatcacctgatgaaattttgaaaaacaaaatttcacgagcagtagtcgaagtttgtagtaccagtatttatcttgctaaccctgatgctgattttgatgattatgtaaatgggcttaaatgtacgccggaagaatttaatatcattaaaaatcttgatccaatgtccagacagtttttgattaaaaaaagcagtctgaaaaaaggtgatggtaaggcattttcggcattggctactctggatttatcaggacttggtggatatttaaaaatcctatcagccagcgccgacaatttagaagtgttcgaaaatatttatcgcaatagtatgtctcctgatgattggattcctacatatcttgagcaagcaatttag

SEQ ID NO: 268059 - DNA, 327 bp, Klebsiella pneumoniae
atgtctattaagaagactttccaaaacggtgtaagtgcgtgtgtttcagctatcaacatgcgcaaaactagctttgcggcctcgattgctggggcaactatcgcatcaccggctttcgctgatgggttctctaaagcagaaagcctgttggagaaggttcagacggggctaagtggcctgtctattgttacggtcacaattgcctgtttatgggttggctataaggtgttattcggtggcagtaccattcgtgaatgctcacctatcatcattggcgcgatcgtcattgccagtgccgccgaagtcgcctctatgatggttggttaa

SEQ ID NO: 268060 - DNA, 627 bp, Klebsiella pneumoniae
atggcagggattttacctagtttgcttttgtgcgcggcctcggtgcaccctgatacaatcaatgatgttgctcgcgttgaaagtgggtttaatccatttgctattgcagaaattatcccaaaagcagaacgtgatgaatcaggtaaaactgtcattacacacttaccatcatcgaaagaagatgcactcgaagttatacgtgagatagagaataaaaaaagacggtattccgtaggattgatgcagattaccagtacaaatttttcattattcaatacatcggcggaaaaactcttatcaccatgcgaaaacctatcggttttcgaaaaaattattgttgattgttatcagaggggaggggatttagaaaacgctcttagttgctattactctggtaatttttcaactggtaaaagaaaagagtcagagtttagttataccagttacatagaaagaattggttataaaaacgattctaacaaatatcttgttccaagcacaaagaacgaaaggggagatagtggcatagggaaaactcacagcaaaaaaaaatcagtaatttatccagaatcaattcttaaatcagcttttgtcgataacgccataccgacaaaaatcatcaattaa

SEQ ID NO: 268061 - DNA, 216 bp, Klebsiella pneumoniae
atgctaagaatcatgatgttagtttcattattggctttgagtgggtgcggcgaggaaaccaagagtgttgattggtggcggaatcatccagaagatgccttgaaaaaggccgatgagtgcaagaaatccggtgctgatacggataactgtaaaaatgtgaaagctgctcttttcagaaataaacagcaagacgcacccattcccaccttcaactaa

SEQ ID NO: 268062 - DNA, 267 bp, Klebsiella pneumoniae
atgactagggacgatgctatccgtatttcccggctacatcaaattttcacagaggaacagttgagtgatcatcagaaagacattgcgatgatgtacgcaattggtagcacaatcgaagaaattgcagacgaaaaaggcataaagccgataactgtaagaaatcatcttgatgtggtgagacatacgttaggtgatgttactttgtctggtattcgtacagtagtattcttacgggtgctgtcagtttttttggttaatcatgtataa

SEQ ID NO: 268063 - DNA, 1230 bp, Klebsiella pneumoniae
atgggcgtatttgttgagaatgaatatagaacaaaacgagcaaaaagctcagataaagcaagccagccagcaaaactaacaggtcgtcaaagtcatgccagtaaatccgcatttaaccataaagctcaacatggttcggataaaaaatcatacggttcaaccccatcaaaagaagtgacttttaaaataactggttcaggtaaaactgttgcaggtataaaaaatggagttgattacataacgcgagaaggtgagcttgaggcttactgttatgatggtaatggtattgaagtttctggaaaaggtgacgactttaataaagagtttacagtcactcttgcgaagggaaacgattatgataaaaagtaccgtggtgaaaatattgatcatgtaaaaaacatggtcttttccccgcctccagatgctaaagtaagccgagaggatgcgttaaaagcaacagcagagtttttaaaagaaagctatcctaatcatgcatttgtagcagtctatcatgatgataaagaaaagcacccacatgtgcatgttaacttcaaacttaaaaacgaagatacagaaaagcgtttaaggttgactaaggacgaaacaaaaaaatttaggcaaggattttatagaaaacttgaaggcatgggttatgatgttgcggcaacatggaagaaagatccagaacgtaaacgtgaggttgaaaggctacaggccgagaaccctaagcgattgaggaacgtttacaaggtagtcgaatttggcgaaactgcttatcagaacaaagcaggtgaaaagagaactccctatctgacctatgaaacccttaaaggtggtaagcaggtaacgatttggggcaaagatttgaaaagccactttgaatcagaaaagttgcaggctggcacgttagttaaaataaaaaaattgtcaccaacgcgagtccgtagcccgatgtttaatgatgatggttccgttgctggttacagagagagtcaacgtagtaactggcaaatagagaacatagggattgagcgtaacagagaacgtgagataccaaaggcaataaccaaccagccagatgataaagcggttaaacaacagattgaacggaagaatgagcgctctcgtaacattggatttgcgcttgaaaatggttttacgaaggattcaactgaacataagaagcaaaagcaggagcaggaaagaggttggaaagggttcggtttttaa

SEQ ID NO: 268064 - DNA, 504 bp, Klebsiella pneumoniae
atgaaacaagtaaaattcaggctagatgatgatgagtatgagcttgctaaagttaatgctgccgtctgtggtgttaacagtgtcaacgtttttgcaaagcgtaaggtgcttgaagttgagacaacacctctatcaattcatgtatcagataagccagcaaaagccgtttttacctatctttatcctcatgaaattgaaattttaaaacgtaatgcagcattgcatggcatgagtatgagtcgtgagatagcaatcagagtaaggcagtctttattaaaaaatgaagtttgcctttatcctgatgaaataaaagacttgaaaaaactaaccactgcaattgaccgcataggccgtaatatacattttatcataaaaggcgaaagattttgtacggtaaatgatccggattttagaaaggaagtagttgaggttattggattatttcagtctattgattcagctttagagactttaaccaaaagcgttgttaacaggttcgggtga

SEQ ID NO: 268065 - DNA, 126 bp, Klebsiella pneumoniae
atgaaaaatgaattatatgaaaaagaatacgaggaatattttaattccttgaaagaaggtgatgaggtgttaaatttaaaagaatttatagagtgcatatacagtaaaaaggaggtggaaaactaa

SEQ ID NO: 268066 - DNA, 180 bp, Klebsiella pneumoniae
atgaaaagaaagaaaccgtttgatatagctagttttcatgaatcagtaaaaagggattacgacactggtttaatcacactggaacaagccgctattgaattttacaagggtaattggacaccatacatagacatagaatacacaaagaaaaagttaggagtaaaatgctatgaaaaatga

SEQ ID NO: 268067 - DNA, 237 bp, Klebsiella pneumoniae
gtgataactgataatacgccggaaaacattaaaaaactacgtgaaaaattagggattacgcaaactgaatgcggaaaactctttggtgtaggtttaagaacatggcaaaaaaaagaggaagctaaaacccataaccgtttgagcttatcaaaaggggagtttgaatatcttcttttaatggctggggagcatcctgattttgttttagaaaagagaaaaaaaactgaaaaagaataa

SEQ ID NO: 268068 - DNA, 261 bp, Klebsiella pneumoniae
atgagaaaaaacaaaggagatattacctactatcttgaggaaaacgcaggtgtataccatttcgtaaaaaagattaagactcgttcaaaactcatgaccgaaggtaaaagtaaaattactaaaaaaatgttaagtgagttttatttcgttgaaaatgaatttaacttgattgattttaccactaatggtttaagagtggtcgataaagaaattatcattacaatgattaaagaaattaaggagagtgatcgtgataactga

SEQ ID NO: 268069 - DNA, 543 bp, Klebsiella pneumoniae
atgaaatcattctttgaacgttggcaaccagtttttgaaatcgtgtgtcgtatcctagggaatgggtggcgcgttaaccttcttgatgattgccagtaccgtataaaacttacatccccgaagtttaagaattactctgtacatatacggaatgaaaaagagagactttcaatcgtgggaagcgtggatagtcgcaattggcgtagtccatgctattcctgcaccgtatcactatttcgtaatcctgttgagatagccgccgatattgagaggaaaattttagcaaatgccctgcaagatgtggaaaaggcgcttgaatgcgaaaagaacatacaggcagaacgggaacaaaaacggattctgaaagggatgttatcgcaacttgtacagcttgaaaactggtacggaacgttaacaggcttcaaagtggaaaatggattgaacggacaaataaccgagcatggtgatggctatggttttcttgttcgtggcttgagtttggatcaacttattacactaactggaatggtgaaacagctatga

SEQ ID NO: 268070 - DNA, 516 bp, Klebsiella pneumoniae
atgaatatccaagaagcattaaatatttttggtctatctggcgatctgacagaaaaagacattaagacagcatataaaaaagctgctttaaaatatcatccagatcgtaatccattgggcgcagaactgatgaaagccgtaaacgctgcttttgatttcctgatggctaacattgataaaatcaatcagtttcaaagtgctgatgaaaacgcccgatatgactacagtgaagaattggagaaagtgttgaatgttctttctggattatctggagtggtttacgaagtcattggtaactggatctggatcagtggtgacaccaaagaacataaagacactctaaaagaaatggggtgcaagtgggcagcaaagaaaaaacagtggttctatcgtcctgaagaacacaaaagccgctgtaatcgtaaagaacacagcattgatgaaatccgtgagatgtatggcacagccggacaacacaaagcgaaaggctggaggaaggtagaagcaagcgcataa

SEQ ID NO: 268071 - DNA, 861 bp, Klebsiella pneumoniae
atgaataaaacatcactttcaaggctgaccaaagttcgacataggaatgagttaaattctactctttccactttgccgatggcggccaaaaaagttttgtttttggctatgagtcaaatcaattcaaaaaacgaatttgatgatgaccatatattttatgttaatgcctccgattatactaaatgggttaatgttaaacctgatgctgcatatcttgctcttaaagatggtgcaaatatattggatagtgttgttttaaaattaagaaacgatgaaattctagatttaagcagtgagttaaatctcccattcacatctaaaaacgtacctgattcattgaacttgagccttactgaattttcggcatattataagaatgaaggtcgagtcggcataaaattcactaacactgcgaaaagatttttatgcaaattagttggttctgaaaaaaggtatacaactcaagttcttttatccgtagtgagactttctagtgtaaactcatcttcgttgtatcaactaatcaggaaaatacatagcaataatccaagaatcatgtcttttgaaatgtctgttgatgaactgaaagaagaacttaatttatatactatagactctcacggaaataaagaatacaaatatccagaattcccagcttttaaaagggatgtgttaaataagtctgttaaagagattataaaaaatactgagattaaggaactgagttttgaagtttctgggaaaataggaaggaaagttaacacattgaaattcacttattcattagaatctacagagttgccaaatgaagatagtgagtttttagatatgtttgataaaaaattcccgcctattgattag

SEQ ID NO: 268072 - DNA, 525 bp, Klebsiella pneumoniae
atgtttaaacgtaataagcagaaagtaattgaaccaactaataatgtagtcattccatcaagcgttaacgtttttagtgatttcatcagcaataaccctcaatattcgagcaatgcttttatagcaattggtgaggttgattgttttaataagattcatctgctttctgaatcagaggctgagtttttaggtgttctttcacgtaatattatacctgattattcagtatacccaaaggtaaggctaattgaatttgtacgtccttatggcagtgatgatgcaataaaagaattgattgtcgaggttcaaaatatcacatgtgattatgtgataacgtcatatgatgatggtgtacttgcagtggttcagttcggtgatgctgctacagtaaggcagcaaaagaaacggctagtgattaagcgtgtatgtgagatgtccggcatttcattctatgtattcaagaatacacttgaaatgatgagtgatgaatcatttgcctctttactgaaagatgatgaagaataa

SEQ ID NO: 268073 - DNA, 627 bp, Klebsiella pneumoniae
atgtcatcattaatattttataccgacgaaatacaagcggtagtagcgacagatacacttgctgttgataatgggaagcctattgcttttgtaagtaagtcaggctttatacctcacttaaaaaccatcgtagctggcactggagcaggtggctttgcaaataagtggttacttgaagcatcaacaaggatggttgtgcggggcatccaaaatttggattttcacactccaaaagcacttaatagactttggttagactataaaaaagaattttctctgcctgatgaatttacaacaacagtctatcaatttggtatttgtgaagaaactggtaaaaccgtatcgtatgcatatcgttcaactaacgattttaaatctgaatcattaggatatgggacaggagtaaaaccagattgcacaatacttgaaggtaacttagttgacataataccaacaatgatgaatgagcagagatacctagaatcaaaaaaaccagtacatgaaagaatatatattggaggagaaataatattgtatcatttaacagaaaaaggatgtaattgttttaaaattggcgagtttgatgattataaaactcagcaagataatttactttcaaacttttag

SEQ ID NO: 268074 - DNA, 663 bp, Klebsiella pneumoniae
atgggtaaaattttactggtagtatcagacaaaggcggtgttgggaaaagcacctacgtagctaatacggcctctatgctggtaaacaaaggcaagtcggttatcgttctgaaaacagacaaaaacaaagacatgttgagttggagtgaaaagcgtcaggcaaatggcctgttacccgtccctgtgcatgaggcatacgggaatgtaaccaaggagataagccgcctaagcaaactctgtgaagtactgatcgtggattgtccagggcatgatagccatgagttccgtagcgctctaaccgtatcagacatcatggttacactagtaaaaccttcatctgactttgaaagtgaaaccctaacaagcgtaacggaaaaagtcagaatagctcaaaagactaacggaaatcttcaaccgtgggtattaatgacgcgcattaatccaagcaaaccacgtcacacacagaaagccatagaactagacaaaatactccgttcagacagcatctggattcaaccattaaagacaagaatagccgagttggatgtattcgaaaacgcatgtaacgaaggggcaggggtgcatgatgtagctcgtgcttccagccttaacaatgcaaaagcacagctcgaattagttggtatggaattaggaattgtttaa

SEQ ID NO: 268075 - DNA, 696 bp, Klebsiella pneumoniae
gtgaacgaatataagattaagcatcataaactaatcaggtcggtattgaataatttcaatgccgactttttttttgctaactctatttatttcggagggggaactcgtattgcccttgaaatagatgagtatagagaatcgatcgatgttgattttttgtgccctgataaatcatcttatcgagccgtacgggaacaggttacatccaactcacttggcaacttagtaaaacaagacttccagtatgccagagaaataatgtttgatagatatggagttcgcaccttcataaaagaacaggacgcaacgataaagcttgagatagttagtttcgataactacgatttagtagctgatacgcgcaagttgttccctattcctttcatagatcaagaaagctgtttttatactaaattattagcaaattcagatagatgtatgcatgggcagtgtaaggatatttttgatattttggctatgtatgatgcgtggggaggcataccacaaagcgcaatcacaaaggccgaaaaacattatggttcttctgttttaagcgatctaatccgctcgcttaaagatatacaaaccaatagtgctcattattatgagcttgccgatgctatgttaattcaacatgattttgctcaaaaactcattggtgatgttgctccacaggtactagcaaatctatcttaa

SEQ ID NO: 268076 - DNA, 207 bp, Klebsiella pneumoniae; identical to SEQ ID NO: 148822

SEQ ID NO: 268077 - DNA, 813 bp, Klebsiella pneumoniae
atgggaggggcggaatttaaagtccttactccacaacaagaaccgcgtttagcacgacttgagcctagcgctgtcgttagggtttacagaaaagattttattacatccaacgaaatacaatttcctgaaaaactcttttttgaggatgttctgtttcacgctaaatgtgtattgaacgcaaaaaaaatcgctcttttgaataaaacgcttctgctctatcgagtaaaccgtgaggggcagacgaccggttctttcggaaaaaaaagaagggatgtactcaaagttattgatctcattatatccgattattctaaaatgaaagtgaccaatgatatttgggctaatctcgttaggcttttaataaggatgaatgtttggtgcagtgaaaattgtgcttatcaggataaggctgattttgtaaaggaatcaatctctttgttttccaagctcccaaagaatgtgcttgagatttacatgaatgaatattcatataacgattgggaaataaagttgtgtaaagccttcatagaaagaaatgaaaaggttttgaatgttagcgctgaaggtggttatcccatctttgataatgttcatgaatcattacacccagaagaaaatcaagtttctttagtttctattgatgggaagctagaacatcttttctctcagcaaaaggaggggtgggcacacgaccgatttaatgttttgaatggtaaattagaaagcttgattgctcagaataaagaattatacgaaaagttagagcataagcgttcaatttcatctctcattaataaaatttttaaaggataa

SEQ ID NO: 268078 - DNA, 126 bp, Klebsiella pneumoniae
atgagttatatgccatacgaaacctacgtaaatgaaaatacgatgaaggcttattgtgttgtgacgattactaatgaaaggttgtgtaaaacagtacataaggactttatgtcagattttaaatga

SEQ ID NO: 268079 - DNA, 1749 bp, Klebsiella pneumoniae; identical to SEQ ID NO: 233344

SEQ ID NO: 268080 - DNA, 498 bp, Klebsiella pneumoniae
atgaagtttgagttggtaaaagcgttggccccggcgctgttgctgatggcgctggccgccgcgttggatggcgtctgcgccttgctgctggcggcagcggtggcgaactggcagcaaaatcccggccattggctagggctgctggcgctggctacgcctctcttgctgacggtgcagtatgcggcggccacccgcggtttcttcgccggcggcgcggtgatgagcgcgttgctgcgggcgctgttccgccgtctgccgcgcgcgctgtcgccgcaggagcaggcaccgggtctgttggccggggccatcggtcagacgatgtcggcacccgcgcacctgctggcgccgttggttggcgcggtcgccacgccgctggcgctgatcgccgggctggcctgcctgagcccgggagtggcgctgatgctgctggcggcctgcgtgctgttgatgctggtgttgcgcggttcggcggcccggctgcaccggcgagagcgatag

SEQ ID NO: 268081 - DNA, 543 bp, Klebsiella pneumoniae; identical to SEQ ID NO: 236673

SEQ ID NO: 268082 - DNA, 246 bp, Klebsiella pneumoniae; identical to SEQ ID NO: 233363

SEQ ID NO: 268083 - DNA, 381 bp, Klebsiella pneumoniae
atgctgggagcggtggaacgccgcttcggcaacgagcttccggcgtctccagtagagtggctgacggataatggttcatgctaccgggctaatgaaacacggcagtttgcccggatgttggggcttgaaccgaagaacacggcggtgcggtgtccggagagtaacggcatagcagagagcttcgtgaaaacgataaagcgtgactacatcagtatcatgcctaaaccagacgggttaacggcagcaaagaaccttgcagaggcgttcgagcattataacgaatggcatccgcatagtgcactgggttatcgcttgccacgggaatatctacggcagcaggccagtaatgggttaagtgataacaggtgtctggaaatatag

SEQ ID NO: 268084 - DNA, 1230 bp, Klebsiella pneumoniae
atgaccagcctgcttgatgtgctgaaagaggcggacctgaggattggattcagtgatcattttaaaagcgtcgcagaccgggagaatctcgacagacaaagccttcagcaacgtttactgctttgcctttacggtatggggaccaatacgggcttaaaacgagtcagcggtgggcgccatgggatcagttacaaagagcttctgaatgtgcggcgtcgctatgtacataaagccgcgttgcgtaatgcgattagtcaggttgcccgggcgatttttgctgttcgtaatcctgccgtctggggtgaagggacaacatcctgtgcttcggattccaaaaaatttggctcctgggatcaaaatctgatgacggaatggcatatccggtatggcggccgtggcgtcatgatttactggcatgtggaaaagaaatccacctgcatttactcccagctcaagcgttgctcttcttctgaagtcgccgccatgatagagggtgttttacgccactgtactgatatggatatcgagcgacagtacgtcgacagccacgggcagagtgaagttgcttttgctttctcatatttgctcggttttgacctgctaccgcgccttaaggctatcgccagccagaaactctatcgtaccggtgatgaaaaaaacggagattattcaaatctggaccccgtgttaacccgcaccattaactgggaactcatcattcagcagtacgatgagatgattaaatacgcaacagcgttaaaacagggaaccgcagaaccagaagccattttacgccggtttaccaggaacaacgttcagcatccgacttataaggctctggcggagctggggaaagcaataaaaaccattttcttatgccggtatattggctccgaagatcttcgcattgagataaatgaagggctgaacgtagtggaaaactggaatagtgcaaatgcgttcattttttatggtaaaggcggagaggtggcgacaaaccgtctggaagagcaggagttgtctgttctggcgctgcatctgttgcagatttgcctggtctacgtgaacacgctgatgatccagcaggtactccatgagcccgtatggctgtcacgaatgaaggcagaagacttcagagcactgacaccgctgatttacgctcatgtaaacccctatgggatatttgagcttgatatggaaacaaggttaccgatcgacgtggttgcctga

SEQ ID NO: 268085 - DNA, 192 bp, Klebsiella pneumoniae
atgaaaatcagtaagatagttgcattctccctgacaatggcttcgactccggctctggcatttcaggcgaaagatacgactggttcagatctttcaggaaagcagttgcgcgcaacagaagacagcatcatcagtaacttttacagccagcatagcaggcagtttcagacgacgactggctttgttgaataa

SEQ ID NO: 268086 - DNA, 648 bp, Klebsiella pneumoniae
atggatcgcccggaatggatagccgttgatacccatgcgaaaggcagcgtgtattgcacgctcaccaacaattccgatcgcggtaaagagggcaaagccccggttgacgcagccaacccgcgcgccaacaaccagttcggccatatcatgcactggcgcgaagagagggcagaccccgcctcagcgaaatttacgtggaatattctggtgctcgccgggcgtactgacagtgacgatcctaaagcgaaaggctccatgcagggggcagaattcggcagccctgatgggctctccttcgatcaccgcggcgtgctgtggatccagactgatgtttcctccagtacgattaataaaaaggcgtatgaagggatggggaataaccagatgatagcgaccctgcccggcaccaatgagtatcgccgctttttgaccgggccacgcgggtgtgaaattaccggtatcgcctttacgccggacaaccgtacgctgtttattaatatccagcatcccggcgaaggcggcgacgacattaccgatccgagcaaccctcgggctatctccaactggccagattcaagatcagacggacgaccacgttcttcaacagtcgttatcactaaatcgaatggcgggataatcggtacctga

SEQ ID NO: 268087 - DNA, 2628 bp, Klebsiella pneumoniae
atgagtgacgccgcttcaatagcatgggcgtggaacgctaaacggcaggccattaacccaaaccacgtcgctgatcctgaaattgagtatctcaccccaaaaggcgagcggaagacgctcgcctatggtgatctcgttgatgcggtttaccgttaccccatgcgcccgcgcgaaggggaggcgcgagaagcatttgaccgtaaaggtcgcgccagatacctccgccgccgggtacaaacgctcccggcatttatccgtaagcgtttcgcccagcaccttgaaaacctagaacgcaacaagccaaaagatgcggtgcgttggttgttcggtaccttcgagcgtcatgttttacgccgtattgatgcggtgaatgcgcaatacctgcctcaaagcaacctgcccgcaatccttatcccgctgcgagatgaattccatctgctgccgtgggccgacaaaaagcgcctgaaacgactggcctataagctcgccaacctgatgaaaagcgagtttatgcgcgagtttgattttcagtatgagaaaactgccgatgtcgagttttccacgctttacgcatacggctttatcgccagcaaggcgacagcgctcaatattgcgatcccgggctgggataaatattgcgatgaatcacttcaggccgaagatgcactgcgtgctattgcgcgccttcagaaagaaaaatggtggctgagtaaaatccgccgtatccacgaccgctggcgcgaacacctcatgatcgcaacgggttatgtcagcaaggtggcatcgccgtattgctccgatccctgcttcagggagtgggtagcccagaagaaagcaaaccttgaatttcttaatgcgatggagctggaagaccaggacaccggcgagcgtagttctttgctggataaggtcatgggtagcgtatctaatccgaagatcgcgcgccatgagctgatggtacgcatgcgcgggtttgaagatatggctaacgaaatgggcctggtcggcatgttctacaccttgactgcgccgtcgcgttatcactcaacgcatgtgcaatccgggaagcgaaacgataaataccgcgacgccagcccgcgcaaaactcagaaatacctctgcaaagtatggtcgcgcgtccgtgccaaatgggggcgcgaaaaaattcgcacctttggttttcgtgttgccgaaccgcatcatgatggaaccccacactggcacctgttgttattcctgcgaccagcagaggctgagtacgccacagctattttccgcaaacatgcgctgcgtgaagacggtggcgagccaggcgctcaagagcaccgttttaccgtcacgccgattgatgaaaaatttggctcagcgacggggtacatcgcgaaatacatctcaaagaatatcgacggttacggcatggatggcgagttagacgacgagtccggccagccagtcaaagagatggcaaagcgcgttagggcgtgggcttctcgttggagcattcgccagtttcagcagattggtggcgctcccgttactacctggcgcgagctgcgccggttgggtagccgtgagctggtattgcatccggaacttgaagcggcccgcgcggcagctgatgcgccggactggccgggatacaccaacgcccagggcggcccatttgttccgcgagattgcctgcgcgttcgcctcaactacgaatacaccgaggatggcaatgattatggtgacacggtcgccaaaatcactggtatctattgcccgtattcgggcggtgattctgtcattttcacccgcaccaccgattacaagattgtgccgaagcgtaagccgtcgccggtcgagaatttgaccttagaaggccgcgcagcggcccctcggagttctgtcaataactgtacggggcgctctgcttcggatggaaaaccaccgtcagaaacggcggtgacagctgataaaacggcgccagacgacagttcagtgacaggacttccgctgaatatcgaagacttaaggcgatattcacgccagcaaaggcaggagatcacctccaggctgaaaaaaaccggtagcgaaagctcagatcaagccttcgtgcgcactgcgcgaggtcttcgcacgtctgttgatgatgaaaccgcgctgacatgggggccaaaagttaccgccgcgaaagatatgagcctgacgccggaagaggcagagcagcgctggcgggagcagctgcggatcgaggccgagcggcgcgcgaataactacgccgcagcagttgcggaataccagaggaaaaaggccgaagccgcactgcgccaggcgcagcaaaaagaagcattgcagaagaacggcattccagaagaggtgatcgactgtatcggcgcgcagctgcgtagctgtcggattttcgtcagtgatgacgttgtgcggtcaatcgccgccggtgctcgcgttcgccacggtggcgggatgttggcggcggacggtggccggttgcgtgaggtgaaggtgtggcgcgcaggcgagaaagataaaccaacttccgaatatatggcggtgtgtgacctggtcacgcgctggaagaaggcggccaaacaaaaggccaaaactgaagttaaggggaaaaaatga

SEQ ID NO: 268088 - DNA, 1305 bp, Klebsiella pneumoniae
atgagtgtatttttatctcaaaaacatccaacatcatcattttatcttttacatacacgttactgggaattatcgtttggttcattagctgctgtaggtgtatttcaggggagtaaaaaacaaatatatagggaggtattatctctcgtcggtttattgatgatattggttgctgttttttcatttacacccacaactatttttccttcctataatgcgttgttgcctgtgttgggggcaactcttataattcttaatgcggagcatacaactgttgggaaacttttatcatttcgaccattagtttttattggcgggatatcatattctctttatttatggcactggcctataattgtatttgcaaacgataaatattttgttgatataaaacttactaaagaaatgatcgtaatactttcagtattaattgcatgggtttctatgaagtacatcgaaactccctttaggaataaaaaaacttatagcagaaaggggatatttaaatatttcaccgtttcatattttattattgcttgttgctctctggccatttggccattgaatggatggtctggtaggcttagtcctcaaaaagagaatatattatccttcactaaggatattagtccggttagaaaccaatgccacttcaatgacggtgttccggagacgtcgcaatactgtatattaggtcaaggcaataaaattcctcatgttttcgtgtggggggatagccatggcgcagaaatagcctatgcgttgtcatcgttgactccgttagttacggctacgtattcagcttgcccccctgcttatgcatttaatactgaatctcgaccagattgcataactcataacaaaaaagttatgaattatctcttaaataataaaaatattaaggatgtcgttttagctgcaaattataatttgtatggaagtgataaagacatcgagtcttttgtcaagggctttgagaaaactattgagctattaacccggtctggtaagcatgttattgtgttagatcaagttccatctccaggagtgaatgtcccatacaccttaacaaatgtagatgtagtagtgaataaagaatttagatacaatgacaaggtttttagaaaaataaagttaacggatggtgttgatttattttcttacgaaaaatacttatgtgctggcgagtcgtgcccaatgatgtataataattttccgatatcttttgatgataatcatttatcattgtctgttgcaaaaataatggtgaaatatattaagcgtgatttattgctgaccgagtga

SEQ ID NO: 268089 - DNA, 1149 bp, Klebsiella pneumoniae
gtgctgactggctttgccggggcggtgggtattgccagcattgctgccagttttatcctcggccccctggcaaaactccgcctgattctcagcatgatcggcatctcatcaattaccgcgaccagcggtatttcgacgctcggcatggcgttctcaggcttaagagtcatccttgcttcactgctggggatccccggcctgattctagcggcgttcataaccgctggcctgctcatctggcgatactgggaaccgattaaggcgtttttctccgggctgtttaccgggatcagccaggggctttccccactgattcagtcattttcttttctggtgccactgtttgatgccatcagcgccggggtggcgaaagtctggggctggttcagccagttatttacaccgattgatttttcccgcgatgcgctggacaaatgcgccagcgccgggaaaacatttggcgaggtgctgggtaccgctcttaatctgctttttaccccgcttcgcttgctgaccgaaggggtcagcttgttgcttgaaaagctggggctaatcccttcagggattgacgctgcgcgggctaaggccaacaacctcgaacctaaaaaaccgacgtcgtgggagtgggatccgaagcaaaagaaaatggttcaaaaagcgtgggactggtcacctaaaaaatcagattccccggttaccgcaggcgccccgcccgctccctcgccactgtccggcaataccggcacgttacgccgcctgaatagcattgcggataacacgaaggcgaccgctgacaacacgaaggaagcacgtaaaaagattggccctggcgacatcatttttaaaaacctgcctcgtgcgctggccttgcgcggcgcctatcaggagatgcggatctcaccgcaggcagtaccgcgcgttgcagctccggcggcaggcggcattctctccgttccctcaacgacacaaggcccgctgtcggcgcccgtttccgccccgacaagtggtgcgccagtgtttaacctggtctttaacgaagtcggccagcattcggcgcgggatctggaaagaatggtcaggaatgccgttcgcgatgcaatggccagcaccaacagaagtaaccgtggctcgttccgcgacagagattag

SEQ ID NO: 268090 - DNA, 237 bp, Klebsiella pneumoniae; identical to SEQ ID NO: 225973

SEQ ID NO: 268091 - DNA, 219 bp, Klebsiella pneumoniae; identical to SEQ ID NO: 179125

SEQ ID NO: 268092 - DNA, 720 bp, Klebsiella pneumoniae; identical to SEQ ID NO: 230858

SEQ ID NO: 268093 - DNA, 351 bp, Klebsiella pneumoniae
atgagcatcgagcagggttgcaaccaggtcgcggtgatcgtccagggtaaatggcttgccgtaggcagtgaagttagctgtcttgctggctggaatgtagggggggtcgcagtaaataaccgcgtcatatgccagctgcataacgtaagggatggtgtgacgaaaatcgccatcaatgaaaacggcttttgtgtcgttggccttttcggcaaagcggcgcatctcgtcagccggaaagtaaggtgcgccatatttcccgaacgggacgttatgatcacccatctgattgacgcgatatatcccgttaaagcaatgtcggttcagatacagaaacaaagcggcataaagtaa

SEQ ID NO: 268094 - DNA, 327 bp, Klebsiella pneumoniae
gtgtacacccgtaccgcccagattctggctgacagtatcgccgaggcgcaatttaccaccgttgacagcccgctcaccccggcgaacgtgaaagacgtggtaagcggtattaacgccaaacttcaggcactcgtcacggctggcaagctgattggtgcggcgtgctggtttgatatcgtcgataacccaaccactggcctgcgccagggtaaggctgtcgtgcgctacaactacagcccggtaccgccgctggaagatttaacgctgatccagactttcaccgatcagtattacgaaccggcttttgcatcgctgggaggtgcgtaa

SEQ ID NO: 268095 - DNA, 327 bp, Klebsiella pneumoniae
gtgtacacccgtaccgctcagatcctggcggacagtatcgccgaggcgcaatttaccactgttgacagtccactcaccccggcgaacgtgaaagacgtggtaagtggtattaacgccaaacttcaggcactcgtcacagcgggcaagctgattggtgcggcgtgctggtttgatatcgtcgataacccgaccactggcctgcgccagggtaaggctgtcgtgcgctacaactacagcccggttcctccgctggaagatttaactctgatccagaccttcaccgatcagtattacgaaccggcttttgcatcgctgggaggtgcgtaa

SEQ ID NO: 268096 - DNA, 156 bp, Klebsiella pneumoniae
atgactgagcgtcagaaatttatggcagcgattgaaagcctgtgcggcggccggaatgccagatttgttctgcacgactgggaattgtatttccgccttggctatcgggcgcacaatgcaggtgaggcgttcagggaggcaattcaatgcgagtaa

SEQ ID NO: 268097 - DNA, 300 bp, Klebsiella pneumoniae
atgccattttcagcgaaaaaagagataacaatcaatcgttcgactcagtcaggggtaggtctgccaagtgaagtttcagtaattgatgcgctctttaaggtaacagctatcactgtcactggtgcatctgtaaccgcgactgttatggtgagctatgactcggggtatacatataatttttatgggaatgagccggtttctatcgacggactggatgtggagctgctgacactagctgagaaggagttatgtgataggaataaagattatatctttacggacgccattggtatcaaatga

SEQ ID NO: 268098 - DNA, 648 bp, Klebsiella pneumoniae
atggttgagcagagaacggcgctggccaaccagcttcgttctctgctcgctgaatatggcttcactattcctgtctggatcctgcgtctccagcaacagctaccggagctgattgaagatgcctcaaacagcctgacattcactcttcgtcggctgctgtcctcgctgcgggaagatatgcaggcattaaatgaacgaattaccagtctggataacgaaattgcagcgctgtcatcacaacaaaccgcgtaccgccatctattaacaatcccgggcgtaggtcccctgattgcagcagcgtttctcagcgaagttgatgccacacagttctcgagtgggcgagaattatccgcctggtgcggcctggttccccgccagcacagttcgggcggaaaacagcgtctgtcttctgtgacaaaaaatggcaaccggagtctgagaactctcattattcatggtgcgcggtctgtaatgcgctgtctgaaaaagcgcgatgatagtctgagtatttggctgcaaaggctggaggcccgtcgagggttcctgaaaaccacggttgcgctggcgaataagctgacgagaattatctggcgtgttttgaccgatggtattgattttaatatgcagaaggccgttgcgatgagctga

SEQ ID NO: 268099 - DNA, 1965 bp, Klebsiella pneumoniae
atgagtattaacaatacggttaggtatcgtagtgatatcgatggcttgagagcggtagcaatattacttgttgttttttttcattctgggttgacattttttagcggagggtttgtaggcgtcgatgttttttttgttatatcagggtttttaataggtggcataataaataaagaagtgacacaaggtcgcttcagctattctaatttctatacgcgaagaataaaacggattgccccggcattaatagtaatgttagttttgtgcgcgatcttctcatattactttttatccccagaagaattgagggatttttctaaatacacaatagctacgttactgtcagttccaaatattgcattatggaaaggtgttgattacttttctacaaattctgagctaaacccattactgatgacgtggtctctcggggtggaggaacaattttatatatttctcccaataatattcaccttatgctttgccaggcacatagacctctttaaagcgactttatttataacattatcgtcttttgtactgtgcgccgtagcaacctatattaaaccactaccttcgttttatctcttgccgaccagagcatgggagatgggcgtgggagtattactatcattaaaataccaaaaaattgccttttctaaaatagttcagaaacataatgactttttatttggggttggctctgcttgcattcttgtgccagcagtgttattcaacgactctacggtttttcctggatatatggcggcgtttccggtacttggtgcagcgctggttatactttccgagggaagggtaagtaaagtttttcttagcaacagagttttggtgtttattggtctcatatcctattcatggtacctgtggcattggcctcttttgagctttgcaaggattgcatacaacgaaccttttcctgcatttaaaggtgttttaatttcaactgtctctttggttattgcttatttttcatataagtttgttgaaattccattcaggaagaaaaatctgtttacaaataaaaagatcatcacaggctatttagttacggtagctataatatcagcaccaatgcttgcctgcttcgtgacggtaggtcttccatatagagtgaatgaggctgtgcttgccgctgaagctagtagaagcaacagcattgctgatcgttgccttgtggctgacactgataaactacctgattttccagaatgcatgcctgcaggaagcagcgatgctgtagctctattaggagatagccatgcagcagcgctgagaggtggggtagatcattatgccaacctcaaaggattggctgtataccagttaacaaaatcttcatgtcctaacctcattgatacaccccgttatttagggaaaaatccagagcatgctacgttatgtaataatttcaaccagaaagcaattgagtatataaatagtaaagcaaatattaaaacagtaattatagctgctttttgggatgcaggtatagacaataaagaaaaggaaatgggttaccatcaggtgtctggtagaaatacagacgataatttgattgcattaagattggggcttgaaaagacgataagcaatcttaaggaaaatggtaaagaggtaatacttgttaaggacgttccattctttaaatttgatgtggttaaagaggttgttaataacaacatagagtttaggcatttcgtaggcgaacttctaatggctaaccatgatttgagtggttactctgaaagattcgagtcaaagttagaaagtgtagatttagttcttgatgagttactttctaaaaatataaaaataattgaccctcataatgctctgtgcaatgaatcagaatgcgagtacatgaaggaaaataatgcgctttattacgatgggcagcatttaaataaatttggagctatcgaggcattgaagagtctttattaa

SEQ ID NO: 268100 - DNA, 456 bp, Klebsiella pneumoniae
atgacgaccatcaccacaccacgcctttcgcttacccgctttgttaccgatgactggcccttttttctgcgcctgcgccaggatccgcaggtgatgcgttttatgggggaggtgttaagcgaggaggcgctgggcgatattgggctccgcatcagtccgaaaaatccgcacgaagctgacgtcggctacgcgctgctgcctcaggctcagggaaaaggctatgccagcgaagcgctgcgggcggtctgcgagtatggtttcaccaccctgggggtgcaggccatcaatgcctgggtgctgggtgaaaaccgtggctcatcgcgcctgctggagaagcaaggctttgtgcgcacccaggtgctggagaaagcctatcatctgaacggcgtcgattacgatgactggatctatcggctggagcgggaagctcatccggcgtccgcagacgccggatga

SEQ ID NO: 268101 - DNA, 489 bp, Klebsiella pneumoniae
atgtcacaactgacccatattaacgccgcgggtgaagcccatatggtcgatgtctccggcaaagcggaaacggtgcgcgaagcgcgcgccgaggcttatgtcgaaatgcaggcgacgaccctggcgatgattatcgacggcagccaccataaaggcgacgtgtttgccaccgcgcgtatcgccgggatccaggcggccaaacgcacctgggagctgatcccgctgtgtcatccgctgatgctcagcaaagtggaagtcaatctgcaggcgcagccggaacataaccgggtgcgcattgaatcgctctgccgactcaccggtaaaaccggcgttgagatggaagcattgaccgccgcctcggttgccgcgctgaccatttacgatatgtgcaaagcggtgcagaaggatatggtgattggcccggtgcgcctgctggcgaaaagcggcggcaagtccggcgattttaaggtgggtgaatgccatgattaa

SEQ ID NO: 268102 - DNA, 990 bp, Klebsiella pneumoniae
atgactatttcacctgatgagttaatggatagcttacaactgaaagaaaaagagttggatctaatcattggtgggccaccttgccaaggtttttcatctcataggataaaaaatgctggtgttaatgatccaagaaacgaattacttattcgctactatgattttgtaaaaatttttcagcctaagatgtttcttgttgaaaatgtgccaggtttgctttgggaaaaacataaagactatttaaacaactttaaaaggcttgccgctaatagtggatataatatcttgggtccattaaagttgaatgcaaaagattatggagttcctcaaaacagaaaccgggtatttatcttaggtctcagagatgatatttctatcagcgatggtgattggccaccttccccaactcatttcaaagataaaaaaccttattgggttaatgcttctgaaatctttgaaaaacctacaccttctattattgaaaaaattactgctgttttagggcaagatgtcgtacagaaattaaaatttaaaaatacgcttaaagaaaataaaagtgatccaaataatattcatatgaatcatgctgattatatgattgaaagatttagtttgacaccaattaatggcagtcgggaagatgttgattttagattgccttgtcattcgaatggctatgttggtcataaagatgtatatggtcggataaggctatcattacctggcccaacaataacgactggttgttttaatccttcaaagggccgtttcctacatccgtgggacaaccatggaattactgtaaggcaggcggctagatttcaaacattccccgatgattacattttttctggagggatcattagccaagggaaacaggtgggaaatgctgttcctgtaaatctggggaaaattcttctgaaatcttgtgttgaaataataatcaataactctcatagggatgataaaaatgcagatgagatctcttag

SEQ ID NO: 268103 - DNA, 1746 bp, Klebsiella pneumoniae
atggctataacaacttataattcccttgtgcagaaaactttttgtgataatgctattcgttcggtcgtaatgatagatgacgattttattacttattctgactctattaaagcacttaacagtgagatgaaactagacccagcaaaaattgattcctcaaagcgtgctgctactctcgaagaatattttcaagccaagaatatgatctgtgatattgataacggttcggtaaactttgatgttgaccgcatccgtaagtcagatttggttataatggactatcatttagataacagtgcaccagataaaactattacaattttaaaagaattaaaaaattcagatcatttgaatatgattgttatttatacgagagaggagctcaaaactgtttggatgcaaattgcttcttctctaagagggatcgaaaattgtaatgataaaatacttgaaacagaaaatgatgaattaattgaatactggcagagtgttattttacctgatttgattcacaaaggagaaagggcattaacgagggatgaaactgtactatatatccaaaatgactgcctatgtaagcgtattaagaaagcaatccgagatgatggaagccttacagagcaaaatgatattaatttcattgctaagatgatttctgaatatgcagtcgctgaaaatgccgtcattccagattatgtgacaaaaagtatggttgtaggggatactgccggtattaaatggattcaaagtggtaatatatttatcagtgtgttccataaggataaagatgatcatgaaagtgatggtgagagaatttggcaaacactaaatgaatcattaattgaatggaacccatcttactatcaaattatcaagtcagagattcaaaatactattgaagccgaagcactttctttcaataaccatttagctaatgatggttatggtcaagctggatggttgaatcaaatattaaattccgcttctgatgaaattaaaaggaaaaacattgagtttgtttttagtaatttatctgaagaactctatgaaagattgaagggaaataaatctttagtaggcttcattaatgatgtttttgaaacatatacaactgattttaaaagtagtggagaagcgaaatcattagagtattgttcaaaacaaatgaatttacctgcaaatgcaagctcatttaatgagatgtatcatgctttgaacatgaatctgtcttctaaaaattttgaagaaggacatatttcgacaggtacaattttcttcgatactgaatctgaaaaatggtatttatgtgtttctgctgcctgcgatcttgtgcctactcagggtaatgatccacatcataaaagattaagtcctcatcgtttaattaaggtgttagaacttttcaatgctaaccagaataaagcattacctaatgcagaacaatccaagtatatttatgtaattcataagaataccagaaagtatttatctatatttgaaggcgataaaactttaccagtagttgattatatggttgttttaaatcacggccataccgttccgggggaagagaaaaatatactttcagcggtattcttgagtagcatggatgacaacgtacaaaatgtaccagttaaactgaaattaaagtcccagcttcgaagtggttatgctgaacgataccaagctattgcgtcgcaatacagttctagaattggtgtagattatgtatctatgatgccttaa

SEQ ID NO: 268104 - DNA, 123 bp, Klebsiella pneumoniae
atgcgaaaagcacgattcaccgaacaccagatcatcgccgttctcaagtccgttgaagccggacgtaccgtcagggatgtctgccgcgaagccggtatttctgaagccagctattacaactag

SEQ ID NO: 268105 - DNA, 1134 bp, Klebsiella pneumoniae
atgtcagactcaactatcaaaaactatggtgtaatactccgcattggagcaggattcagcatcatcctgatgatgctcactgccatttttatctggttttatctaacgtggattgaccgtctagatttattccttcaaactgttacttttaatgagctattttccttctctggaattatatttttaattagcattataatgttctgtggcgtactgtttctaccttgtttgtttggatgcctcgttttacatagtaataaaaataataccaagacaaagcaaaataaaattcttctggcacgcgtctatgctggaaattcttttctatgtataacttttgtcttattaatatctttatttgacatagactcagtagaattcacagtcatagccttaatgttattgactggcatttctactatttttattgtattaattcttcagagaaaatgcatacacaatcatctgaagtcactgaacacaataaaaaagataaaagtactacttttagattattcaacaaaaccctttctcttgggaatcaattgctggctagtagtcttcccaatgacattattgagcaaattcttacacatccaaaatggaatggatgactatcagcaaatctcattattccttgcatacggcacattagtaataataatcaatatgtttccatgcttcttttttttacgacaagatttctctggagggtggtttaaacctgtgagaaatactgcaggtgttgttttcgctttattaatactgtcatcaaccttcatgcacgtcattcccttactgattgttaacatggcatttcggatgactgggatgacgatcatggatcctgttataatttctatcaaaacggatgaaattccttctgaaatgcttcatagtagaggatggaagtatcagctctctgaggataaaaaatttagcttagtatcaggagttatctttttttcatatggcggagtttatcttgtctgtcctaaagaaactgccaaaaaatttcgtgaaagcataatcttcgacatactttctgaagaaatagaaaaaaaggctagagaagaaataaaaaaatcagcccagcaatgtattgcagtggataaaagcgttttaaaattttaa

SEQ ID NO: 268106 - DNA, 231 bp, Klebsiella pneumoniae
atgcctgtattgctgataatgttaataatcattatcttgctacaggagtgtttattaccatgcatcaagttaagatttttaactgtgggttcggtatttttattcaaggttctgccgcagactcttctgatttacatgcttcgtctttattacttgatcataatgataataatttatatatcaaactcggtcaaagagataaatttatgggagaacttcatgtttatataa

SEQ ID NO: 268107 - DNA, 618 bp, Klebsiella pneumoniae
atgcataagacgtttcttagttatcatcatgctaacgaacaagatctcaaagatgagattattgatttattcggaggagaatcgtttattgataagtcggtaagtgatggtgatattagtacaactaacactgatgaaacaataatgaggactattcgtgaggattttttaaaagactcaacggttactgtcgttcttattggaacggaaaccaaaaatcgtccatttataaactctgaaattcaagcatcactctggggagaaaactataatggtctaattggtgttatcagagatgaaatttacgacagtgtgtttactcctgcagtatgtgcagatccatcatgcggatgttctataagtctaagaacgccaggttggggatatgattattatttgccttatctggttagaaagaatcatgtttatgaaaaaacagttccccattataatgactctgacgtatattgtgcattggtaaaatactctgtctttattaaaaatcctgagtattatattgatcaggcatttaacaagcgtaagttgatggaaccagctgctaaacgaaatccatcggatgttcctgcaattcgcagctcatcaatttttaactggtaa

SEQ ID NO: 268108 - DNA, 732 bp, Klebsiella pneumoniae
atgtacagattgtgggttttatggggttgtatctttgttcttctacttattatcatggggtgcattccgttttcaccgtttgaaaaatggtggtttatagttaatttcatgtcaaatgtaagcataattcgtgcttttctatcagtattaatactatttttagttgcttatatcttgctggtcggtgcatttcatcaaagatattcattgagattggagcaacttagttttggtggtattaatattttactaaataagtctgatcttctttttaaaaagagcgtaaaaaattatctggatacgaagcgaacattatttaaatttgatccgaattatgactcaattgaagaagttttaaactcatattatgagtgctataaattcattagagatgaaatgaaattactagatgtgaagaaaaaaagagataaaaaactgtatttactttcaaatgaaattttgaaaacgttaaactcttttttaacaaagcatcaaaataattatcggagatggcataaatatgtttcagataatgataaagtgaccacaaaggatagagaccctaacggcgaatttatatcactgccgtatcatttaacccctataagtactatacaaaagcattattatcattttagtcaagtattggaaggttttaaagaagtaaacgatttcttcaatgataaggtagtcaaagagtttgatataaatgttgataaatggagtgaataa

SEQ ID NO: 268109 - DNA, 252 bp, Klebsiella pneumoniae
gtgctcggcatacatctgatcctcaacggggcgcagcgctttcaggaaggcgtcaaattcctccgtccagttttcccccgccaggcggaaaatccccttcagataatgggcgtccaccggacggttatgctcctcctgccaagccagcagatcccggatgatgtccagctgggtgcgcagggccgggagagtggccatcctgttccaaccgtgcagaaaggcttccttggcatggaccaggatgaagcgtag

SEQ ID NO: 268110 - DNA, 591 bp, Klebsiella pneumoniae
atgaatgatattgttaaattgggagaaattgcagacatacgtttaggtatgccgtttaaaacggctataaacgaccttggtgataaaggtaaatgctatttaatccaaactaaagatattgatacagaagggcttttacgtatggattctcttgccagagtatcccctccagttgaccctgaaaaacattatcttcaagatggggacattcttctacgccttcgggggccagttttttcagcctgcatctttaggaaaacaaaagcattgccgggcattacgagtaatcaaaatgccataataaagtgcaaaaaaaacagtatattacctgactatttaaggtggtatattaattcatcttttggacaggcctattttaatgaggtgagtgaaggtactaatattactaaaattaatttaaaaaccctttctaatatgaaaattgagctgccatctctagatagtcaaattagtatttctcgaataataaataactgggaaaatcaaagggatatacatagaagaattgttgataatggtaatttattatatcagcaagtttgcattaacttacttacagaaggtgattaa

SEQ ID NO: 268111 - DNA, 1482 bp, Klebsiella pneumoniae
gtgattaaagttaatgaaaaagaaattaaggaaattgttggggaggttttaaatgttttcagagggcgtttagatactacgtcttccttttattatattcttcctttaatatttcttaaatatatatccgatctaaattataaaatgaaaatggatggggtagcttacgaacactcaagaataaaagaagcattatctaatgtccctgaagatatgagtttctattctatttattctgacatcagagagggatctattggtgaaagaattaatagagcgttgcatttctatgatgatgttatttttcattcattctataaatgtgatagatcaatatttaatgatatagactacacatctgatagacttggatcgagaaaagatagagatgttttattaagtgatttattgcatgctctcaattctgaagggtttcaattcaataattataataatggaacaccaagtatagagttaatatgcaaagcgttattcgaaaaaatagcatttgaaacaaatgcaaggggtagtgacttttatacaccatatggtgtttcggcgttgttatctgagttggttttacccgtggagggtgattcgatttatgatcctgcctgtgggtcaggctcccttttgttaagcactatccagaaaataccgaatagtaataaactacaggactataaggtatatggacaagaaattttaaaatcctcatggaatatttcgtatattaatatgttcttacatggagtttacgaatgtgaaataaaatggggagatgtctttattaatccacaatttcaagatcataaaggagaattggaaaaatttgatgttgtagtttcaaatccaccattctctgtgtccaattgggggtatgaagaagcttctagagacaggtttggtcgttttgctctaggaatgcctccacaatccaaggctgattatgcatttatcttgcatatgattgcttctatgagggatcacacaggtagaatggcagttgtggtcccacatggcgttttatttcgaggcggaaatgaagctctgattcgacaaaatttaattaagaaaaatttattagacgcagttattggccttcctgaacgtttgtttgcctcaactaatatagcaaccgttattttaatatttagaaagaacaaagtggattcaaacgttttgtttatagattcaacgatgctttttgaaaattcaaaagggcggaactatataacagacgagaatatcaaaaaaatatcagaggttttctacgaaagacaaggtttagataatttttcccatgttgcctgtttaagtgagattgaggctaatgactataaccttaatattactagatatgttaaacgtacagagaaagtccaggatatggatctgtattctttaattgatgagcaaaataaattacaagaagagttgagttttttagaaaaagaaatgaaatcatacatccgtttttaa

SEQ ID NO: 268112 - DNA, 1344 bp, Klebsiella pneumoniae
atgaatggcacagtagaaatgcaggctgagaaaataattcctaagggttacaagctaacggaagctggggtaataccagaagattgggatgtacgtaaaattggagatatagccgaagtcattcgcggagccagccctagacccaaaggagataagcgtttctatggtggaaatatacctaggttaatggtcgaggatgttacacgagacggtaaatatgtaacaccttcagttgattcattaactgaagctggcgcaaaactgagtcggccatgcgacaaaggaactttaactctagtttgctcagggactgttggaatcccttcaatattggctgtcaatgcttgtattcacgatggttttctaggccttactaaagttaaaaaatcagtatcaatagattacctatatcatttctttacaacccaacaggaaaaattcaacaattcggctacacatggcggagtatttaccaatctcactacagatggagtcaaggagtttttacttgctcttccgcgtaataaaaacgaacaaatcgccattgccaattttctttcggataccgatacattcattactgaacttgaacaattaatcatcaaaaaacagtccatcaaaaccgccaccatgcagcaactactgactggtcgtactcggctgacacaatttgctcaatatcccaatggcaccattaagaactataagtccagtgagttaggactaatacctgaggattgggaagtcgctcgtctagcacaggtggcaaaagtgatagatccacatcctagccacagagctccaccagaggagtcttatggtgttcctttcgtaggcattggtgatttgaatgaatcaggtgaactaatcaattctgaagtaagaagagttaatcaaagcattcttcaagaacattcagaaagatataccttacataatcaacctataggtcttggtagggttgcttcgattggtaaagtcatccgtttacgtctaggtaaagagccttatgctatttcaccaacattaggtgtaattgatggtttcgcctgcactaatgattttttattttattatttgaaatcagagtctgtaacagagcagtttagccgggtgatgagcggttccactagatcctctgttggtatgaacgtcctaaaagagatattagtcgtaaaaatatcaaatgaagaacaaatctccatcgctgccattctctcagatatggatgctgaactcaaagcgctagagcaaaagctcgcaaaattccgtgctataaagcaaggaatgatgcaacaactgctgactgggcgtatccgtttaccgttggaacagcagccatga

SEQ ID NO: 268113 - DNA, 150 bp, Klebsiella pneumoniae
atgaatacattaattgctattatattgtataacaaagaaatagaaaactctctaactattaatagcttattgaataactcatatcaaaattatgacctggttttaattaataatggtcctaatagaataaattataatattttcaaataa

SEQ ID NO: 268114 - DNA, 912 bp, Klebsiella pneumoniae
atgaaatattttatagcaatacctacttataatggcggtgaactctggcgctcaaccgtgctatatataaaaaaatatgcacctcaggatgcgcagatttgcatcatagattcaagtagtaaggatgatacggttcttttagctaaaaatgctggatttgcaatatctacgatcccaagcgttgaatttaatcatggcggaacgcgcaataaagctatattagatttcggtagtaatagcgatattgttattttcttaacgcaagatgctgtaccaaaagctggttttattgaggctattcttgctgcgtttgaaaatgagcaagtcgtctgtgcatatggtcgacaattaccccacgatgatgctaatccaattgcaaagcatgctagatattttaattatccatcccaaagctatacttgtggtatctctgatatacctcgaatgggtttgaaaactgtatttatgtctaattctttctcggcatataggttaacggcattcagagaactaggtggttttccgtctgatacaatactttgtgaagatatgtattatacagcgaaagccgttttggctggttataaagttgcatatgtccatgacgctttagttgcacactctcataactatagcccacttgaggaattcaaacgctattttgacatcggagtgtttcatacagatgagccgtggattcgcaaagcttttgggggagctggaggtgagggtaaaaagtttatcctttcggaaatattctttttgttgagaaataatccattatggatacctgttgcttgtatcaataacttaatgaaatttttgggatacaaaatcggccaaaaatataaaaatataccattaagtataattaaaaagtttagtatgcatacacgttattggaaagattga

SEQ ID NO: 268115 - DNA, 1080 bp, Klebsiella pneumoniae
atgagtaaaaagatactttttgttacaatgcacttgcctagtgtttccgttcccgaggcgggtcagaagctagcttattcacgtctatgtagcctttcagaaaaaaataatgcgaaagatattgatttaatagctatttataatgaaagggaggagtcttatattaatttggctgattatcagcgattgaattcgactaatcttctaaaaattactaatgttagaaggcttattaattttttatctaatttttacctgcctattaatatagcagcaaaaactgactctagaataaagtcgttagtaaaatgcaaagagtatgattatattcatatcgaatttgaacaaggtatatcaaatattcctgtggaattatggtctaaatgtaatctagttttgcatgatgtgctctcacaatcattatatagattctatataagagagaagagttttttaaaaaaaattatctattattttagatataagcaaatgatttcttgggaacgaaaagtatttaatcgggcaggtgaaatcaccgtgcttaatgataaagataaggacatagttaaaacgatcatcaattggaaaaatgttagaataaatgttgactaccccaaagtttcaggagtattccatgatgttaatcgaaacaacgtaacattaaataacattattttttggggggcaatgaatcgtaaggaaaatattgatgctgttttttggtttctaaatgagatatttcctcttataattaaaaaaataccggactcaactttttatatagtaggagccaatccaccagaagaaatagttcagatgcagtcggaaaagatactggtaacagggtttgttgaatcacctattcctttttttgagaaagcggccttatcggttgtaccacttcgttttggtgctggtataaaattaaaagtgttggaaactttaacggcaaaaatacctactttagctactgatgttggtgctgaaggtatagataatataaatgggtgtctttttgtcgaaaatgaacctgaaaaatttgcagctcaagctgttaaaattttagaaagcaggagttag

SEQ ID NO: 268116 - DNA, 714 bp, Klebsiella pneumoniae
atggatcctaataggattgaagtgagggtcttatccgcctttaaaaaatatcttagtaggttggttactggttacgttggcattagttcttttattaaggatctgcatttaacggcaggtttttttaaaaaagcttcaagtgcaagaatttataatcctgtagttataagtgaacatactgaaagtaatatagaaaaaaataagcatgtgaaatcaataggtttcataggtcgattatctgaggagaaaggatttgacatattctgtgacattgcttctgcaaatagtcatcgttataaatttttagctgctggaggatttaccaattcaaatgataaagagaaatttgatgggtcatatagcgatgttattcgcttacttggtattgttgaacttgaagatttcttaaagcaagttgatgcggttatacttcctgttaaatggaatgagccttttggtcgggtaattgtagagtgtgctaaggcgaataaatttgttcttacatcacccaaaggaggaattactgagcttaatgagttttttccaaatgtttacctttcaaatgattggcggaaagattttaaacagtttgattttgcaaatgcaatttcagaatctagttcatgccaaataagttttgaagctaaagaaatagctagtcagtaccgcgaattttatattaaggttctatcatccgaggtgagtaatttgtga

SEQ ID NO: 268117 - DNA, 1230 bp, Klebsiella pneumoniae
atgaaacgacgctcgtttatcttgtctgctctatcaatgttgtctcttttttcatttgatttaaaggctagttaccatgctttagagttagatattcgagataataatctcaaattactcaaatctcgaatatataaagataaaatggagctaaaacttcttttatcgagtttaatgaataaaactaaaaaagttttaaaagttgataaactttattaccttgatgagtcaataactctgcctgatggatgtgatgtaatcggcaccggtaaaaattccggtttcgtttttttttctgaagggcgaccggagtcgaaatatggtttagtaattcgtgaatccaataacaaattagataattttggtttatatttcacctccagtcacaatatctctaatgatataggtaaacctgattttatttgtatttttattacggaaacagcatctaattgttctctcaataacttatttgttgaaaattatactcctgatttgtttttcttttcccattgtgtcagggtcatggggacgaaccattctattagtaactgttccattattaatggtagtatgtgtttatcgatacgaggtcaatatattactgttacaaataataaaattacaaataatttctcgtctagaatacaaggcccttggcagctatcatgtgatgtttgggatggaattgttatggaaggatgtaagcaatgctcaattgttggaaacgctatctacgattgtgggcaaagtggcatttattgcggtggtaatggttctgcaagctctaatatatttattataaaaaatacagtttataagaattggaacagaggaattgatataggggtcacaggtaaagttacaggaaaaaatttcgtcaaaaacgttgtaataaaagaaaatttagttttcgacaatcgtgaacctcagatttggttaaatggtgtatctgatagtgaagtttctcacaatattgtaaaaattacccttaattacaaaaagttctatagaggatattatgggggtattgttggaattgcgttaggaagtgacagtcacacagaaaataactctgtaattctaaacgaagtgaatgtgatgcctgagagtgtagctgcaattacagtttacggtaaaggaaattctgttcgcgataataacattaaagggaaaggtgtgtggtatgacaaaaaatctgatgttttgctgtctcttatacacatctga

SEQ ID NO: 268118 - DNA, 3564 bp, Klebsiella pneumoniae
ttgcctgcggttcggtatccgaatcggaatcggagtcagagtccgagtcgctgtcggagtcggaatcgctgtcagagtctgaatcactgtcagaatccgagtcgctgtcagagtccgaatcactgtcagagtccgaatcactgtcagaatccgaatcgctgtcagagtccgagtcgctgtcagaatccgagtcgctgtcggagtccgaatcgctgtcagcatcggaatcactgtcggaatccgaatcgctgtcggaatcagagtcggagtcactgtcggaatccgaatcgctgtccgagtcagagtcgctgtcagaatcggagtcgctgtccgaatccgaatcactgtcggagtccgaatcgctgtcagagtccgaatcgctgtcagagtcagagtcgctgtctgagtcggagtcgctgtcggagtcggagtcgctgtcagaatccgagtcgctgtcagaatccgagtcgctgtcagaatccgagtcgctgtcagaatccgagtcgctgtcagaatccgagtcgctgtcagagtcagagtcgctgtcggaatccgaatcgctgtccgagtcggagtcgctgtccgaatccgagtcgctgtcagagtcagagtcgctgtcagaatccgagtcactgtcagaatccgagtcactgtcagagtcggaatcactgtcagagtctgagtcgctgtcagaatccgagtcactgtcagagtccgaatcgctgtcagaatccgaatcgctgtcggagtcagagtcgctgtcagaatccgaatcgctgtcggaatcggagtcgctgtcggagtcagagtcgctgtcggagtcagagtcgctgtccgagtccgaatcgctgtcagagtccgagtcgctgtccgaatcggagtcgctgtcagagtccgaatcgctgtcagagtcggaatcactgtcagagtcggagtcgctgtcagaatccgagtcactgtcagaatcggaatcgctgtcggaatccgaatcgctgtcagaatccgaatcactgtcgctgtcggaatcactgtcagaatcggagtcgctgtccgaatccgagtcggagtcggagtcggagtcgctgtccgaatccgaatcactgtcggagtccgaatcactgtcggaatccgaatcgctgtcagagtcggagtcgctgtcagaatccgaatcactgtcggagtcagagtcgctgtccgaatccgagtcggagtcgctgtccgaatccgaatcactgtcggagtccgaatcgctgtcagagtcggaatcactgtcagagtcggaatcactgtccgagtcagagtcgctgtccgaatcggagtcgctgtcggaatccgaatcgctgtcagagtcagagtcactgtcagagtcagaatcgctgtcggaatcggagtcgctgtcagaatccgagtcactgtcagaatcggaatcgctgtcagaatccgagtcactgtcagaatccgagtcgctgtcagagtccgaatcgctgtcagagtcgctgtcgctgtcagagtccgagtcgctgtcggagtccgaatcgctgtcagaatccgaatcgctgtcggagtcagagtcgctgtcagcatccgaatcactgtcggagtcggaatcgctgtccgagtcagaatcgctgtcggagtcggaatccgagtcgctgtcggaatccgagtcactgtccgagtcggaatcactgtcggaatccgaatcgctgtcggagtcagagtcactgtcagagtcggaatcactgtcagagtccgagtcggagtcggagtccgagtcgctgtcagagtcggaatcgctgtcggaatccgaatcgctgtcagagtcggaatcactgtcagagtcagagtcgctgtcggagtcggagtcgctgtcagaatccgagtcactgtccgaatcggaatcgctgtccgaatcggagtcgctgtcagagtccgagtcgctgtcagaatccgagtcgctgtcagaatccgagtcgctgtcagaatccgagtcgctgtcggaatcagagtcgctgtcggagtcagagtcgctgtcggaatccgaatcgctgtccgagtcggagtcgctgtcggagtcagagtcgctgtccgaatcggagtcactgtcagagtccgaatcgctgtccgaatcggagtcactgtcggagtcggaatcgctgtcagagtcagagtcgctgtccgaatcggagtcactgtcagagtccgaatcgctgtcagagtcagagtccgagtcgctgtcagagtcagagtccgagtcgctgtcagagtcagagtcagagtcagagtcagagtcgctgtcagcatccgaatcgctgtcggaatcggagtcgctgtcagaatccgagtcactgtcagaatcggaatcgctgtcagcatccgaatcgctgtccgagtcggagtcggagtcagagtccgaatcgctgtcagaatccgaatcgctgtcagaatccgagtcactgtcagagtccgagtcgctgtcagaatccgagtcgctgtcagaatcggagtcactgtcggagtcggaatcgctgtcagagtccgaatcactgtcagcatccgaatcgctgtcggagtcagagtcgctgtccgaatcggagtcgctgtcagagtcggagtcactgtccgagtcagagtcgctgtcggaatcggagtcgctgtccgaatccgaatcgctgtcggagtcagagtcactgtcagagtccgaatcgctgtcggaatcggaatcgctgtcggagtccgagtcgctgtcagaatccgagtcgctgtcagaatccgagtcgctgtcggaatccgaatcgctgtcagagtcggaatcactgtcggaatccgaatcactgtcggaatccgaatcgctgtccgaatcggagtcagagtcagagtcgctgtcggagtcgctgtccgaatccgagtcgctgtcggagtcggaatcgctgtcagaatccgagtcactgtcagaatccgaatcgctgtcggaatccgaatcactgtcggaatccgaatcgctgtcagaatccgaatcactgtcagaatccgagtcgctgtcggagtcggagtcgctgtcagaatcggagtcggagtcagagtcgctgtcagaatccgagtcgctgtcggagtccgaatcactgtcggagtccgaatcgctgtcagagtcagagtcggaatcgctgtccgagtccgaatcactgtcagagtcggaatcactgtcagagtcggagtcgctgtcggagtccgagtcgctgtcggagtccgagtcgctgtcggagtccgagtcgctgtcagagtcggaatcgctgtcagaatccgagtcgctgtccgagtctgtatcagaatcggcatcggcatcactttcgctgccgccagggtcggtatcgctgtctgagtcagaatccgaatcactgtccgcatcagaatcagtatcatcgttcggagaatgcgacgaatgatctttatcggaagatcctgcaatcatcgcccctataccaagcaaagccgccccggccattacccatggagcaatgctgccaccagaactgcctgcagctaataatcctgagatatcactga

SEQ ID NO: 268119 - DNA, 567 bp, Klebsiella pneumoniae
atgttgataatgctatattactttattaacataactaaaaaagagccagtaattataaatactggtatgatgatgttaatttgtgtcatttcaggttcacgatcatcattgttagctttaatgattgcaatactgttttctctagataggaccataaattttaaaaagctaatctatatattattaattccaatcgcaggtttagcagtttttgcaatctttcaggaaagactgtcacatgatggttatacatcacctttatcgtgttataacttgtcatcttatgttgatttattttcatattcaggagatggaacttgttattcggtaatattacattcatttttattacgtgtaatatatgatcatggattattaggctttatgtttttgatgggagttgttgcaatttatttgaataaattctcccttaaagcaaaaatatgtatattgttaatttttatctcaacagctttgtcggtatcttcattaaacaatgtttatgttgcccttgcattaataatgtacataggcattgatgaaaaataccaagaaaatgaaaaataa

SEQ ID NO: 268120 - DNA, 339 bp, Klebsiella pneumoniae
atgctcccgcgcgagggcaaacatctgcgggttggcggtcgatccaaagctgctgagaaaaacgccgatgaacagcaaaatgaaatagttgcggttccaggcaaagagtacgcaggccagcacccccagcagacagcagacgacaatcagctgcttgcgatcgccctgacggtcggagcggccggcgaggaactgactgaccagaatgccaataaccgcgctgccggtaaaaaagaaaccgaccatcgccgggcggacgtgcacttcgttggtcagaaacaggctcagggtcggggtttgcagcgccccggcaatgcccgtcagaaaggcgacgattaa

SEQ ID NO: 268121 - DNA, 471 bp, Klebsiella pneumoniae
atggatcgccgtgaaataatccacgtcatcaaccacgccggcggccaccatcgcgcgggcgccgcgggtaccctcttcagcaggctggaaaatcagtttaatgacgccattgagctgggcggcatactgcttgagcacatgcgccagccccagcccgatggcggtatggccgtcatggccgcaggcgtgcatcatgccggcgttgcaggaggcgaaatgatcgcgatgggggcggtggctatcgtcatgctgttcgttgagatcgagggcatccatatcgacgcgaaaggccagggttggtccgggccgcccggtgtcgagcgtggccaccacgccggcgaaaccgccttcaaacgccggcagccagcgctccggcgcgccctgttcgcgggcgcgttcgaaagcccgggccagggtctcctcgtccggcagccccatccggctgtcggcatcgatgacgtcgcggcctag

SEQ ID NO: 268122 - DNA, 138 bp, Klebsiella pneumoniae; identical to SEQ ID NO: 240515

SEQ ID NO: 268123 - DNA, 1008 bp, Klebsiella pneumoniae
atgaaaaatgaattagaggccttcgttcaaaataatggtcttacaggtgagatgtttttcatcataaacgataatgacaactatatttatcgacgtgttattttacatgatgaaaatactgaacctctcatcactgaaaatttcaaaaaatctatcactgatgaaattataaagagaatatctattaacgataatggtgatgaaataatagataatatcacggatatgaattatgaacataaaggtgtttactattttgatatcgccagcgaagataaaagcactatcattaaaataattgaagaaatatcgtcgttgacagttgctgacaaccctattgactttaaattcaatgacgtaaatctcgataacattattggtcttgtttatcacatgagtgatggtgataaaaatatttttttgtatcaacatagataccccaattttttacacaaaaaatcaaggctctcatttttaggtgagggggatgtattagttcctataccttacgatatgataaacatatccaaagtaattgatttttttgtttttgatggaattagttatgctattaacattaaattattagaagaaagatatggacttactcaagtaattgacaatatggtttctgaagtaactccaaaaatcattgaaatggagattgtcaataaatctgtcttagccgagccagagaaaatcttcgacgatatgaaagatgatcgtggtttcatgagaaaattagccagagttcttaaaaacggaatattggaactaaatatcgatgttaacattgttaatgagataaagactagtttccccacaataggaaggaatattgatataattaatgatgataatggtatgcaatatataaagctgacaagtaaagcacgcaaaaaagcttttatcagattgttgaatgatgaagccgtacgttcagtcttaacacaaaagccatcgattgcacaaaatcacaaacctgaaaaaaatatcactcccacatga

SEQ ID NO: 268124 - DNA, 636 bp, Klebsiella pneumoniae
atgacatctactaattctaacagtgcatcatgcgacaatataaagttcaaatattatctttattttttatctttgtggattttatttctatctgtttcaataatgtcctttgattgggtttttattgaaagattggttagatttattttattgaagtatacatttgaggatgtatttaacaactttaacaagctaaaagtcaggaactttgttttcattttctgtatttcgatggttttttcgggtatttcatctgtagtatatttattttcatcgttatcaagaggttggggaagcactcataaagtgagtaacgttaaaaatcaaacgcatgaacatcttgaatttttaactacttatgttatgcctcttgtattcactgacgttaatagcaaaagaacagtaatcaacctgctgctgatgatttgttttatcggtgttatttatgtcaggacaaacagattttatgccaacccatcgttggcaatacttggcttcaggttatataaatgtgttattaaaaatgatccttctggtaaggagtacacagtaatatgtagggggaaaatgtctaatgattgtcaagttaaaataaagaaaattgatgatgatactttgatcgcaaaacttatttga

SEQ ID NO: 268125 - DNA, 1008 bp, Klebsiella pneumoniae
atgatcgaacgcatgctttttgaaaacttactcacgaaggcgactgaaagactctctcaggatctgaatacatcaagtaaatatcacaactcgagaggatttgagcaaagggttagggaagttttaggtgatttattaactgaaatggggttgtctgtagacatgagtcccccagcgcaagaatttccggatataattattggaaattttggtgtagaggtaaaatactcagataacaatacatggagatcaatagcaaacagtatctttgagggaagtcgaaagcaaggagtagattatgtatatctcttatttggaaaaactggcggtgtacccgatgctaaatggggtcgctatgaagaatgcataatgcatgtaagaacatcacatgttccaaggtttgaggtggaaataaatgctaaagagccgttatttgataaattgaatatagcctataatgattttagagtgttaagcccggaagaaaaaatgcctttcattagaaaatatgcaaagaatagattgaaacccggtgaaaggctttggtggattgatgatcaaccagatgaaaggactctaccattagaggtcagattatatactaaactgtcccagccagaaaagaggaaatacagagcagaatcagcagtgctctgcccgcagatagttaaatcaagccgcgcatcaggaaaatatgatgatgtgactatgtttctcctcacatactatggaatattgtgcaatcaggctagggatttattttccgcaggaagtgtcgctatgcgggcatcaccagtaagaggtggaaattatcttgaaagagcattgaaagatatagaaaaagagatgattaaagcttttgatgaattagaagatgcattatttgaagagtattggggagtaattatacacagaaatgaaagaatcaaatactggctaaatttggctgattcttatgcggtgggatggataccatctgagactttatttaccgagattgagtattga

SEQ ID NO: 268126 - DNA, 1101 bp, Klebsiella pneumoniae; identical to SEQ ID NO: 14129

SEQ ID NO: 268127 - DNA, 312 bp, Klebsiella pneumoniae
atggatacgggtgataaaaacagaaaacaaagaacagaaaaaaacattaagcaaaaaatagcatcagcgcagatgcgtttgaatcgtctcaagaccaaagagaaatctttatccaagagcgctgagacacgcctgaagatcatccttggtgctgaagttgctaaagctgtgggctgtaaagtagaagacgtcgataaggagtttgtgttaggtatattaatacattttcaaaatgttggtgctgaggataaggcaagacttaaattaaaagggaaaatatttcttgagtctatagtgggaaggaagaaataa

SEQ ID NO: 268128 - DNA, 213 bp, Klebsiella pneumoniae
atgacagaccgtttcttgattactccacatagcaccacacttacttacagaatcggggaaggagaggaaatcactcaggaaatccctcttcatatcgtgtttgatattgtttctcaggttgttattggggtttatggttctttagaagaagctcagctaaaaaagaccgagcttgaagaaaaattaaaatctacacgaaaacttcgcatgtaa

SEQ ID NO: 268129 - DNA, 327 bp, Klebsiella pneumoniae
atgcgtaaagccgcggacgacgcctttaccctggccggactgagctaccgggtgaagtgcgagattgaatctttgaccacgcttaacgccgcgctggcggcggatctcggcggcaccatcatgccggagtccgcggcgcgcaccatgctccagcccgccaatgcctggatggcgagaattgtcgaacccaatgtactcacttcgctctcgttctgtatgtccgatcatctgccgctttcacagcccgcagaggcggtgaaggggattttgctctccctgatggcgcagcggactgaggacaaccggccgctaaccctggtgggataa

SEQ ID NO: 268130 - DNA, 1215 bp, Klebsiella pneumoniae
atgaagggaatgcagaagattaaaagggggaaaagcttctcaggtgtggttctctatgtgttaaagccaggctcacaccatagaaccgttccagaagtaattggtggcaacatgacaggtgattgctcacaagagttaatcgacgaatttaaccttacgaaagagcttcgttcagatgtggcaaaacctgtttggcacaattcacttcgattaccccagggagaatctcttaccaacgaacaatggaaacgaattgctgacgattacatgaagcgaatggggttcggtgatacacacctccgttgctatgttcttcatgatgatcaggctggtcagcacatacacattattgcaagtcgcatagatctcaatggcggtaagctctacttgggtaggaacgaaaacctcatcagcacccgcataatcagtgaactcgaattcgctcatggtctgacagtgaccaggacagcctcttcaattgcaccaaagcaaccgaagcggaagagaatctctcgcaacgaacagatgctatcagaacgaactggtgttccctgccccaagaagtcccttcaacagatcatagataaaagtttggcagattcaccggaccttttgactttcacaaaacgtctggaagaagctgaagtatcctggaaggccaatattgcctctaccggtaaaatgaacggcttctctttcgaatacacaggcatagctttcaaagcttcgcaattgggcaagagctactcctgggcaaatctcagtaatcggcttaactacaaccccgaccacttagaagctctgcgaagcgacatatcgataaaagaccaacctgttgctcctgttcctgttcctgttcctgttcctgttcctgttcctgttcctgttcctgttcctgttcctgttcctgttcctgttcctgtagaacagattgccagagcgactgtgcgaagcgagagcataggcgaaaaaattgctgaactagaaatgcgattcagagaaggaagacgaaacgaaatcacagagaagattcttcaaaagaatgcagcacaacagcaaaagcatctcaggctcatcggctggattccatttatcagaaggttcatagagcttctgcgaagctatgggaagtccattcttcacaaaacccacacacacttctcaaaaattcatgtaatccaacctttaaacaaggcgagaaaaattcgtttatag

SEQ ID NO: 268131 - DNA, 828 bp, Klebsiella pneumoniae
atgaaattaagtaacaaactaggatttataagagaatatccagaccctgtaaatttccctgaaaggaaaatgtctgaaatatcttattttatttatcaagagttaaataatggactttggaattatttcaaaagttcttctttatacataaataaagatggggtaatattcatagataatgtactgttaactaatgaaaataatccagtatattattttgcggaaaagttaagagatgttaaaaataaattttttattgatgatttgtttatattattaggtagtggtggtgttgagtttatagattttttagatggcccctttattaggacttataataattataattattttatcagatactatgcttttgcttttggaactgatgatattaaacatttcgaagttattggtactgttttagaatatatagaaaaaaccaaggtcttggttgataagggcgttgatgctaagttaattaataaagctacatgtttgggtcttaagttaatagagatgttcaatcctattcaatccatgaaggttattcagctttattacttttatggattaggtaatatagcagatcacatttcaaacatatactttaatcgcttgagtaagagatttaaaaaattttatgaagccaataatatctcttatataaagaaggctgtagaattgatgattgatctggaaagggtgaggatcaatatatcagatatctatgtaaatagttataataatttaaaagaagaagtggagaagctaaggagtcatatgagtaaattacaaaaaaagatagttaagttagaggttgatacgtaa

SEQ ID NO: 268132 - DNA, 1701 bp, Klebsiella pneumoniae
atgattaaagatattggcttcaaaaagttcaagaaacttatcgacatcgatttttcattcgatgaggatattaacatcatctcaggaaccaatggcacatgtaaaacaacattgcttcacttagttagcaatggttttcaaatgccacctactcggtccgcaaactattcaaataataattgcctcaaagtaattaaagctataaataaaattgccaatccaaaaatggaagcaatcgtcagagaatcaaaaagctatacagaccctgcagagggagcaaaaggaaacctcttttccataaactatttagatggaagtgagttgggctttagaaaacataactcccggaatccagacgaagctcaacggtatgcgattaagccattatatccaagaggtggcccaaaacaatccctcccctctaagcctgttctatatttaggtttatcacgattgtttcctattggggaaacaaaggatggggaccttacaaaaattgctttaaatctacccgatcaatatgtaagttacatatcccaactttacaaagatcttctccaaataaacataactaacattgaatcaaataatatcggtgattttaagtctggacctttatttgacacagataatcccgaaattgattcaaatacgatatcttccggggaagataattcgtttattataataaaagctttagttagtttaagatattacttcgaatcattaattgaatctaatgatattaaagaaagtatattgttgattgatgaattcgatgcaactttacacccttcattgcaaataaggctactcgataaaataaatgaatacgctaaggcatataaaatacaggttttctttaccacccatagtttaactttattagaatatgctttcaccaagaaatttaatgttatttatctaatgaataacatgagtaaagtcttttgtcttgaagatccagactatctcaagatatcgatgttcctgaaaaatcaaaatagagatgaaacgtatacccgtaaaaagataccactcttcactgaagatgaagaagctcgtttctttctcgaagaaatattttctttttggatacacagaaagcctgaaatggcaatagtaagaagttatttccattttgtagaatgctttattggggctgataacctaagaacgatttttagagatccacatttatcagaaacatcattgaaatcgatctgtattctcgatggcgatcatcaaactgatttaaacctaagtactattgcacttccaggctctttagctccagaagaattattttttgaacatgccgaattaatctataaaagcgatgacgaatctttctggattaaccctgatatatataatcaaggtttcacaaaagagtattatttaacaaaaattcaaccagaaatactatctattgagattgattaccaaaacaaaaaagaacttggtcaatcgactaaaggattcaagcgggagagaaataagactcttttcaatgaaaatataaatttcttccgtatggttttacgcaattggttagagcgggaggagaaccataaagctaacgaaaccttttataaagggttaagaatcttattccaaaaggtttgtgctcaaaatggtatcgatagaaacacatggaattttgaatttaaagaattgttaataaattgtgattgttaa

SEQ ID NO: 268133 - DNA, 930 bp, Klebsiella pneumoniae
atgagtaaaaacctgtcatatatgttaaattttttatatcaaataaaaaaccacccagatattctctcttacagaaaagttgtgcttagtgacgactatggggcttcacttggtgattttagaccaatacatttaggcatcggtccagataatcgaatgtcagcaaatagagtggtcatggatctgtgtttgtttatgctgatagatgccttaatagatagggataatcctgaccttgttggcgaggattttataaccaaatataaaaaacttgatgctgaaacaacacattcatttatacaaaaagaatgctttcgattaattagattaattagaaatgcaatcgtccatgataatgaagctgtaacttttgaaggtgaatgtaaaaaaataaaagaggatgaggtaggaatagccacttatcaagatacaagaaaaatgctcgtcaatttaaaaggcaagaaaaaagacgaaaaacttgatatgtatcttttaggtaaggaatatttaaattttgttatttggtttttagtgttcgaacaaaaccctcaaggatatagcttattaattttgaagagtgcttttaataacttaatatcaaatataaactccatttcagataggatgggggattctataaaagaatgtccgagcctttcatcttctgtgctattgaaaggattcaataggtatgtctttttcaatgctattattacggaggataatgaaaacattttcataaagattaaggattattattcaccttgctgcgactactactgggagagtggttcagatgtttatttgttacctctagagtccttagttattgataaggaaggtttaggtaaagtaaataaaaataaactctctgagttcaaagtttcgaagatatttttgtccaaatatctaaataaatctataacataa

SEQ ID NO: 268134 - DNA, 258 bp, Klebsiella pneumoniae; identical to SEQ ID NO: 250491

SEQ ID NO: 268135 - DNA, 585 bp, Klebsiella pneumoniae
atgattttctgcaagtttacccaaagaatagatgtgaagggtgaggtgattactctcccacactctattaacgtattttctccacagcatggttttattattaaacagtatgtaaaaattggtgatctggtgaaaaaagatcaacctttgtatgagatagacgtttcccggaacaccacaagtggtaacgttagtgctgcgcagattgaagtcatcaatgagaaaatagctaactctaacgatatcataggaaaacttgttgataacaaaaatcaaactttaaatgcactgaatgcgcagttaaaaacgtcaaccgactcactaaaagagaccaacaggatgctgcagaacacccaggctggcctcaaaaaaatgcatactaaccttgcaagctatgataaatatctaagcgagggattaatcactaaagatcagtacaattatcaacattccttgtatttccaacagcaaagtgcgtatcaatctttagtcagccaaaaaatgcaactggaatcacagatcactcagttgaatagcgacaaggtaaccaaggctgcggattttgacaatcagatctctaaatag

SEQ ID NO: 268136 - DNA, 756 bp, Klebsiella pneumoniae
atgagtcttcacgctgattatcagaaattggagccgggggatgaaatccggctttttgaaatcgacggccgcgcgttcaatatggacgaggtcttatactttcacggctataatattccgcactcagccgaggaaattattgccgccggtggcgatgaatcagagctgcgcgcgaaaagcatctggtggcagggtacggaatataaggcctggccatgtgagctggaggggatcgagtcgtccactacgggcagcgaggcgcagcccacgctcagggtgggtaacgtagaggggaaaatttcagctctgtgtttgtattacgacgacatggcgcaggcgcgggtcacgatccatgagacgcaaaaacagtacctggacgcgaggaactttgcggacgggaatgcgacggcagaccctacgcaggaaaagcggcagctttttttcattgacaccaaaaccctcgaaactgatgaaacggtggagttcgcactcgacagcccgatggggctgcaggggaagttgatccctacccggcaatatcactcgatttgcacctggtgtattcgtaataaataccgcagcggagatggttgtgattatgccggtacgcgttatttcgacaaaaacaacaaaccggttgatgatccgtcgcaggatgtctgcaacggcacgctgacggcctgcaaactgcggcatggtgaaaacaacgagctaccgttcggtgggttcccggggacgtcactgttaaggagctga

SEQ ID NO: 268137 - DNA, 288 bp, Klebsiella pneumoniae
atggatttgattaaaatgatagagcagatcccattacgggaatgtagggctattcccttccgtgatagcttggttcagccttttggtggctttgaagatgctgtcaaacgtacagttcagcgcttcccatgtgtcgagctctccatccccatacgcattgaaaaccagcctgattctgtatccatctcgctggttagcaggcagcatgatgaaatccgtaggtgcgagctggatatcgataatagaattgaagaaattggtccgttctacctgcaaatacagcgatga

SEQ ID NO: 268138 - DNA, 783 bp, Klebsiella pneumoniae
atggcaagtgtttttcttagtcataactcagctgataagccctttgttcggcgcctagcacaatcattacaatcacaaggtcatgtcgtctggctagatgaagctgaaatcaatataggtgactctctaatcgagaaaattagagagggtttggataaagtggattacgttgcagtagtcctttcgcaaaactcaattgccagcacatgggtacagcgagaattagatattagctccaatagagagattgcagaaaagcgagtaattcttttaccgttgatgcttcagcatgttgagttgccgggattccttttaggaaagaggtatggtgattttactacggaagagatttatgaccattcgcttggagaattgttaaaagtattaggccctgtagataaacaaattagcgcatcagatcaagagattgctgcaatgcgtgcagagcttgaacaggctcgtgagcgtcttgcaggtttagcacgccttcaagagcatcaaagtagctctttcacctctaactggacggctgaactgaaagaagccgttgaagagagcaatagaaagtacccgcaatataaaatcattaatgattcctatgcatttaatgccatggacaactctacgcctgtgactctggactatttgctatgggctattggtaaaactatgaggaagggtgcacatccattagatgctttaatggcaataggtaatacgcatcataaagctgaagcaatgattagtgcttatatggcttatctcggtgcccctggcgactga

SEQ ID NO: 268139 - DNA, 225 bp, Klebsiella pneumoniae
atggtgcttttttttgcgatttttactttaaaccgggcatttgacacttgctataaaacgggggaatttcagctactctcaagttccccttttctgtacggcaccaacttcgagaaaaccatcctgcatagctacgaagaacctccgcttcaggagcttcgctcttttcttttcccaactgttcgtatagtgacttcaccgcaacgacaagggataacgaaatga

SEQ ID NO: 268140 - DNA, 237 bp, Klebsiella pneumoniae; identical to SEQ ID NO: 100949

SEQ ID NO: 268141 - DNA, 402 bp, Klebsiella pneumoniae
atgatagatatccaaaaactgatatcttggcttggcgttgagggagctaaagctggcttggataaaagtgaaatgactaatgccgagctaattgaatcctttggtaatttacttccaaagaacccaagcaaattaaaacgctccgatctcgttgaggagattattttagcaacaaggagaatgacacataaatcagttgaagaactgatggaaatgtcaaaagaagatctgtattcatatttccacgatcagaaatatagcagaaaagaacttcttgatttgttatatactcttgaaatcagacctgggagctcagcaaagaaaaatctaaccgagttcacaataagtgagataagtgatattggcatgtatcgtcgcgtagcgaaagggaatcatgcataa

SEQ ID NO: 268142 - DNA, 129 bp, Klebsiella pneumoniae
atgccagctattagcgaaataaaatcacagggaaataagaaatttcctttttcaaatacactggagaagcagcagggggatcaccaatccctgccgctttcctgtaggaacacccaaaacaacaaataa

SEQ ID NO: 268143 - DNA, 339 bp, Klebsiella pneumoniae
atggataactccacctcatacaacaccctacaatctgtcctacagacataccacgataattacgccatcccgatgctgcgccagatgctgagcctgcagcgcgacagaacgcctgagacgctcctggcggcgattaaggcacaggatttagcacaggcaatgctggagcatgttagtgacgtagcgagccgtatagccagcctggaacactccacgctaacgcaggaggaggcagatagtatttcagcggaaatctctgatgctctgctgctgctattccagtgtattgaggagacgggcgaaatggcgcttgaactggcgccgaacaacaactactag

SEQ ID NO: 268144 - DNA, 405 bp, Klebsiella pneumoniae
atgagcagaaaagaacgcaacgtaatcgcccgtattgagcgacaatccacagtattaccccccgccaaatcattagcaagcagaaaagagtttcgggaactatctcgcctctccagggaatggaactcaaagccgggagagtggcatacagaagtcattgaacatgacagccccccattatcagaggaggagcaggaggtcttagatgatatcctatcctcctgtgatgatgtatatttcaaacaacgtaaacgaaaacagtatattgtagatagctcatcgctgcgcaaataccagattttaggttttgaggattatatttcattttgtggctatctcagcgtcaacgggctaaataacctggtacgcgattttgacgcagtatattcagataaggaagaataa

SEQ ID NO: 268145 - DNA, 891 bp, Klebsiella pneumoniae
atgcttattaacttagcatggtggaatataggaatatctccaccaataaaaaaacaaaagaaagataaagatgaagcaataaaaatagccaaaaactatatcaaaaagctttctcttcaacgtgatatagatttctttgccatctgtgaaatatcagaagatgaagccattagcttcaaagaagtttctgataaattaaatatgacatatctcaatctttcagacaaagttggtcggataataattgacatagcggtaatgtatgaaggttcaaagcttgaatacatgcatcacaaaacaataatccaccctcaaccaaatggacgaaatctacgagttggagtcagggttgcttttaaagacacaagtaatgatgaagttatcacatttttcctttcacactggccttcaatgctgagcgccactgattcaattcgcgatgatatagcaacggcgttaaggtacaatatagataaaatatatcaaaaatatggagattcagcccagataatttgcatgggtgattacaacactcaaccttactcaacggcgatacatgaaaaattatttgcgactagagactatcatataataaagaaaaggcctttgttgctttacaatccattttgggggttactagctaacggcggaatgaacaacattggtacgtatcactacacgacaccaaaggaaaacagatggtacgtgctagatcaaatgatgttttcctcatcatttttatctcaaaacggcaataaacttaagttacaaccgaagagttttgactttcacaatataatgtccgatgatgaaaatataatcatggacaatattttttttaaaacattcgaccactatccaattttttgcaggttatcacatgaactctaa

SEQ ID NO: 268146 - DNA, 1866 bp, Klebsiella pneumoniae
atgtcattagaaataaacgcctctcgcatctccaacgtagttacctttaccgttgataaaaatagtctaaaagaggctatggctaccgttacaaacctgaaaaaagcctttgaaaagcttcaagaccccaagattaatttcaaacgttttaatcaaaacatgaaacaggctcaaaaaacggtagagaaggcctcaaaagccgcctctaagcctcgcgataatagccaacgtgaagcagagcgagcagcaaaagcacaggcacgtgtagaggcacaggcagcgaaagatgccgcaagagcagcacagcgtagagaacgtgcagagctaaaattgctcgataccgcttccagctttaaatcaatgcaacacctcaccaatattgaattaacacaggcagcattacaggctagcaaaatcactaaggcctatgcagcaggtactatttccctgcaacgccaaaatagtgagattaaacgtttacagcagagttatcgcaggctcaatgctcaacgtaaacaatcggcttctcctaattatgctaaagtggctggcaatatgccgggtaatggtattattacaggtagtattatggggcttggctctcgtgtattagctggcgctggcgtgggcgctgctgcttatggcgcatataattggggcaaggatgctatttcctctcaggaggaaaggagcgagattgtagctagagcacgtttaggtaatgtggattataacgtgttgcaatcattaggtcagtttgcacaggctaatggtatagatagcggaatcggcacccagggagccagaaaaaacctggatgtagcaaaagatgtgtccgaaaagctcgcagacggtgcgctgaatgcgaaacgtaataaacaaggtgaatggacaggagcaccaacaggcattaacactgctttgaacatggggtatacgcctgaacagcttaaagaatgggctaaaaatccgtttggttttgtctcttcatacaccaacacaatgcaatctaaaggattgagtgaacaggaaattttgcacaatctcgaagacctcggggatgatctcgggctttacgccaaagcctttatgaacggcgggaaggctctcactgatcaagttgatatattaaaacgtaatggtcaatggttggataaagaacaacaagaccagctcgtagcctatcgtaaattcaatcaggaaatgagtgtcctttcagatagtcagaaattagcattctttgaaggattcatggaatctatagaccctgaaacaatgaaggaatttaaacaggctatgcaagatgctctcccgttctttaaaggcgtagggaaagcggcgggtgatgttgtagatggattaatgcgattaacagcatggattaacggaaaattaacgctattaaatggggacaacactaccaaagaagctgttagccagcattacggcactacaagcgcccctgtagctcctgggagcaatcctgtagcgaataactacggggcaactcagcccagggcagacggcacccatgagcctaatatgtttgatacgttgcgcgggtggtggtatggcacaagcgatgccagggatgttaccagctattcgtctaacaaagatggcagctattctcctgtctctctgctgaaacagagtgcaacaactaccgctacgcctacacaagcgcctgtagtggctcctgtggtgctacagaataacctaccggaagggatgattacccttaatattgctcctgatccgtcgtttggaaatattctaaatgctactgtggatcagaaaatagcacaggctaatcagcgtcttgttttatctatagcaggcggacagtcatcaacagggggctaa

SEQ ID NO: 268147 - DNA, 594 bp, Klebsiella pneumoniae
atgagagaccctcgtcgcagatgcaaagcacccggctgcggtgcctggttcaatctgatctattcgaatgtttactggtgctgcgaagagcataagctccagtacatggcatttcagcgtgaaaagcagaaagccaaagcgaaaggccggttaaaaaataaacccgttcaccatatccgccctgaacgaacgacggcagaaaaatccctgagccactggcttgaagtcactgaacgcgtggttaacacgctgtgtcgtgagctggcccttgccaatggagaagggtgcatttcctgcggaactcataatgctgctgtctggcatgccgggcattatcggactgtggctaaagcgtctcaactgcggtttacccgcatcaacatcaatctccagtgcgatgaatgcaacgtcggcaagtcagggaatattaaggcctaccgtatagggctggttgcaaaatacggtgaggatacagttcaggggcttgataacgacaaccgtatccatcgctggacaattgaagcgctggaagccatccgcgccgaagcatacgccgacttgcgcgcactgaaaaaagctcaggaggccgcatga

SEQ ID NO: 268148 - DNA, 537 bp, Klebsiella pneumoniae
gtgcggggcctcgttgtggtagtccatagttgctggtttttctttcatttttgttggcaagaatacccacacttggtatgttgtatttaccttagcgactgtggttatagggggtgtgggatgtctctggatatggaagaggttcaatcagtaatagacgcttttgatagagaaatgatgtctttctttaaggctcatgacgtgacatttgaaattaagagccaacaagataagcaaggactacactggaataactatacatttaagttaagaaatgaccttccagattatggtttaaagttcgatgatgcccaaggtattttttcttactgcaccactttcaaaaatgattttttgggagcatctcaggcaacatttggtgggcttaaacgacttgtgatattcccccctagtcctgctaatatccgttgtgataccgatccggagtattggtatttcatttctaaaaatagtgaaattgaccgttttatatctttccttttggtaattaaaagtcgtgctaaaaagtttttttaa

SEQ ID NO: 268149 - DNA, 504 bp, Klebsiella pneumoniae
atgaaaaagacgatcttggctttgtgtgtagctgctatccctctggtatcaaccggcgctgaatatgtaacggaaggctcttggcaggttaagaaagaagaaaacaagatgaccgatatgactgatgttgttgccattaaccgatctcctgatgtttatacgcgacagggaattgaaagaagcacatctatggtcatcaggtgtaaggaaaataaaactgaggcatatctatctgttagcgagtatctgggcagcgacgatccggtcgtaacagtaagatttgatggtggcaaaccgcaaaagcgtacttggactggcgcagagggtggagaggctgctttcagtaacaaagctgtttcatttatcaaagaaatgtcttctcataaaaagatgattgttggattcgaaccctacggttcgactatgcaagttgttgagtttgaccttacaggtatagattcaatcgcagcggaaatttccagtgcatgcaaatggaaaggttaa

SEQ ID NO: 268150 - DNA, 204 bp, Klebsiella pneumoniae
atgaaccagacttctaccttaaccgggcagtgcgtggccgagtttcttggcaccggattgctcattttcttcggcgcgggctgcgtcgctgcgctgcgggtcgcagggggccagctttggtcagtgggagatcagtattatctggggccttggcgtcgccatggccatctacctgacggccggtgtctccggcgcgcaccttaa

SEQ ID NO: 268151 - DNA, 132 bp, Klebsiella pneumoniae
atgttacaattatgcccagagattgaaggtaccatcaataagaccttcaacaccgtctttgaaataacttatagcagtatcataaccaaccatcgctcctactacggcacctccaacgccacctgcgaataa

SEQ ID NO: 268152 - DNA, 1287 bp, Klebsiella pneumoniae
atgctatcggaaatttttagaaaagaagccattgagtataaaaagcaccactggaaaggaaaggcattgttgttatcaggggcccctgcatggttggttactctattagcattcttattccttatatcacttatactttcactcatattttacacttttactcaacgtatcgatgtgcggggtgagattattacgctccctcactcagttaacgtcttcgcaccacagcagggtttcgttgtcaatcagtacgtaaaagtgggagacattgttaaaaaagggcaaactctctataaactggatgtttcccggaataccattaatggtaatgtcaacttagaacagattgaagtcatcaatgaaaaaatagccaatgcacaggatattatcaggaaactttcatataataaatctgaaactctcagtgcactggacaaacaaataaagaccatcacagactcactggtagaaactaatcgtatgctgacaaatgctcaagcgggcctaaaaaaaatgcacaccaatctttctagctacgataaatatctgaaagatggtatgattaccaaagatcaatataattatcaacattcattatatttccagcagcaaagcacctatcaatctctggtaagccaaaagatgcaactggaatcccaactaacacagaccaatagcgataaagtcactaaagctgcagactttgacaatcaaatatcaagccaaaacaaccaaattaacgattataaaaatcagctggtagaatcaaatgctaatggcaatattattataaaagcaactactgacgggaaaattgagtcattagccgtcactaaaggtcaaatggtggaaaacggtagtagccttgcccagattaagccaacaggagatatcgagtactaccttatcctttggttgccaaacaatactatcccttatgttaaacctggggatacggtaaatattcgctatgatgcatttccatctgagaaattcggccagtttccaggggaaattgtaagtatatcttctgttccagcatctcgacaggaaatgtcagaatatactaacgtcaataacggtacgaatcagcaggaactcgctctctacaaggccattattaaaattaaagataaaacttttagttacaatggaaaaacgctcactttatctaatggtctaaaagcgcaagctattgtattcctcgaagaacgcccgctttatatgtggatgtttacccctttttataaaatgacacaaagcgtaagtggtccgatcgatgaataa

SEQ ID NO: 268153 - DNA, 1272 bp, Klebsiella pneumoniae
atggcgcttacagatctcgcaatccggcatgccaggccgcttggcaagtcatacaggctctctgactgtcacggtctttacattcaggttaaccccagcggatctaagctgtggtatctgaaatttcgctttggaaacaaagagaaccgtatggcattaggcccttatccgcttatttctctcgcactggcaagggagaagcaagcagatataagaaggcttattttagaaggcattaatccggcggaaaaacgcagagaggaaaagcggggtggagagcccctttatacgttcgagtccgtggcgcgcgaatgggtctccagcaacgtgaactggtcggcagaacataagaagcgggtgttgcgttatttcgagctttacgtctttcccacgaacggcagctgcgacattaccaaaatgaaggtcaaagacctgctggtaccgatcaaagaggtggagaaagcgggcaaactggatgtcgcttctcgtctccagcaacgtaccgcctgcgtgatgcgctacgccgtccagaacggcattatcgatcataaccctgcatcagatttaactggcgcggtctccacgcccaaagtacgtcaccaccctgcactggatcttaatcttatccctgatttcctggaaagagtcgacgactttaaaggacgtaagttgactcaactggcggtaaagctggcgctactgctattcatccgctccagcgaactgcgctttgcccgctgggatgaaattgacctgcctaacgccatgtggaccattcccgccgagcgtgaaccgatccctggcgttaaatattcagcgcgtggggcgaagatgcactccccacacctggtcccattgtcacgtcaggccatcgaattgctgcgcgaggtgcggcagcattgccgaccgggaactgaactggttttccccggctaccaaaattaccgtaaactgatgagcgaaaacgccatcaacaaagcgctgcgggtgatggactacgacactcagaaagacgtctgcggccacggttttcgcataatggcctgtagcgtgttggtggagtcgggcctgtggtcaagcgacgcagtagagttccagatgagccatcaggagcgcaagcgcgttcgtgcggcgtatatccataaggtgcagcatctcgaagagcgtcgggagatgatgcagtggtgggcggattatctggatgcaaaccggttcaggcatgtggttccctatggctttaaaagcagccggtgggcacacttgaccatataa

SEQ ID NO: 268154 - DNA, 189 bp, Klebsiella pneumoniae
atgcggcctctgaaggttgtcaggctgatcctctcgctgttcaaagaacgtaagacctcgtgggggttggctatctggtttggctcggctaatcgcaggttgcgcagcgggaggccgaaagatctgctgctatcaaagtcagagttggtactgctagcggcgcaggatgaggctgcgtcgggggagtag

SEQ ID NO: 268155 - DNA, 381 bp, Klebsiella pneumoniae
atgacgatgtgtcgggtactgaatgtcgcctgggccgggttctatgcgtggctgcacaacccggtctcggcgcgtgataaagataaccagcgtctgctgatgcttatccgcgactcatattcactgagcggaggcgtatacggttacagacgggttcatggcgatctgaacgaaatcggggaaacctgcggtaaaaaccgggtgggccgcatcatgcaactgaaccggattaaatctgtacgcggctataaagcgccacgtcatatcgctggcagaccttcagtggtagctcctaatcgcgtgcagcggcagtttaccgttgtccgggccaatcaggtctgggtcaccgatattacttatatccgcacctggcagggatag

SEQ ID NO: 268156 - DNA, 3543 bp, Klebsiella pneumoniae
atgctcaagcttgaagaaatcaaaaaagacgcgcaaatccgtggcattatcgaaggacaggtagtgcgtgtagtcactgttgagcctatcggagaacacgctctaacggtttactacaaagatagtcagggaactctggctgaaaggatgttgtttcgtagtgacgagatcaacttggctatggccacagcaggacgtccgtggtcatttgatgcgccagggcgggaatttaaattaggccttgaagcataccggatttcgcaggccgcattatttgatccaatgatggccgttaacatggctaatgttgatccgttacctcatcagatttctgccgtgtatgagtacatgcttcctaagcaacctcttcgctatgtgctggctgatgatcctggagcaggtaaaactataatggctggcttgctaatttcagaattgctgcttcgcgcagatgcacgccgcgtcatggttgtctcaccggggtcgttgactgaacagtggcaagacgagctctttgagaaatttgggcttcaatttgatatttttagcaaggaaaagcaggagcaatgcgttaccggaaactactttgccgaaacagatagattaatctgccgtctggatcaattatcaagaagcgaagagttacaggaaaaattgcaaaatactgattgggatttaatcatcgtcgatgaagctcataagttatctgctaattattttggcaataaaattaataaaactaaaagatttaccttaggtgagttactcggctcgatatgccgtcatttccttttgatgacggctactccacacaatggtaaagaagaagattttcaagtctggatgtcacttttggatagtgacagattttacggtaagtttcgtgaaggagcccataaagtcgatatcacggatatgatgcggagaatggtcaaagaggagcttctaacctttgatggtactcctctatttcctgaacgcagagcttataccgctaattatgagctttctcctcttgaagcttctttatacgagcaagtaacaacttacgtcagagaagaaatgaatcgtgccgataaactggataataaaaagaaaaatactgtcggttttgcacttacgcaattgcaacggcgtctggcttcgagccctgaagcgatctatcaatctttaaaacggcgtcgtaatcgtcttaaagacaaacttgatgagatgaagctaatggcgcgagggcaaaaagctaaacgatctggagaagcggaaacacttgaaaagtataaagtaagtaaatcaattgttctcccagatgattgggatgaattggacgaagatcttagtgctgaagagtatgagctttattcagaggaagtagccgatcaggcaacagctgcagaaactatttttgaacttgaagcagaaataaactcactcagagaactggaaaatcaagcattagtacttgttcagtctggtaacgataaaaagtgggaagaactctctaggctgttgcaagattcgcccgagatgattaatcgcgacggtgagcgtcgaaaattgatcatctttactgagcataaagataccttaaattatttacgacagcgtgtatcagatcttttggggcagccccaggcggttagagtgatctatggcggaacgaatagagatgaacgccgcaagatccaaaccgaatttcgtagcgatccaactgtattaatccttattgcgactgatgctgctggtgaaggtgtaaacctacaaaacgctaatttaatggtcaactacgacttgccatggaatcctaaccgcctcgaacagcgttttgggcgtatccacaggattggccaaaaagaggtatgtcatctttggaatattgttgccaacgaaactcgtgagggggcggtctttcagaaattattcgaaaagcttgaaattgagaaatctgctctgggtggaaaagtattcgatatattgggggaagccttcgataacgtttctcttaaagatctcttgatcgaggctattcgctacggtgaagatcctgctacacgtgcaaaaatggatcaagtgatcgaaggtgctctggatagtgagcatttgaaagagatcctccgacgcaatgcccttgttgaatctcacatgggattagagggattatatgctattaaggagcagatggaaaaagccgaagctcgccggctacagcctttttttattcgagcatttttccaagagtccttcaaggcattaggtggagaactgagacctcgcgaacaaggtcggtatgagatcaaccatgtaccagccctaattagagaacgtgacagaagtattggtgagagtaggacgcctgttttatctcggtatgaaaggatttgttttgaaaagcagcaaatcagaccaactggtaaggctctcgcagagttaatacatcccgttcatccattaatgcattcagtgcttgatctcaccttacaaatgcatcgaaataaactaaaacagggtgctattttaattgatccagctgatgatagtgacatgcctcgtctcatcttgatgcttgagcacactatccgtgaaactaacggtcaggcaaagagtattgcctctcggcgcatacaatttgtctctatagatatgaataataaggctacttatgctggttgggctccgcaccttgatctgctgccaattgaggagagtgatcttcttttgattaaagatatcttacattcaccttggttatctcaaccgcttgaacctttggcattacagcttgcctccgagaaattggttcctgatcattacgcagaggttaagctacgtcgagagttacaggcggataaaacccttgaggcagtacatgaacgtttggttaaagaaatcaactactggcaagaccgtttcctaaaattaagtgatgatgtaaaagctggaaaacaacccaaattacagcctgaaaatgcccgtcgcagggttgatgagctgacggcaaggttgcagcagcggacagctgaattgattgcgctaaagcaagtcgtttcaagcacaccggttgtgattggtagcgcattagtaatccctcaagggttcttatctaaacgtaaaggagaagtgatttttacgcctgatgctgcaagccgtgcgcatattgagaaagtcgctatgtcagctgtgacctctgctgagctaactttagggcatagtgtgtttgacgtatcggcagataaatgtgggtgggacattactgctcgtccgcctctcaatactgatggctcgctcccgcaagacaggcacattgaagttaaggggcgtagtaaaggtcagacgactatcactgtaagtcgcaatgaaattctctatgctcttaatcaggctgaaaaattcctcctggcgatagtgctagtagacggggatagttttgaaggtcccttttacattcgccagccttttaacaaagaaccggatactggtgtagcaagcattaactacgaccttgctgaactgctctcaaaagcgaccgaggctaaggagagcgtgtga

SEQ ID NO: 268157 - DNA, 2910 bp, Klebsiella pneumoniae
atgacacttgtcaagtcacctaaaaaacttatcgaagtagcgctcccattagacgatatcaatgccgcttgcgctcatgaaaagatgcctggcattggcccccatcccagaggtattcacttatggtgggctcgtcgcccgttagccgctgcaagagctgtcatctttgctcagatggtaaatgaccctggttaccagcaaggtgaaggctttcgatatggtgttaacaagcaagaagccgccaaaaaacgtgaatatttattcaatatcatacgtaaactggttaagtgggaaaacattaataatgaagaagtgttaagcgaagctcgcgaagccatttgggaaagttggcgtgatatctgctcactaaacaaagaacatccacaagctaaagagctatttaacccagaaaaacttccgggttttcatgacccatttgcaggcgggggagctttgccattagaagcacaacgattaggcttagaatcttacgcatctgacttaaacccagtagctgtaactattaataaggctatgatcgaaattccacctaagtttatcaatttagctccggttgggccaaaacctattaatagtgaagaaaacttaaaaaatacaaatgctctgagtatatttgaagagtggtatggcacagaaggactggcagaggacgttcgccgttacggtgcatggattcgaaatgaagctcacaagcggattggtaatctttatccaaaaataaagattaccaaagacatgatatctgaaaggcctgatttagttccgtatcttgatgaagaacttacagtaatcgcttggctttgggcgcgcacagtaaaaagtccaaatccagcattttctcatgttgatgttccattggtatcttcttttatcctttcctctaaaacgggaaaagaagcttatatagagccaattatcgaaggagatagctaccatttcactgtgaagatgggtaccccaccagatttagctaaaaatggaacaaaattagcacgaggtgcaaattttgagtgtttaatttcaaaatcacctattgatggaaaatatatcaaatcagaaggaattgctaagcgcttaggccaacgtttgcttgctattgtggctgaggggaaaaagggtagaatttatctaccacctcaagataatcaccaagaaattgcttttagtgcgtcccctcagtggaaaccagaaaaccggctaccaaatgatccacgcaatttctggacattaagttatggtctcgaaaaatttggagacctttttactcctcgacagctgatggcactaacgactttatcagaattagttatagaagcaattgagtgctgtcgcaaagatgctattttttctggtatggcagatgatggagtcagtttagattctggaggtgttggagcaacggcctacgcccaagctgtaggagtgtatttggcatttgcagttgatcgctgcgctgatttttcaaactcctgtaccagatgggttcctggtaatcagaaggttatgaatttgtatggtaaacaagcgattgctatgacttgggacttccctgaagccgggatacttgaaaatgttgtagggggatttttaccagctacaaactttattgcagattgcattactaaacttcctagccagaaaattaatggcttcgtatcccaacaagatgctcaaactcaaaatataagcactaataaagtagtatcatgcgatcctccttattatgataatattggatatgctgatttatccgattttttctatgtttggtcgcgcaaatcactacgcccaatatttccaaatctttacgcatcaatagctgttcctaaggcagaagagttagttgcaaccccttatcggcatggcggtaaagaaggggcggaagcatttttccttgcaggtatgagtcaagcgattcatcagttggctgaaaaggcacatccagctttccctgtcacaatttattatgcctttaagcaatccgaaaccaaagtagatggcacttcaagtgctggctgggagacgtttttacaagctgtaatcgatgcagggttcgccattagcggcacttggccgatgcgtagtgaacaatcagaacgattaatcggtaaaggtacgaatgcattagcctctagcgtagttctcgtatgtaataaacggaagattagcgctgaaacaattagtcgccgacagtttatccgtgaactaaacgcaacactaccagaagcactggatgaaatgacccaggggggggttaactctcctgtagcgccagtcgacctttcacaagccattattggtccaggaatgggtatttttagcaagtactcctcagtcttagaagcagatggcagcaaaatgaccgttaaaacagccctgcaattgataaatcgtttccttgccgaagatgatttcgatcatgatactcagttctgcttgagttggtttgaacaagagggctggaatacaggtaagtttggggaggctgatgtacttgcccgagccaagggaaccagtgtagccggattagttgaagcaggggtaatccatgctggtcaaggtgaattacgtctactgaaatgggcagaaatgccagaggattggtctccagagcacgatagtcgaactcccgtttgggaagcgttgcatcaattaattcgagtcttgaacaacaaaggagccagtgctgctggtacaatgttgggaagaatccccagtaaaaatgatgcaatccgctcattggcctatcgactgtatactctttgcgagcgcaaaggatgggcgagtgatgctcgagcctacaatgaattggtaacatcatgggattccatgcaatccgccataccagatactggtaagtctggcgatcagcaatcacttgatttctaa

SEQ ID NO: 268158 - DNA, 2826 bp, Klebsiella pneumoniae
atgagtcttaaaccctggcgtgaaattgcacgccctcaccgcgacgtacttgaaggcactttcaaacaatcagaatttgctgctgatatcactcaagtagcaaacggcaaagcacctagagagtaccaggatgctgagcagttttttgcacgtacattcatcactgagggtatgcgtttattgctggggtcagtagcagaacgtttaacaggcaaaggtggagatcctgtaattcaattgcagaccgcatttggtggaggcaaaacccacaccatgttggctgtgtatcatttagcctcacgtaatgtcagcaccgatcgtttacaaggcatccctccaatccttgatgctgctggaattagtgaattgccacaagcaagggttgccgtcatcgatggcattaatctatcagtcagtcaacctcgagaacatgggagcgtttctaccaataccttatggggtgagcttgcttggcagctgcttggtgaagaaggatataatttagtcgaagatagcgatcgtgatggtacgtcccctggtaaagaagcgttagtagaattattgactaggtctgcaccttgtgttgttttgattgatgaattggtggcctttttacgtcagcttgaagtcggcaagcagttcaaggcaggtactttcgattcaaatatcactttcgttcaagcgttgacggaagcatttaaggctgttccaaatgccatattgctggcctctcttccagaatcagctctggaagtggggggaacaatgggacagaaagctcttgattctcttgaaaaatattttgctcgtgtcgaatctgtgtggaagccggtagctactgaagaagcttttgagatagtgcgccgacgtctttttgagtttgccggagaaacggcccaagttcagggaattgcgcagcaatatactgatttttatcgtaagaacgcgcacaaatttcctaatgagactcagtcggctcactattatgaccgattgtgtcaatcttatcctatccatccagaggtgtttgaccgactttatgaagattggtcaactcttgataagttccagcgtacccgtggcgttttgcaatacatggctatagtcatccatcgtttatgggtaagcgataaccgtgatgcgctcataatgcctggttcattacctttggatgatagcattgtccggggtaaaagtattcattacctccctcaaggttgggagcctgttattgaaaaagaagttgatggccctcgctctgaagctactgaaatagacaaaaacgatacacgttttggtcaatatcatgctgcacggcgtgtaatgcgcactcttttcttggggagtgctccaagtagcggcgatcagatgcatcgtggcttacagattgagagagtattactaggggcatgttcaccagaacagacaattggaacttttgaagatgttctgttgcgcttacgtgatcgcttgacatacctgtatggagaaaaagatcgactttggttagataccaagccaaatctgcgtcgtgagatggaaactcgcaagggcaatataaatgaacgtgaagtacttatcccactgatcaaaaaaacagttacttcatgctttggaagccagcattgcttcgcaggtattcatgtatttgctccagcaacagatgttccggatgagtttggtaccggtcctcgcctgatcgttttaccaccagagactatttcagcatacagtcgtagcaatagtaataatctcgcgttcaaggctgctgaaaatattctattgaaacgtggggaacagccaagggtcaagcaaaaccgtttgttcttccttgcagcagattatgacagtttaagccgtcttaaggagcaagggaaaatatatctggcgtggttatccatcgtccaggatattgaaaatggtgtgttaaaccaagaccttgctcatctcactcaagccaaaagtaatcgtgatagcgcattacagagatttaatggtctggttagggatacctataaatggcttatggcgccgttccaagagccaggccaggatttagtgtgggaaaccgcgcaaatttcttccagtgcgccaaaattagtacaagaaattgaaaatcggttgattgaggaagaatggttaattaaagcatggtcacctgtgcatcttcgtaatcttttggagaagtattattttactaatggtactcaccaagtgagtgcggtaaaggtttggcaagatgcttgtcaatacctgtatatgccgcgattagttaatgatcaggtactacgcggtactattgaagaggctgtcaaaagtgatgatttcttcgcttttgctgcgggggaacgtgaagaacgttacgaaggatttgcctttggtcgttcggctacggtttttcttgatgagaattgtttgctcataagtcgcgaatcagctcttcaatacgtggataaattaaaagcagaacaatctccaaagagtgctgatgctgtccctgtttcagataatggatcttctgctgatacaggctctgtaattgacacaagttctactgtaatccctggttctggaagtggtgttagcgaacccatcaaacaacaattttatggttctgttcgattagatccattaaaagcaaaaatagattttgctactctgatggatgaagtggtacaaaacttcaccagtcaattaggtgtggatgtagttatctctgtcgagattaatgctcgttcagaaaaaggatttgatgcgaatcttcagagagcaatcaaagaaaactgtaacatgctgaattttggtaatgctgaatttgaagagtaa

SEQ ID NO: 268159 - DNA, 303 bp, Klebsiella pneumoniae
atgaaacttcttaatacttatgaaaataaagacgaagcagaggaggcgttgacaaagatatcgggtgaaaaaaggctggcaagtgagagagatagtactgttgtaatttataatctttttggacaaccgacgtggggtaacttttataaacttgaaatgtttaaccttcatgaattgaagaaaatattagaggcgaagaattctggtcagcatattgaaaaagcaaggtatgatgaaattatcaccatgctacgttatgtatctcgaacatttgatttaactattccagaacattggttataa

SEQ ID NO: 268160 - DNA, 261 bp, Klebsiella pneumoniae
atgccccaaaaaactatcgttaaagtcgccagctatgttcaagagttggtaaaagaaaacaatgttaccgctaatcgtgatgttatgacccgcatggcagtgatcattactgcacttactggtgactttgttgagttagataaaatcgagcaattgctggtaaaccttaagaagaaaggtactctgagcaaaaatgaaatactacaacttcatggccgctatatctgtgaagaacgactttttaagttgttagatttctga

SEQ ID NO: 268161 - DNA, 132 bp, Klebsiella pneumoniae
atgctgctgaaatggaagccaccgcaaatcgtcaatggtaaggacgacgattctctggaagcgaccatgaggtttatgaaagagactaacaaacgggaaaaagaagtaagcgtgcagcgagaaccgtattga

SEQ ID NO: 268162 - DNA, 786 bp, Klebsiella pneumoniae
atgctacacggtagcgaagtgttaaacttgaaatttgggcgagcttccatctttagtaaaatactaaacatgtttgatggggtaaagaaaatatttacaaatagcaattatacaaaaaaaattcttttagagtatcatcaagtacccaaagatatatcgattattacaacttatttaggtgttaatgatagtgagttcgctagaaacaatgtctttctaaaaaacgtcaacaacgaaacatttaatatattatctgttggaagacttgatgaaagaaaaggattcgataacgtaataaaagcattagggatgctggataatgatgttaaacaacatataaaatttacaatagttggaaatggcagtttagaattcaagggatatctaaaaaccttagcaaaagaaaattctgttgatgtagagattaaatctggcgtctctgactctaaattaaacgagttatatgacgaagcgaatttatttgttttggctgcgaaatctagtaataaaaaaattgaaggatttggattggtttttcttgaggcggctaaacatggagtcccatctctagcaacagatgtaggcgctattagtgaggtcgtaaaaaatgaaaacactggtcttgtagtcaaagaagatatttcagaattatcgcaggctatatatcgctgctatactcatagagatctgttagttaaatttagtaataattgcgttaatgacgttgctaattattcatgggcaaaactagcagatattactttctcagatatcaataataagtaa

SEQ ID NO: 268163 - DNA, 411 bp, Klebsiella pneumoniae
atgaacataaaagagatcggggacgtgtttcactgtgattgcggcttttcctggcgtcgcggtaaaaacggtaaccataactgcgctgatggtttgcgtgaaaaggtacggcaactggcggcggagaatgtggcgctgaagagcgccattacagaccatagtcattcggttcacttctgcaaggtttgcggaaaggatgatccgtgcagcactgacgatgtttgttatgtgcttagtgaaacccctgccacagatcgcatcgtagccgggattaaggctgatggggtggaggagttcgtatccaacaccgtgcataagatttttgatgaaagcgaagcagtgtcagctttggcttacctttccctggctaattcacacgtgaagaagctgcgcgagggggccgacaaatga

SEQ ID NO: 268164 - DNA, 753 bp, Klebsiella pneumoniae
atgttagaatcatttaaagaattcactacatcgacattcaatacagctataaatcgtgttagaaaccctgccttcggtgctttcgcaatttcatggtgcgcatttaactggaagcaaatactttatttactttttgctgacaacggaatttactacaaaatagaatacatttcacaaaatagcagttggtggaacgtaattgttttccctgcattctcgtcactttttctatgcattggtttgccgtggattaataatgcaataacgaaattgcaaagcaaaccgcttgataatacagactcattagagaacctcaaacaggcacgaatgattcagcgctctacgcgccttcagcggttgagggctaaacgcgatattacctatgaaaaagtaaaaactggagacgaaaaacaaattcaagatatgaaagaggaaattactcagtcgcaatcaagaatgggtgaactaacacaagaacgagatgagcttctaaatacccttagcaaacttaaaatagaacacgaaaatacttcaaaaaaacttgatgagactaaagcaagggtcaatagtctaaaacatgagattgatatagccaaaagcgaatatcaagagatgaaaacactaagtgactactatcacaacaaagttgttagacatggttatacatcagatgagcagagagaaacattaatggaaaagtttaacgagcaaatacttacttttgatcatgctataaaaagtatcaataagtga

SEQ ID NO: 268165 - DNA, 129 bp, Klebsiella pneumoniae
atgatgattttgagtattgttgcaaccgtcgttttactcggcgcgctcttctatcaccgggtcagcctgctgctcagcagcgtgattttgctcgcctggaccgcggcgctcggcgcggccggagtgtag

SEQ ID NO: 268166 - DNA, 384 bp, Klebsiella pneumoniae; identical to SEQ ID NO: 227591

SEQ ID NO: 268167 - DNA, 201 bp, Klebsiella pneumoniae
atgaaagaatataaagagatattgaataataaaaaagaaaagctttttgttacattgttggctcgtacaaaaatttccgaatcatgtccagttgcataccgacttattaaaatcactgattttcaagagatggagtcgacccgtgtgcttgtgccagccaaggcacttgtcagtgtattagagttaaaaaaacgttattaa

SEQ ID NO: 268168 - DNA, 1143 bp, Klebsiella pneumoniae
atgatttatcaatgctattcatgttctagaacaaccttcgaaacaagctgtccgtggtgctctccagatgtatctggaacatttcggcaaatgacaccattagatccatcctattaccctgatttccagtaccagtctaaaggcatcataaaagatttatttggtaagaagaaagagcagtctcaactcaacgccctacttgaaaatgttcttttgaaatatgctacacttaaagacccctactttactaatttcattcacacatcaagattttcgcataacaaccaggatagcaacagtaacataaatagtgaacgcaatagtgattattcagagatcagattgttccaagaagtactgattagaaaaggattcaacgaactggagcagttaccatcattgttagataagctattgctgaccacttcattcaactctatttattcagggtttgcccgtgaggttaaacgacatatcaagccaacccttaccgagacattaaaatcatggatcgaagaggctggtacaacttatcgtgcagatctttcgttattcctgtattacctttggagtaatgaaatccattatccggatataacctttaacgaacacgcggtaaagacaccgggtactccgttattatcatttgactctatcgaaaaattccttgctctctgcgagagtatctattttgatattttagtagacagattagctacccgccttgaacattttaatccaaacaaatttgtcacaatgtatcttgttgatgcaatggacgggttccagtttgaggccttcttggttgaaatattccagactataggatatgacgttaaagaaacaaagaaaacacaggatcaaggggcagacttattcgttacccgcttcgggaagaatatggttatacaggcaaagaattattctggctcagttggcaattcggcagtgcagcaggcaatttcagcaaaagcattttatggttgtgatgaagcaatggttgtgacaaactcttacttcacccgatccgctaaggaattagctgattccgcaatggttcgtttgattgaccgaaaagaacttcaaaactacctggatgattacaatcagaaaataattgaagatttccagacagaatcctga

SEQ ID NO: 268169 - DNA, 1239 bp, Klebsiella pneumoniae
atgatccgtatgcgcgttaaaaactttgggccgatagggccgtggccggcggacaatgacggctggatcgaatttaaatctgtaacagtgtttattggcaaccagggcgcgggtaagagtaccctcgctaaactgttttccactttttgctggattgaaaaagcgctggttcgtggcgatcacccgaagaaatggtttgagcgcaaagggcgtttcaaaaacatgtttctcagttatcaccgcttggaaaattatcaggacttggataagcgcggagagccagtgattgagtacgagggtgaagcttgggcaatccgttatagcgcgaaccagttaagcattactgagctacctggccagcagtatgcgctgccgcaggtgatgtatgttcctgccgaacgtaattttatctcttatgtgcgtaacccgagtgaactgaagctctcctctgagtcgctaaaggagtttttgtcggctttcgaactggcaaaacagaacctgcccaaaaccgtaaaactgccgattaatgacactgagatcgaaaatgacaaactcaatgatatcgttaatctgaaaggaccgggccatcggctgcgtctgacggatgcctctagcggattccagtctcttgtaccgttgtacatggtcagcctgcatctggcgaatgccgttcaggaccagagtcaggataagccaatgagcgccgatgagagagagcgtttcgcacaggagttcacgagtatttttgataataatagcctgactcaggagcagaaacgggtggctgtgtcagctctctcgcgtcggtttaacaaaagtgcctttattaatattgtggaagaaccggaacagaatctgttcccgtcctcgcaatgggaaatgttgaaaagcctgctggagtttaaccggcagggtaaatccaatcggctggtgctgactacccacagcccctatattgtcagctacctttcgctggcggtgcaggggaaacatttgcagcagcgtatcattgagagtaagcagaacgcgttattaccccgcctcagtgccctgatcccggaatcggcattactggacccggatgaagtagcgatctaccagtgcagcgatcaggatggcagcgttatccggttggcaacttatgaaggcatcccttcggataaaaatctgctgaatgactggctgcggatgggtaatagcctgtttgatcagcttctggagctggaagaggagctttaa

SEQ ID NO: 268170 - DNA, 501 bp, Klebsiella pneumoniae
atggatttttttaaggcagcctgccggagcggtccttttacgcaggaaacctttggcatctgtgacaaccaagacagcacacccgcctatgtggatactgataacccgcaagagtgggtggcgaccgttgagaaccgcgcacagctcgaggttatctttaccgcgattgataagtgcgtgctacaggacggtgatcaacccggtcgcgggcgctgtgacggcatgctgaccacgaataatctgctgtatctggtggagttgaaagagcaacggaccaactggcgaagtgatgcaacagaacagctgcgatccaccattctttttctgcagcaacatcacaatctcagcgcatacaaacacaagaaagcctttggctgtaataaacgctatccagcatttatcgagattgaccaagaaaccaagcggcgcttctttgatgaatatggctttcgcctggatctgcaggggactgttaagctaccgagaggggaacggggctga

SEQ ID NO: 268171 - DNA, 1176 bp, Klebsiella pneumoniae
atgatggataaagtaaataattcaaataactatacagggccacattttattctaaatgtagattatctgcagccgggcgatatcattcttgagagggggtacgaatggtattcagaaaagatttgtgaacagaccggtagtcgatattctcacgcaatgatatgcgttggtggcactatcattgaggcaacgcgagcaggtggggtgtttagccgaattcctaaccgttcaacagtgcgcgaaataaatgattttttggtgttgaggcttaaagaaacacctgaacctgaagtaatagaaaagatatgcggacatgctcgttatcttgtcggaagccagtactccgtatccgaagcgctatcggtaaaaggaccacagtttttaaagcaattctctgaaaatagcagaaaacagttttgctctcgcttagtagcacagtgctataaagaaggtggcataaatcttgtcgatgatattaacttttgttcgccagcagatattgaaaataatgacgacttgttgcgcgtagtcaagggggcagtcaatcctgcttcagaagcagaagtccggcatgcgcaggaatcaactcctcacacagcccacactggtaatactgttaatttcattaatagggcaatgaatattttcaaaaaccatggtattaaaatggtaggttctccccatggtgaagtagttatcactactctaaatgatattagttgggcattgtatcaaaataaagatgtacccggacttgacgatgagcttaccgaagctatgtatgcttctagctatcttgcccacataaatatagatagagagcgcaatccctacaggtatgattacacattgttcaaattaaatgttgaatttgcatctggtggagataaaaatgagttatttgaaattcttaggcaggaactaaataatgctgttagtgtttttaaacaacggttgcaaagttatattgcagggcgagacaatcttaaaacagggcttaaatatgcagaagctgactttcaagtgccaaaaggaatgctacttataattaaggatcgactcattattattgaaaggtattcggcacattttaagaatacacagggtttcaaggaaattaatgaaatgtccaaaaaattcattagttacattagagaatatgcccctgaactttaa

SEQ ID NO: 268172 - DNA, 411 bp, Klebsiella pneumoniae
atgggaaaaagagaacgaaacgtactagcacgtattgaacgacaatccacagtattaccccccgctaaatccctagcctctagaaaagagtttcgggaactatcccgcctctctatgctatggaactccacccctggggactgggaaacagaaataatcgaacatgatagccctccgttatcagaggaagagcaggaagtattaaatgacattctctcatcctgtgatggtggtgtgtattttaatcctcgtaaacgaaaagaatacatcgtcgatagttcagatttgaagaagtggcaggttatgtcctttgaggactatgtgtccttttgtgggtatttatcgattaatggcctcaataacctcgtgaaggatttcgacgcagtatacggcgataaggaaagtgaatga

SEQ ID NO: 268173 - DNA, 2337 bp, Klebsiella pneumoniae
atgaaattaactgacagaatattcgtaaagttcttttataaaaaaataaaaataataattcagcgttcgtacaagaaaggatattctcaggggaaagataagggttatcgtaaaggtcatgatgatggtgtgttaaaatatcacattcgtcgcgaaatcgatacgttctcgatgtccgctattgacaactcgatttatggaccagaaaatattggcgttacgagagaattagagcaactcatgattgaaaaagtaagagttgcaactaaagctggaattataagttcaccttccccctctcagtgggaaatgattttttcagatcatccagcgacttgcgttgttgctggggctggctcaggtaaatcaacaacactaattcttcgcgtagtgtttatgcatttttatttaaagattccattaaataaaattacagtaatatcatttacaaaaaaatcatgtgaggagttaagtgaaaagttaaataaagtatttactttttgggatgaagggtatgataaagaatctgttaattcactcgtcagcacattccactctcttatatataggttttcattgaactcaatgccaggaataagtgttttcgattttttaggcgaacataaaaatgagaatgagtctgccttggaaatatcattaggcaaaaaaaataatgagcaaatagacattttgaaaagcgtttacaccgagttatataataataacaaggaattcaaaatttgtattgataagcttgttgatttttcaataacatcatcctcttcatccgatgaaaaagagcaaagaagttggttaattaattatgcagcagagagagaccttgctctaacaaaaaaaattaatgatctatggtctaaagatgggaaatggcctatagagggaattgtgcctggccccgtaaagtgctttcatgttaatggaaatattttttatgctaatgggtatgttgaacataataaaatgccggtttttttatcaggtaatattgggagtaagaaattatttgatgggaatgactcttttgatcctcatgaaaccgatcccaagaaaaaagtacttttaagtactgcaatatctataaaaaacaaaatagttgctggatacaataatagaatttctatatttataaatagcaatgacaaactaaactcagtaaataactttctgagaacatttaaaactggcgaatcccctagcaatttttcaatcaagttgcatggtgagttaaactcaacaaatatacttgaacttttatatgaccaaggctcttttattgaaagtcttggcaaagaagttgttacgacaatatctaatattacgctttttcgagaaaagggtattgagtattatttcgccaaggctttggctttattctggccattatttgaagagactatccataaaaataacataatgactttcaatcgaatgttcataatgttttcagatgagttagtgttgcagcaaagacgtgatttattcaaaaataaatatgtcagatttgaaaatctattagtagatgaattccaggacatttcacctcaaatagctaattggttaagggcaatacataaagaaaatgcaattttaagtcgaaggcctacgataatggctattggtgatgattggcaatcaatatattcatggagaggcagttctcctgatattttcatgaatttttcagattttttccctgtgcataaatcattgggaaaacataagacagtttttatgatggaaaactatcgttcggatgctgcgattcttaatgatgctgaaaaaatgatggctttagttaaagggaaaatcataaaagaatctatatcatgccgaaaacctgatggtgatgagcatggtgtctattgttatgggtatgatgataaaaaagatgataattcatggaaaaataaagcaattcagctaatttatgaacaattaaatatggtaaaaaatcaaaaacataaagataaaactcatattatagttttgagtcgaactaataatacacttaaagaaataagagatctttatatagaaagatatggcagtattaaaggaataaattttttaacgatccataaagctaaaggtttgcagggggaagtatgcgtgatctttgatgatagcaaagctcatataggacacattttaagaaatgaagtttataaacagattccctacttcaaatatagttatgatcaagctatgatcgatgagtcatatcgtttggcatatgtagctataacacgagggataaaaagagtattctggtttgcacaaaaaggaagtgatggggcattctctcattttcggtaa

SEQ ID NO: 268174 - DNA, 231 bp, Klebsiella pneumoniae
atgcagcacgtcctggatggcgattactcgccaaaatccgctgtcgatatttttgtcaaagatctcgggctggtgaatgacactgcccgggcgctgaccttcccgctgccgctcgctaccaccgcgctgaatatgttcacctccgccagtaatgccggattcggtcgggaagatgacagcgcggtgatcaagattttcaacggcatcaccctgccaggccataaacagtga

SEQ ID NO: 268175 - DNA, 1164 bp, Klebsiella pneumoniae
atgagcaaaatatttaaatcactaataacagtagcaggccgggagaaaatcgccgctgcaatagttaacggggaacgggtcgttttcgctgaaatgtccgttggagatggcggagggagtgcgacaatcccaggcgacgcgcaaacctcattagtcaatgagcgtttccgtacccagctgaacagcctgaaattgtctgataccgacaatatcattattgccgagatgataattcctccagaagtaggtggatttaccatcagagaagccgcactgtttgatgatgccggtgtgtgcatggcggttgccaacgtcccggaaacctataaaccagccatgtctgaaggttcggggcgctttaccatcctccgtatctggctggcggtcagcagtaccgaggctgttgaacttgtcgttgatccgggaattgtgctggcgacagtcgaagatgtgattaatgccggtaatgaaaccaaagattataccgatgagcaactgagcaatcatgcaggctcgcgggatcacccggatgccaccctgaacgaaaaaggatttacccggctgagtaacgccattaacagtaacgcccaggataaagccgccacaccgctggcggtaaggctggctgttgaggctgctatcactgccgcctgggagctggataaccccgtcggcacggtgaagttttacgcgcagaacgtgaacccaaatgagcgctatccgtggacaacatggatttacactggggaaaacagatctatccgtatcagtaaagccaacggtgagaacgttgggcagaccggcggaagcgataacgtcacgctacagcgggctaacctgcccgttgtgcagattaacgtcagcggcgaaaccagcgagttacctgcacatgagctgacaaccaggggcgccggcaggcacaaacatcaggggggaatggcggcgccgggtgaagtctgggatgataattatgttgttggttcggataatgacagccgccgcacccgaaattacacggatgaggcgggagaccacactcatattgtcgatttacctccgcacaaacacacgaccagcggcaaaaccgataacctgggtgaaggaagggcgtttagcgtggtggaagcgcacaccctgctgatgtgctggagccgtgtcgcctga

SEQ ID NO: 268176 - DNA, 252 bp, Klebsiella pneumoniae
atgaaggtgatgactgacagagtctttaaaggcattgaggtaaaaaatgccagtgttgttgtcggggggatacaaatcgatgaccagcacacgacggtaacattttctgtgagcttttttgcaggagattctgatgagccattcgacggtgaaatcatgtcattttcttatggtactgatttctctaataatctgttggatgagtgctataactacctgctaaatatcgaagggtaccaacgagatagttag

SEQ ID NO: 268177 - DNA, 2004 bp, Klebsiella pneumoniae
atggccagaattccagaatcctcattgtgggaagaagatattgagcttatttccagaaacgagcgcgtttccggagggttggacggcgtggcaaaccggccgctgaaaagtctggcaaatcgtacgcgctacctgaaagaagtcgccgatacatctgatgagttaattaaagaaaaagtcagtgcggtgaagaccttcaaagaaggggctacgctggattcacctcgcgaggaaatcctgcatggcgcctaccgcctggtatggactggggtatttcctaagaatgtccctgcgaattcatccccggacgagactggcggcgtaagggaaggggcgtgggcatatacatcagatggtgctcttcgctcaagcctgaaaaccagagacggcactaaattaattgccacccctgggagtggaggaaacctttatgactggataaacggtcagttgcgcagcctgttctattatctgtcacctgcaaaaatagcgtcagttattggcggagtggcaacagatataacggaagaacttcaggccgcaatgaatgacgacagaactatctggttgcctgcgggttcatattatgtcacgggacccgtttactcttccgccaattcgggactggtagggccgggagcccggttagcgtcgatagataatagagggtacagccacctgtttattattggtgagggtggctacctcagagggtggaaaccgtggcgtgggttctcaataaccgcttctggtaacaatactgccgacgcctatgcattttattattctgacaggcaggacgcgaacgggggcccggtttatacaatcgcccaggttttctctgaaattgaaataaacgccaatggaaaactgggcggcggctggtatttgcaggactgtttccgtgttgttattcgtgactgcggcgctacgggattatctcagccgttccgtctggtggggagcgttgttcagaccacgattgacaattttgtccagaatggtgacggcgccagggcgatgactggtcgcacgtatacttacgggcttacgaccgagacaaaaacttatggtaacggctctacattcacaccagaaggtttaaacgttgtaaatactcggtttgtaaaacaggatattggcgttcgagttgcaggcggcttgttccttgtttttgacgcagtagaggcggattacagcaaatataggggattccagtatgacggcggcagccaggtatcatttgataactgttatgttggtgtgcagtcgtaccgtgacgccgattttgttggtttcgatatccccgcccgtgctgctggcgttgccgaggcagtgaacatccggggctgtactgtcaatatgtcagaaaatacccacgaatcagcatcctcatataaatctctgggggtgagggttggtgattcgcctgtagggcaaaaaggcgcactgattgacggctgtacgttcagagggggcgggtacgacgcggggatttacgtataccgcgggtcctcggtatcaattaacaataaccggttccagtactcaggcgtgaatatcagcgttgcagagtgcaccaacctcgtcatgattggcaattcgggtaatggtgccgggaaataccttctgaattcgtcatctcccgttgcaacgtggacgttactgaataatacggaatcgtttgaatcagtaacaaacattaaccccggcggactggttgcaaaaaatgccggttacagctcagcgactctgcgcagaatagagcgagtgagcagcccggtgaatgtcagtgttgcgcccggggctgtctatcagcacgcagcgccagcgacaattccgctggcggcctctgttgaagtcggtggcgctattcctgcgggtcttttgtttagcgccgcgccagcatccacatcgttaatacgggctacattcttcaacccgacgagcgcaactataacgctgagcaccacgatttatttcgatatcacacacccaaattaa

SEQ ID NO: 268178 - DNA, 540 bp, Klebsiella pneumoniae
atgtcacctcaaataagtaaggatttaaaggcgctgatagtgcaatggaagtggaatttattaattctgcttctgatttctttggcttcctattggttaaaggataaggttagttataatgacataaaagatatattgggtgttttgcaaaatatatctgctgcaattttcactatagttgggttgtggattgggtttttatatcccaacgcaattgccagtattgtcaatgatgatgttgattacataaaaaatacgaaagacgctccccgaattgaaaagctaatatacgttgtgattacctcggcagtggttatgctatcaatcttatttgtttatctttttaaatcaatatggtcgggtctatcaagctcaatagtgcatactggttttattaaaatgataggggtcacttttgtttattttatgtgctggttacaagtaaagtgcgtttttagcgttattttgagcaatgtatcgtttgctaacaaccttcattcaagaatagtaagcgctaaattctcacatcatgacgattga

SEQ ID NO: 268179 - DNA, 1128 bp, Klebsiella pneumoniae
atggaaactggaatcgttacgttctttgacatcaaagcttgtggtttctacaggctgaagaaaaatgcagacgaattagagcataaatttggaacgcttgatgatatctttgatgcgttgcaggtatggctcgacgacaaaagtgtcgaggagtcaatcccatgggatacagagactcatccgctaagagctagaacctactcgcgaggagtggctgtagaccccgacacaaaagatcgagtgatagtaatgtatcgcgcattaggttccgcgaaaggacgcttacacgctgttaaaaaaacagcacctgtaggtgctgcggaaaatgacactgtaaaaactgaaacgaatggaaatgactatatttgggttgagccatgttattactggataattcctgagtataacaaaattgcatccattatatttcctcactcaggcgcagatactccaaggttaagcaattatattttcaattttgtagtaaatcacggtgattttggtagagaaaaggacactacatcttttacaagagcacgctcctcatgttcggaggatgatattcttgtttcgaagacggtttttaagtatgtagaagacgatggtcacaagtgtaattgcgtttttaaatttaagacggaggtaacgaaagttaataagcctggtgcgaatattcttgaggtacgtgatgaaattgtgcagacaattattcgtgatactacagtggcgaaagtggaggatacccgtcaacctctattacgtctaatgagtaatgtgctctcagattttttaggaacagaacaaaccaagtttacaaagcctaaaaaaattgaagttcgcgtagatggtgcaccttcggaagaagaaattaaacaactattagatagaaatgtagacgatgtcgactgggttgatgttggctttgttctcaaagactcctcccgcccattatggctgaaaaaatacatggcaagaactgcattgttcgtcagtgactctactggggatgagcatttctctccagagaaactactccaggaaataaaagctgttcgtgatgatttgcttcaaacaatcatttataatgaagaggtggaagaaaaatctttaaaaacggcggaggcataa

SEQ ID NO: 268180 - DNA, 333 bp, Klebsiella pneumoniae
atgaaaaataaaatatttgttaccagtaaacacccatgcacacctaattacgttccttctgaattaaagggctacttatctgttattgatgagtatgaagtaataaagagaacgcagaagggttaccgcctgcgtgtaagttatgcacaagaaaaagggtctatgtttttggatgaacattatgcctttttcaaaacatatgagtccgccctaacttttgttacatcggaagctaacaaagttgcccttaaactggaaaagacgaaacaaaaagccgtgaaactgatgcttcttgctaatgatgaattacgcagagtgaagggggcgttatga

SEQ ID NO: 268181 - DNA, 1077 bp, Klebsiella pneumoniae
atgttgataattgatttcgatggaaaagaaattgatattgaaggtaaaatatacaaatcattaaagctattaactcgagcaataattggcattaatttcataaacttaattgaagaaaagcataaaggaaccccccttctactctgcaatgattacactgaatcatttgaacatgatttagtatatggcaatttcacatctagaaacaacgagttaaaaaaaataaatttaacgaatgatactctgtttaatataatttttgactcgcaagaggatttatcatcctgcaatttcccgattcatgaatcttacgatattttcgaaatcgccagaactattgtaattaataacttttcttttgattacaagcttgagataggttcagactttgattatatcgattttttatctagaggtcttgattttatatcaaacgatttattaaacatctgcaatcttatacaccatttagaaaaaatagatataaaagaaaaacaatcgactataacattaattatgagatcttttgccagaacgataagttcgtatattgattctcttttcaaagagtttataggaacaatattcaccagcagtcattattttctagcaaaaaatatcatagcgaataaatataatgaaaaggagattaatgacaggattgatacgatcataaaaaacactgtttttggaaaaagattcaataacataatatccgatctttatgatctttcgagcgaaaatggaaatattttatacctaaagtacgaaaagcaatttgatatggttgataaattcattgaatgcaggaatgcgataacacatcattacaatgcagatcaagaatgttttgattatataatagaaaattgggagtcatgctccaatttcttgaaagaaatttatcaagaattcaactcatgtgaaagtgaaggtgaaggtgaaggtgaaggtgttaaatatttattgtcaaatacaacatccattatattatctttatcaaaagaaactgaaacagttataaaaaaaataatccctctatacaaaaaatcttcagagatcgtttggtttttctaa

SEQ ID NO: 268182 - DNA, 1065 bp, Klebsiella pneumoniae
atgatggaaaaagaagccatttctccagtgactggtgccattggcatgtcgcgacttggttatgttgactccctgagaggaatatcggcacttcttgttgtattttctcatgcgttccaccctcttacatttaatgagtattttataaatataggaaaagttggtgtctttatttttttcatgataagcggttttgttatcccgtattcattcaagaaagagccaagatgctatagtatatttatcactactagatttttcagattatacccagcatattggttttcattaattcttgccgtggttgtttattacttattaaatatccctccaccaacaataaaacaatttttagccaatataacaatgttccaaatgggcattggacaacaaaatataattggcgtgtattggactttgtttatcgaactgatattctatattatatgtatcattctagcgaaaaaaagatatttgtgggatgaaaagaagatggtagtaatgttttattttttcatatttctatcattactttcttcaatcataagatttgcactacataaaaaaataccagtggcgattccattgggactatcaatgatgtttttaggatatgcatggagagcatgtgttattgataataataattacattatgttaaaaattaaatggatgattgctgtatgcatggtttcaacatttgcatgtggatacctctcatattcatgggatcatcaaacagatgaaccatgggaaaacttttcttatgcctatgttttaggtatgttagtatttatcattatgactaagtatatcaaaataaatacaaggttaacatgctatctagggatgattagttattcattgtatcttgtgcatgacccaatcattagttttttctcatcatttaaaattgaaggaattttaaactcacagtatgaattaaaaataatggcaataatgtcagcaattttattttcgtgctgcgtctacaatttaatagaaaaacccagcattgcacttggtagaagaattgtaaagaaaataaggaaatcaaatgtctag

SEQ ID NO: 268183 - DNA, 1206 bp, Klebsiella pneumoniae
atgtctagattaagcctaaatacaatacaggagtcatttttaaaggcttttattgtcacttgtgtaatactcccaactgggagtattttcgatatcaaccttaaagttatattattagttgcattgctaatgctaactatattcaatgatcgtggagtatctgcgataaagattttcactggtatgttcattccattttttgttattttgatatcgctattggttacattattaaatggaaaattcataccagaaacaatagcgcagtctcgcgatattcttgttttttttatcatagccacatttgcttacgcaatggttggtagagacaggcgatatcaaataataaccaagttaattataaactgcctcatatttttaggcttgcttaaatttttaattttttcttactctattgtttcagggattggcgttagtgtcatagttaaagggatatcattatttttcaatacatccttaatgaccatgggtgatgatagcattgtcattagcaggataaattttatgtctgactttattctcccagtagctatatatttaaaaacaaaggaattcctttcaaaaaaaagcaagcttttcgacggtgttattattttaattcttctatactccgtaatagttagtatgtcgagattcatttggataatgggtttattttctttctttgttgcgatacttggagatattaggaagaaaaaaagcatatttataatttttattgctttattaggatctgtgtatcttctttctttgcaatctgtgcaggatgtaatcgagtacaggtcgtcgtctaaaggtgttgctgaatctgatagtacacgtgactaccaaggaattgctattagccatgaatttgaaaaagctcaactatttggtaacggacttggctactttgttccggggctcataaggagtgattctgctcattattcctatgaacttcagatacaagctttgtatatgcagattggcatatttggagcctcgtctcttttattgattataattataacattattaaagcaaactaaggggcttagcattaaagacaagctaatattttccgttttggttttttcatggatatctggtggatttttcaaccccgttatattctcctcgacaggaggggtggcatttttactattatatacaacaccggatgcaatgcgtaaattaaattag

SEQ ID NO: 268184 - DNA, 1521 bp, Klebsiella pneumoniae
atggaacgtagagatttcgcaaagaaaattgcacttattgttagcgccggtgctgcaggagctatttcaacttcatctttagcagaggaaaaaaataatatatctgaactttacacgcaagaaacaatgcatgacacagtgaatgtattgaaatttggaacgcaagaaaatgcaagtgatgccttctataatgccatcctatacttaaataaaagaggtggggggaatcttcttgtacctaatggtaattacatcttcaataagtcgataaaaacaaggataggatgtaagatatcaatatatacatcatctaattcaatcatgacgatgaggactgatggtgatatgttcaatattattggttcggaaaatgctgctttaagattttttggcaatggtgagtttatttatgatggcccagagacaaatagtgcatcctgcattagatttgtttctttaataaaaggtaaaaaatttgcctcaagttcttttgaatgtaacgggagaataagaataagaaaaggaaggaatgaatgggcttatggaatacatcttactgatgttcgagatggaattttaagtggcattcaaattgatggacttaacagggaaaacgcgccaagcagacaaatcgggatattaataaattcacaacattcaccttcagtatcttgggtcattaataatatgcaagttaatgatgtagatacggcatacgaaataatatcagaatctgttcctggagtagaaggtttgaaattcttcaattgtgatatgggaggtgtaagaagtggcatttactacaaaaacacatctacatacatgccacctcaaattgaagttgttggatgtcatataaatggtagagagtcgctcatatcagtaaacagagctgttagcgttcacattgtaggtggccttttatataagaaaggtattaaaggtggatttattgagtttaataatgttagtgatgcctccattgtaggtaccacccttgctgttattggtgaggattcaccagggattttaattaatggtagctcagaagagccatcaggtttaattagaatatcagactgtaattattgggctcatgggaaaaaaagtccatttattattttagtggggacaatatataaggttggcgtttcaaattcaatgaaagattctgatggtaagttttttgacatatctggtgttcgtgttggtaagtcaaccatcgcaatagatagagatacagttatgctgactcctcttgaaaaaggcgagtcttggggtggggttatagaaaataacgatggtatagtagatcttaacaatgctgtacccggaattgtttatctaaagagtaataaagtttcttctattcatggggccttgttaaacatagagtatacattagtatgcactactggacctattgaaatatcaaaaaaggataatttcattaatagtagtaagatggcgtctatggctactaaattcttttttgacggagaaaattatatttttatttag

SEQ ID NO: 268185 - DNA, 255 bp, Klebsiella pneumoniae
atgaaagttgtaaccagcagagtctttaagggtattgaagtaaacaatgccactgttgttgtcgggggtatacaaatcgacgacaagcatacgatggtaacattttctgttaacttttttgcagggggggctgatgagccattcgacggtgaaatcatatcacttccttatgatgctgattcccctgccagtctcattggtgagtgttataatcatctattaaacatagacggatatgctatggaagcacagtag

SEQ ID NO: 268186 - DNA, 858 bp, Klebsiella pneumoniae
atgggtactcgtattattgcaaccggcgcggactggtcaggtaagggaaaaccgaatatcagcccgttcatcagcatcagcgatgctgattttgcttatgatttccgtccgcgggcgagcaaatataatgacctgactaaaaaaacatctctggctctcatgcgcggcgcgctgtcagctggtaacgcatcaatagcatttaacgtggatgacaccgtgggtctggtcagcgcagacggatttggactcacggtagataacctgggggcggcatttatttcccatacgccaaaacccctggctattgacgggagcctgcaactcactgcgtatgtggtcggcggttatagtggtctcgcgtttcctgagggctctcagtatacaggttcacctggtgcgacgccgtctatgtgtaacctgttcgattacggttcgcgcgtgaacccggggtttggtttcacactgcagcgatccggtgcagctgcggctgagatagtagcgtttggcggtcgggtaaattctggagcaataaatgtgggaggccagaacctgcagggcgcgacaacgaaaaaatgcgctatttttctgacgtttgacggagtaaatttcaaggtttacaacgcgacaaccgactttgaacgaacggtcactgccgcatcgctgggcctcacggctgcactgccgatatcaaactcgatccgccccggggtcgcgttcggtacaacaggtttgaactctattgccgcgctggctccgacgatatatcagattgcgcaatgggggcgggtcctgacaaaatctgaaatggtcgagcagtataataaaacggtggcggcgttttctggcgtccccctttga

SEQ ID NO: 268187 - DNA, 321 bp, Klebsiella pneumoniae
atgagaaacaccaagttaactggtggttccgcaagcttggctttggccggagccaaagatacacgtgtcgagcttagaacaagcgtcgacataaaagagaaactgcgagaagcggcatctctggttggggtggacatgagtgcgtttattttgatggctgctacacgcgcagctcagcaaacgctggatgaacagcgaatgcgggtgctcagtgaacagcagtggaatcatctaaacgatattatcaattcaccacgtcaacctggagataagcttcgcgcgctaatgacggggaaaccgagatatgtccgcgaatattga

SEQ ID NO: 268188 - DNA, 1215 bp, Klebsiella pneumoniae
atgattggtggtatatcggatttttatcgctcctggcgcggcgttaaactatcagttgaactaagtttagttctaaaaaattggactttaagccttcttctaagtatgggaataactacttattctgaagtgttaggtttgtcttttaagatcatgttggagtggtatttctttgtttgtttaggcgttgttatttgtcgaatgtctattagggcaggtgcgagatttattcgtactttgggctataatacgcgaagaattgcgattgcgggttcgatgcctgttgctattaacttggcaaaaagttttattgatgagccatggttgggttttgttgtagtcgggatttatgacaataaaatagttaaaaataatgaaatagaatataaaggtgactttaataagcttattgttgatgcgaaagccggtgaactagataggatttacttggcgatgagtatgagtgatgagattgaaatgagagaacttataagaaatttaacgaatacaacttgttctgtcattttaatacctgatatttttacctttaatattcttcagtcacgaactgaagaggtgaatggtgttcctgttgtaccactttttgatacgcctataaatggtataaatatggtttttaagcggctggaagatatatttctgtcgttattgataataatactgatatcaccaatattattagttattgctgttgctgtaaaagtttcttcacctggtcctgtgatatttaaacaaaaaagatatggcatggatggaaaagcaattaaagtctggaagttccgctcaatgaccgttatggagaatgatactcttgtaaaacaagcaacaaaaaatgatgtacgtgttactaaagttggtagttttcttcgtaaaacatctcttgatgaacttccccaatttttcaatgtattaagtggtaaaatgtctattgttgggccgaggccacatgctgttgcacataatgaacaatataggaatataattgaaggctatatgctaaggcataaggttaaaccaggaattacgggctgggcacaaataaatggttggcgtggagaaacagataccatagacaaaatggagaaaagaattgaatatgatctcgaatatattcgcgaatggagtatatggttagatctaaaaataatattattaactgtgtttaaaggatttattaataaatcagcatattga

SEQ ID NO: 268189 - DNA, 270 bp, Klebsiella pneumoniae; identical to SEQ ID NO: 245331

SEQ ID NO: 268190 - DNA, 483 bp, Klebsiella pneumoniae
gtgctgctggccgtcaagcgttttcgggccgcgcagatgaatggcctctccctcctgtgcggcaatctgcacctcgtcattgatggagacctggtgctcaacgatcacatcgccggtgatgactgtccgcccctggatcagcacatcgtcgtcgagcagaatcggaccacctcgcagctgcgcctcgccgccgaccatcgcccgatgcttcagcaggcagttgccttcaatcaccgcattctctgccacctgcgaactgtagcgcacggtgggaatggcatcctctccgcgaccggcgatcaggcgcgcgtgcccgtatacccgggcgttatcgcatacccagacgtcgttttcttcgttcccttcaagtcttgcctggtcaaacacttccgcccgatgttcgacaaacgcatgctcaacgaaggcatcgccgtagatttgcgcctggtggagaatggcgaggcgctgacggtggctcgctga

SEQ ID NO: 268191 - DNA, 450 bp, Klebsiella pneumoniae
atggtagaaaaatcgaataagcatcaagacttcgcagaccgccttaaccaagagatgagtaaaaagaacttgtctgttaagcaattaagtcatgcgggacaggtcacctacgaaatggctaggcggtatacgctcggcacagcaaaaccacgcgatgaaaagctaattagaattgcggaatggttgaacgtgcctccagcctggctggactacggggcagtagaaaacgtagctgagtccaatatcgctccagaggcttccaacccctcccatccagataaagccgacgaaacagaattcaccagcttaagcgatgaagagaaacgcctgattcgagtcttccgaaaattccctgatgccgaggcaaacaacatgcttctggcctttgagattcgctataagaagctcctggagttctacagcgaatacgcagacccagacaaaaaataa

SEQ ID NO: 268192 - DNA, 825 bp, Klebsiella pneumoniae
atgttatttaatctgagtgtcgtgctcaaactcacctgcattccggagataaaaatgaaaaagagcttatccctcgtgttattgctttcgcttactgcctgtacccaggtagcactggcgcagcaaaccctgcgttttggtgtcgatcccacttttccgccgtttgaatccaaggcggctgatgggtcgctacagggctttgatatcgatctgggtaacgctatctgtgctcaggcaaaagtgaagtgccagtgggtggaaatgggttttgacagcagtattcccgccctgcaggcgaagaaatttgatgccatcctttcagcgatgtcgatgaccgataaacgccgtcagcaggtggcgtttagtgacatgttgtataacacgccaagtgccttgctggccccctcagccagcaagctgacgaccgacattgcttccctgcgcgggaaaaccatcggtgtggcgcagggcaccatccaggaaacttacgccaaaaccaaatgggcaccggaaggcgtcaacgtggtctcttatcccaatcagatggaggtttatcctgatctgctggccggtcgtcttgatggcagcctgagcgatgccgtctccgctgaacagggatttctgaccaaaccggaaggcaaggactacgccatcaaaggcacgctggtcgataaaaagatttttggcgacggtgtgggtatcgcgttgcgtaaaggggatgaggaaaacctgaagatgatcaacgcggcgctggaggaaattcataaaaacggcacctatgatcagctgactaaaaaatactttaaattcgaggtttatccctga

SEQ ID NO: 268193 - DNA, 1074 bp, Klebsiella pneumoniae
atgctattaccccaatacagcgttcagcgtgcgcgctttctggcaactgcggaaagcaaaggtgcggtgatgacgtcttacccacatcctctgcccggcccgcagggggaaaatctctacacggatgtggcgcgggtaggaccggtcaccgcatcacgcttgatgctggtggtttccggcactcacggtgttgaaggctactatggctcggattgtcagattgcctggctggatacgctggatgaaaaagcgttgcctgctgacaccgcagtattgttgattcatctgctcaatccttggggagcggcccatttgcggcgcgtcaacgaagacaatatcgatctcaaccgtaattttatcgatttcaaccagccggtccccgctaacccggattatgcaaactggcacggtatttaccatggagaccgttacagcgccgatcgacaactggctgaagctctcgggaatgtgggctggcaggcgctaaaacctgtggtggaagcagggcagtacgctgctgccgaaggctttttctttggtggtcatcagccgtcctggtcgtatcacaccatggcggcgattatcgaccaacatcttcgggcggcgaaaaccatcatcagttttgacctgcataccggtgacggggcctgggggcatccgatgctgttgtcgattgcagaacagcgttatgtcgcgcatgactggggtaaggcaatttacggggaatggctgacattgttgtttaccggagccggacgtgacagcgcaacgggcgtcaccgcgacggcgacgggttatctgtcgcaatacctgctgagtgcactcgccgacacccggattttgccgctggtggtggaatgtgggacatacccgggggaagatatgcatcagcgggtgcgggaggatcactggctgcatctctatggcgatcccgccagtgcggcaggccaggtgatcaagcaacaactggtggaaggattctggcccggcgatgcggactggcgtgccttagtggcttttcgcacgcagcaaatctttctgcgcggctggcgtgccctggcggacacgccctga

SEQ ID NO: 268194 - DNA, 774 bp, Klebsiella pneumoniae
atgtctggctctcttgttcgtctcgaccggcatccgctggccgatcatgactggcgtcaacgctgtcgtgagcaattaaaccaatctggcgcgctggtactgcgtcagtttttacaacccgcagccttacaggcgatcatcgatgaaggccatgcgcagcgccatctggcttatcacaccctcagcaaacataatgtttatctgatgaagcctgatgaggcgttcccccctgagcacccgcgtaatcgtgatgtgatcagtaccaaaggctgtatcaccgatgatgccatcgctgccgaatcaccgttgcgtcagctttataatgatgccctgttcaaaagtttcctgtgcgaggtactgggtgaagaagcgctctatccctacgctgaccctctttcctctatcaacctgcactacgcccccaacggccaggagctgggctggcacttcgacaactcctcttttgccatcaccttattggtacaaaaaccgctggcaggcggcgtgtttcagtacgtgaaggatctgcgtgatgccgacgccggtgagatgaacttcgcaggtgtcgaggcggtgctggatgaacgccagccggtggaagcgctggcgattgaagccggtgatttggtgttgttccgtgggcgtaactccctgcaccgcgtgaccccgaccgaaggggaagtcacccggatgctggccgtgctggcttacaatactcagcccggcattgcgttatcagaaacagcgcgtatgacattttacggcagactgtga

SEQ ID NO: 268195 - DNA, 909 bp, Klebsiella pneumoniae
atgcctgcccaatcgccgcggttgccaaaaatcagcgttatccagtcatttaaagttgccgccgaactgggcagcctggcaaaagcggctgcccagctggcgttaactccggctgcggtcagccagcagattcgccagctggaagagcaactgggtagcgccctgtttttgcgcacgcaaagtggtgtgatgctgaccgaaaccgggaaggaatatctgcgctatgtcaccgaagcctttgatattttgcacctcggccagcaaaacattcgccatgccgccagcgctcccaggttaacagtgtatgcgctaccggcgctggcgtcgaaatggctgttgccacagctggcgagctggcgcacctgttgcccggatatcgatctgtcgttacatggcacccatgcccaggtggatttcaccgccatccccgccgattttgttatctgctttggcgaggatcgttatccgcagctggataagcagtggctgtttcatgatgaggtgctgccagtcgccagtccggcgttattacagcgctttgcgcccggagaggtcttcagccatgcgcctttaatccacctcgactggggcaacgaagggcgtttcctgcctgactggcgtagctggtttaagaccaaaggcatggacgaaccgccaccacaacctgcatttagcttcaatctgacctcactggcgattgatgccgctgtggccggagccggattgctgttggggcagcggcgactgatcgcgccggagctggcgcgtggcgagctggtggtgattgacgaactctgcctgcccctcagcaaaccctattttcttgcctggccacagcgcaccctgagccagccaggcagtgaaacgatgattcactggctacttgagttgggagcgggctgccaatag

SEQ ID NO: 268196 - DNA, 489 bp, Klebsiella pneumoniae
gtgcagaagaaactgctggatgcgctgcctttcctgtcggccgattcttcagcttgccgatgggtgtgcctgcaggaggacctgctgcgtgctccaaacaacattgatgcctatgcccgtggcgtcaatgactggcttgctttctgccactctgttgccctgacggctgctgtcgctggacgtgatacggtcgcactctatgtccgcagcctgcataccggtcgccagctggcagctgccactatccgccaccggctgacggtggttcggctttactgtgactggctgtgcgaggagggaatgcgggagaagaatcccgtcaggcggggtgtctggaaaagtagcggaaggggaatgccgggcatcgtgccggtgcagcggaggatgccgtggatacttggtgaagaagactggctgcgttttctgagagtggcgggccaggctgataacagccaccaactattggcagcccgctcccaactcaagtag

SEQ ID NO: 268197 - DNA, 435 bp, Klebsiella pneumoniae
atgaatccgtttattcagaataaaactcacatcgctggcgtgtgtcggtccataaaaagggatgataagaatattatcagtgtcgtgttactgaccgggcgtagtaggttcatggcggagcccgtacctaactggttatgccgtaattgtgatgaccttgcgaacaagttcacctcgtacgttacagagccggtgttaagtgttgaggaagtcggctggatcgaaagtgatttgcgtaagtctatgttaccgcaaactctgttgaccgacctcggccatgtctattcattgaaactaaaacaccggcaaccgatatcggtgccacacagagtgacctatttcacgttactgacaaccaccctgttcttccgggcgctgaaaaagttattttcgcgtaagcggtctgaggtcatccacaagcagtatcgcgaatag

SEQ ID NO: 268198 - DNA, 126 bp, Klebsiella pneumoniae
atggaggtgcccgaggttaagcgcctgaagtcgcttgaggaagagaacgcaagactcaagaagctgcttgccgaagccatgctggacaaggaggcacttcaggtggctctggggcgaaagtactga

SEQ ID NO: 268199 - DNA, 642 bp, Klebsiella pneumoniae
atgaagattttccggccattatggcgcgacggggcttttctggtcccgcagcagtttcagcaacaggcccgctgggacgcgtacgtcgccgatacggtctcccgcatggcgctcgcccacccgtggggggtattgcgcgcggagtttgacgcgagcgcgctcaccctttcccggctcaacgctacccggctgatcgtgcgtttcgccgacggaacgctgattgacaccgagctggcggatattttgccaccggtccgcgatgtatcggacgtgatgcaggacagcgtggaggttctgctcgctctgccgctgctcagcgccagcggcggcaatcttgatgacggccaggagagcgcccgcccgcgccgctggcgcgccgagcaggtgaccgttcaggagctggccggccatgaacgcagcgagctggccgttctgcggcacgcgctaacgctgcgtctctccaccgaggaaaatgcagccttcctcacctgcccggtagcgcgtctggtgcgcgacgcccagggcagtggatcgttgacccggaattcatcccgccgctgctgtcgctggcggcaagcccgacgctggtcagcgagctgggcgagctgttacatcgcctgcaggcccgacgcagacgcctga

SEQ ID NO: 268200 - DNA, 561 bp, Klebsiella pneumoniae
atgaatagtcgagtatccaaccctgagtcgtacatattttctgcaataatctatattggtaaagataacttcaccagtaacgatgtggctcaaattcttatcgagcgattttcacttccgaaaagttattttaaggcaaaagcttttgcttataaccaaattcagtgtttagttagaaaaggattattgagtaaagtcagaaaatcaggcgcgtatcaatatgtatactcagtcacatctgaattcaatgtcgtaaaggaaagcgtagagttaattgaggtaccccaaaaaaattcctgtcaacttgttttaagtgctaccagccatgaatacagaaatgtaaatattcaaataagaactcttattgaaaaatacagcagcgagttggaaaaagtatcaggagcaaaggagatttatgaagaattgataattgccgtgccgagcagggaaaatgaattcaggaagctttctctcgagcaagagaaaaagcaaattaagataaatgaaaaaataaacacattaattggaatttttaataaaactattgcaataaggcaatga

SEQ ID NO: 268201 - DNA, 1128 bp, Klebsiella pneumoniae; identical to SEQ ID NO: 235796

SEQ ID NO: 268202 - DNA, 192 bp, Klebsiella pneumoniae; identical to SEQ ID NO: 211482

SEQ ID NO: 268203 - DNA, 390 bp, Klebsiella pneumoniae
atgaaaaacaacaccgaacagccggtcagtacgaactctcatccctttcgccggatacctgtcatcgttgctctcgtgcttttcgccctggcaaccagcgcgtttctctcacgcgtggttctggagtactccacaccgcgggtggtggcttttgatatgaagaagacgctcgacagctttatggacagtgtcagtcagaagcagctgacagaagcgcagtcaaaagcgctctctgaccggtttaacgacgcgctggagaagagtctggcggagtatcagcagcagcatcatgtggtcattctggtttcacctgccgtggttcagggcgcgcccgatgtgacccgcaacatccagcacgacattgcccgccggatgaaaggagaacagtaa

SEQ ID NO: 268204 - DNA, 1497 bp, Klebsiella pneumoniae
gtgatctactattccgcgcatctatttagtgaagctaaagaattaaaagatgaaatcatcgagaattgcattttagctcatattttttctgacgatggagtgtcagaatcatcattgatcgaaaaaactttaaatgatctaggaaataaatctctgagtgttcaggttgtaaaatcaattaataggttaaagtcgaaaggaaagataagaattattgaaggagcttttactttaagctcagaggttagaggtgaattgaaattatcgagagatgattttgaacaggccaagttaaaagatcttaatgaattgatgagttcttttaatcttgataagaacgatgcagaattattgattaatatttcccttgagattttgtcgagaaagcagttatttcatggcgatgaagcatactcagtacaattacaagattttattgccaaacatagtcttcagaggagaaagcacgtcctttatgaggctttatccaaattaacgtctgctcgaattactgcatatggagatgcaattagccacgtactaaagacaaatactttcgatatattcagatcgcttggtagaagtcattcgataaatgtaattctagattcaagtgtagctatgcctatgttgtttggactaagcttttctaaagtaaagtcaagatacggaatcggcgcagctgctatcaacgaaatgtgccatgctcataaatttaagttagttgttcctagaccttatttaaatgaaatggcaagccacggcttaaaagcgttagaatatgcacatatatacaatatcattggtgatgagtctagatccatcttaaaatcatcaggtaacgcctacttgagtcattttggtcatattcgcgatgataagttaccaggctatgaaatgagtatcaacgactttctctcatactttgggatccaaaataattctactctagctaaaattgagagacgtatagaggatctattaagctcactagggattgaggttgtaaatatgcctcgctggaaaccggagttaagatcagagatccatgcacaaaaaccacaagaggcgtcaataataatagaccatgatgcctcagttctcactatgttgtctgatgctacggaagaaggatatatttttgctacttgggataaagttttaacagaactagtagaagaaataagcagagtatatgctgataccccgagtagtgttgttgattttctctcaatggcaaacgattcagaatttgaaatggagcaaactgttagcttacttgattctttagtttattgtgatgagaaaaaagcagaagctctggctaagaaaattgaggcgataaaatcatctgaaactgctttttcgcttcaacggttcattgatgacgcaagaaaaaaatcatcacggatgacagatcctctagatattgtaggtgtatttttttccgagttaaatgatggagatgaggaattatcaggcgtcgacagcaattaa

SEQ ID NO: 268205 - DNA, 1002 bp, Klebsiella pneumoniae
atgttaaagaaaatgttttttttgctttttatagtaagcgtgtttaaatgccaagcttcagattttcttattggggtaaattctcacttataccaaaaaaaagatgaggaaattatatcaacaattgaaaaagtaaaatctcttggtattaaagcgataagagtagatgctccttggaaattagtagaacaagtaaaaggtgcttactcgattcctccggcttgggatgttattgtagattacgcgtctaaaaataatattgatgtattatttatccttgattatggtaataaatattatgataatggtgataaacctatttccaaagatgcggtaaaaggatttgtcaattatgttgattatctgacaaaacacttttctaatagagtgagattttatcaaatttggaatgaatggaataataagaatggagatactacacctgggaaggttgaagattataaggttttggttaaaaacacatatcctatcataaagaaaaatgctcaagattcaattgtaattacaagttctttttctcctgctgcttttaataaagccataggattagaaagaagaggcgattatttcagggattttttaacaacagacatggtgaattttactgacgcattgtctattcatccttatacgacttatcgcaagccgccattccatcaatttaagtactatacgaagcaaattgaatatgcgatggatttattaaagtctggaccttttaaaaataagcctatatatattactgaaattggctggacgaccgcctctagccctgttgcggtttctttaaatactcaagctcaagatttgaaaaatgcaatttgtcaggcaaaaaaattaggttatgcgggtgtttttatctacgaattaaaggataatcacttataccctaaggatccagaagatggcttcggaattttggactcaaaaatgcaaaataaagatgcggcgaatattatacaaaatttagcctgtaactaa

SEQ ID NO: 268206 - DNA, 339 bp, Klebsiella pneumoniae; identical to SEQ ID NO: 231217

SEQ ID NO: 268207 - DNA, 1074 bp, Klebsiella pneumoniae
  misc_feature (969)..(1003): n is a, c, g, or t
atgtatattgtttttttatgtatatcactaattgtttggattggtatatattttttttctgatttctgggtgacgattttagctccaggggtagatgctagaacaaagcttatcaccaaagatatgcttgaagttatggcattatgtacacctttttatttatgttctgcaataataaattatgtttcaatggcgcataatgactttgtaccaatgtctatgcgagctatcgtgcaaaatctaggaatgttattaggagtatttgcagcatattatcttaataactataaatatttagcatgggggtttactggtagttatatatttttctgcttttgggctttcgcaaggaaagattccacaacgctgtttagtcgaccaacaaaatttacaaaagttaatgctagggaagttttcggtgaatttggtagcataatgaagccgttgcttcttttgccatttattttgcaaggtaatattgtccttgaaagatctttatcatctttaattagcatagatgctgtgtctggtttagattatgcaaggtttataactgatacaattaactttttagtagctattcctatcgcttttgctggtctttcgaattgggcgtcgtctgatatttcaaaaacaaaaaataatttaattaatataaatagattgcttattttcttcggatgtagttgctcgttttttatatatatcaatgcagaagatatagtatcgttgctttttaaacatgggaaattcgataatgattcagttgttataactgctaattatctacgtggcatggctattggtttgtgggctcaacttattggctatatttttattaaagccttgaatgctcacatgcaaaataagaaagtacttatggccgtttctctctcagtcctgtctcttatacacatctccgagcccacgagactaaggcgaatatcgtatgccgtcttctgcttgaannnnnnnnnnnnnnnnnnnnnnnnnnnnnnnnnnnttttttttaatgatacggcgaccaccgagatctacacactgcatatcgtcggcagcgtcagatgtgtataa

SEQ ID NO: 268208 - DNA, 585 bp, Klebsiella pneumoniae; identical to SEQ ID NO: 268135

SEQ ID NO: 268209 - DNA, 714 bp, Klebsiella pneumoniae
atggattttgaaaatgaattgaccagtaagatccttgatcccattcacggcactattcgtttgacgacactcgagattgcctttatcaatcaccccctgttccagcgcttacgcaacattaaacagaactcttttttatataaggtgtttccctctgcggtgcacagccgcttcgaacactctctcggggtgctgcatttatcaagtgaaatactcaataatttacgcctgaatgcgatacggtatcaaaagaaatatgatgatggccatgtgtttggtcatatcgatcagataccaaaacacaacattcaggagttgagactcgctgccctgatgcatgacatcgggcacgggccggtatcccaccagtttgagagttttatgcctggtaagcacgaattctccgatgttctccccacggcctaccattcaatcattgatgtattaagcaagccagaacagaaagttgaacatgaacagctttcgctgttgttcagcctgatgatttatcatgatctgagaaaacaaggtaaggtcgatgacgaaataaatatcgaaaatgtgttaaaaattatcgaaaaaagatacggtgaccaacagatcattgaggaaattaatggaaaggcaacagatatcctgccgttaatgacctcgatcatctcttcctgtccgatcgatgccgaccggatggattacttgggctttgttgaataa

SEQ ID NO: 268210 - DNA, 519 bp, Klebsiella pneumoniae
atgcaaaatatcgggaggcaaggagaaatgattgggaaattgataagatattttatttctttctgctattgttgttttttgaaattaaagtatcgacaaaagttaattatcaatccatttaaagtttatatctcgatattatcagaaataaagattactggaactggtaaagtccaaatagattcctctaaagggcgtgtttatatttccccttattcatcgattgtaagttctggtggcaatatatacatagggagtggtgtgttctttaataaaaatgtaaatgttgtcagtcacgataatatttacattggagagaactgcctttttgggcacaacatatgctgtttcgattctgatcatagatataatgatctttctaaagatatacgttatcaaggttacgctaaatcgccagtcagaattgagcgcaatgtatggatttgcgcaggtgtaatgataacaaagggcactattattggtgaaaacagtgttatcgcaggcaattggctttgttga

SEQ ID NO: 268211 - DNA, 159 bp, Klebsiella pneumoniae
atgtttattttgctcaacaatctctttgactacacgaatgttattgtcgacacctttttgctcatgcaatcgacaaacagatattattatttttttttctttcgcaatattgaagtcaacacgaagcttttcttttttatcaatggagaaggagaataa

SEQ ID NO: 268212 - DNA, 198 bp, Klebsiella pneumoniae
gtgctgtgggccctcatggtgttgctgatgaatatgaatgacctgagtgaatcggcggccgggctggggattgcgctgctggcggtgatggtgtgctcatctgccggagagcgtgtgaaacgcttctggccacggcagttcttcgtgatgttctatgccgttcacctggcggtactgggtattgtcgtctcaatgtga

SEQ ID NO: 268213 - DNA, 633 bp, Klebsiella pneumoniae
atgttgagtaataactgttcgattctgctgattgacgatgatgccgatgtgctggatgcctatacgcagctgcttgagcaagcggggtatcatgtcagtgcctgtaataatccgtttgatgcgcgggagcaggtgccgaaagactggccaggcattgttttaagcgatgtctgcatgcccggctgctccggtatcgatttaatgacgttgtttcatcaggatgacgatctgctgccgattctgcttatcaccggtcacggcgatgtgccgatggcggtggaggcggtgaaaaaaggggcctgggatttcctgcaaaagccgatcgatccgggcaagctgctcacgctggtggacgccgcgctgcgtcagaggcaatccaaacagtatcgtccgcagctggaagcctatgaaggattatgtgaggacctcggcgaaaccccctccgatgtggcgctggcctggctcctgcagaatcctgtcgttaccgctccactgattgggcctcgtacggtcgaacaactccagcaggcgcttcacgcaacgacagtcacgctatcagacgacaccatgagctgtctcgacgaaatctggcccggccccgggggagaagcgcctcaggcttatgcctggtaa

SEQ ID NO: 268214 - DNA, 282 bp, Klebsiella pneumoniae
atgctgtttaaacgcaaattcacactggaagccgatccggcgtcgtggactgccggcgctgcggttatctctgctgccgtgggtggatattctgcaatccagaacgccaacaaaaaaggctcggtaataaaacagtcgtcgccggttactcaggatacttcgattgcagaatccgatgatctgctgcgccgccggcagcggcaggggaaccagagcaacgtaacgggagcttctggaaccgccgttaatacttcaggccagaaaacgttgctgggtggctga

SEQ ID NO: 268215 - DNA, 402 bp, Klebsiella pneumoniae
atgactgagcccgtaattgtccgccttgaggagttccacattcatgaaatattccaggacccattgccgcaggaggctgttgcggcgctggtatctttcccgtcgtttgcgatggaatacggggaaaagacacttgcggctggcggagccatccagatagcacccggtcgcgtcagactctggctaaaaaccgccaccggtgcggagttgttccccgttcatattttccgtactgcccggcgatttaccgaaatcgcgctggccgaaaatcatcgcgtggaatgcatctgcaccgataacttatccgcccgcgtcgcaaaaatgctcagttaccggcaggacgctattatccgaaattatcagcctggctgtgacgccagattattttcaatcttgaggtga

SEQ ID NO: 268216 - DNA, 3027 bp, Klebsiella pneumoniae
atgaccgctaattatcccgccagcattctgccacccaacgccaccgccgtggaacgggccatagacagggccagcgccgccgcactggagaggttgccggtatatctgatccgttgggttaaagatccggacagttgcccgctggcgctgctgccgtggctggcgtgggaatatcaggttgatacctggaatattaactggtcagaacaaaagaaacgcgatgcgatcaagcgcgcccactacatccaccgccatcgtggtacggtcgccgccgtccgtcatgccctggtggacagtcctttcgggacggatattgttgaatggttcaatcagaacccgaaaggggatccgtatacctttcgcctgaacgtgtatcagaacgatttgccggtgacggaatacgaccagcaggatctaaaactggcggtgctgcgcgccaggaatctgcgcagctggttttccgttcatgtatttggccgacttcagggaacctcgtatgcggccggttacatgtacgccacggagaaaatcacgccgcgctttgtcccgttgcaggtggttttatcccgctacgagctgaatctggcccccggggacgcggaaacggtcacggtgacaattctccccgaatacgcggaagataaaacctttacggtaactacatcggatcaaacaatcgcgaccgcccggatagtaaacggcgatattctggttacgggcatgaagcgaggtacctgttcgatcaccgttacgacgactaatggcgtcagtgcggtgatcagcataaaagtggtcgcggtaatgaagttcattacccgcatcgacagtgcaaccaggccaatattctttgctcatatggacgagggtttcacggttgactatggcgacggcattgacagccgggactaccgtttcgatcccgccagtgaagcttcaggttgggttattcctacacgtgaattagtacagggaaaggaatacaccatcacggttaagaacacggaaaccgcctgtctgcgcagccgtttatctaactattcttcgaaactgaaccctgttgtggaattgattagtgttacaggggaaagaggtcatctttcagggttcgctttggataccaccggattaatggctattcgtcccggagcatttgacgatttgccaaacgtgaataactgcaaaaatatttttaccaactgctcgtcgcttgcaggtattccggcatcgttgttttctcgcatgaagatagaggatttttcagacgcattcagagggtgtacatcgcttactgaggttccatcggggctatttgcaaaccagcctgatgcgatcgacttctcatcggtatttgcaggctgcaccggcctgatcagtatcggcaataatctgttccacagctgtgtatctgcggtgaatttcagttacgcgtttgatggttgctcaatgcttgcaaatatcggcacgggaatatttacaggatgcggttcagcagggacattctcttatagcttcagggcgtgtaaaaatcttcttgtcttgcctgctgatatgtttgcggatgttccgggcggcgcattcaccggcgtattccagaattgtacggcactgacggcaattcccgccaacctgtttaaaacatgttctgaagcgaatcattttggcggtgcattcactggctgttcgcagcttctttctgttcctgccggtctgtttgcaggtctgtcgaaagtcacctatttcgggacagtcttttctggttgcagttcgctgaaaacggtcggcgcgggtttatttgccgggtgcagccaggcgcagacattcgcctctgcattttacagctgccgctctcttgaaactgtagcgaaagatattttcagcggctgcgtagaggtgacgacctttgccagtacgttttatgggtgcagcagcctgacggcgctcccgtcttttactgactgcgcgaaagtcaccactttctcatacgcttttgctaactgtggatcgctcacgaaaattgatgctgatgcttttgctgagaaagcgctggtaacgacattcacatacgcttttgtaaactgtacttcgctggtttctgtggaggacggtgcatttcggggatgtagcgcgttaaccagcctgggctatacgttttcaggttgccgctctctggtttctctcgcgggagatatgtttgccggttgcgccaaagtgacagccgtcgatttcttgttcgaaaagtgctccgcgctggctggactgccaaaacaactattcagcgacatggtgtccctgaaaggcatgggatcgacattccgggattgcactgcactgatcgcgctaccatccggcctgctcgatggttgcgttaatcttacttcgttaacgctgacattctcgggttgtacctcactggcggtattgcccggcgatttgctgaaaaacaacattctgctgtccggtgccggatcgacgttcttcggttgcacctcactggtaaatattccgccgacgctgttcgcgtcctgctcgcttattacctcgtttggcgccacgttccagaataccggcgtggaggaaataccggaaaacctgttcagcggcaacccgctggtgacctcttacggccagactttcaggggctgtaaaaacctgcgctcagtgccagccggtctttttgccgccagcataagtgccacggtattcacgaatgtcttttcggaatgtagtgcgctggaaatcgtcggggcgggattactcaacaccacggcggtaacgacggtgggttatctgtttgacggctgcgcgtcattacacagcgacgttaacacgatatttaatcttgcgagttacccggagattgtcaccacaacggcaatattcaggagctgcgcattactggccggcaaaggcctggcatttatgggcaaagtgccgaacgtcaccgcgcactattacgcgttttatgcatgtgcaggcctggacgattacgacgatttacccggcaactggataacgaacaaactatga

SEQ ID NO: 268217 - DNA, 153 bp, Klebsiella pneumoniae
atgacctatatcatgcatcaaagccgcaagtctcaactcctgaacattgtgctttggaataagacttaccgcattaaaaacatgcccatcatcatatttttttccataacgaatagtattaagatgcaaattcttaagtatctcattagataa

SEQ ID NO: 268218 - DNA, 294 bp, Klebsiella pneumoniae; identical to SEQ ID NO: 203057

SEQ ID NO: 268219 - DNA, 237 bp, Klebsiella pneumoniae
atgaaaatgagttttcacaaaaagcctgttattgattttgtcctgagattaacgctaacaataatcattatttctccggtgatttatttctcctgggatgccgtcaaagggacgtcgggaagtgattatgtcgaaagtgtggtctttattcttatggtaggctttttctggttcgtgagttatctcttttttacttcgcttgccgcggtgttacggaaaaagacggaggaagaatga

SEQ ID NO: 268220 - DNA, 405 bp, Klebsiella pneumoniae
atgaacaatagcgatccatctcatattgatactcaaattcgtttgtcgcgaacttctgttgcaaaagtcgttttccccaccaccgttaaccatcatgaaacattgtttggcgggactgcgttgtcctggatggatgaggtgtccttcattgctgctacccggttttgtcgaaagcgtctggtgactgtttctactgaaaaaattaattttcagacgcccatcccctccggttctattgttgaattggtggcggaggttactcgcgtgggccataccagtttaacggttactgttacaatctggttagagagtatgtactccgaaggacgcaaagacgtaatcaacggtcagtttaattttgttgctattgatgaagaaggcaaggcaacaccattattcgattga

SEQ ID NO: 268221 - DNA, 132 bp, Klebsiella pneumoniae
atgaagaacagcagcattatggccttagcgctcgcgcttcgcaacgtcggagcaggtcaggcggttaaagtgccagcaatgaccggggatcagttccgccagttgctggcctggctggaggtgttgaggtaa

SEQ ID NO: 268222 - DNA, 906 bp, Klebsiella pneumoniae
atgcacgagacagaaaaaactgagttccgttacgaactatttaaacgcctccaatattcaacacacattgtgcgccgtgataccgggcaggagataaaaaaccgtcttgaaattgccagtttctacggctacatgcgtgatcagtacacgagctactccgccagaggcctggagttcttcgagtcgatggaaagcatgggactgaaatttcaggatactgatcgccggacagttaaaaaatggctggacgtgttaaacgctatcgggctggtgatttcagacaaacgggggaaggatgaacgcggctatgatcgctattaccacacggtgatccccttggaggaggtcgccgacaaccttcttttctacggttcagcatcaatcagcggtgggctactggctgacggaatgttgatccgcaagttggagaagaagaagccacgcgggaaaccgaaacaaaaatccgaggggaaacatgacgatggcaaatccgaaatgcagacagcaaccgatgatcagagtcctgacctggcctctgagcctgccacgcctgctgttgtggaatctgaacctgagcgcagcgacgatgatcgcaccaatggtaatcatgcagtgaagccgaaggagtcggaaatttttgatgagcacggcgtcattactgaggcgtttatcaacaacctaaacagcctgacaggatacgacgaaccacgccgcaacgatgacggcacattgcagagtttccgttacgtctatgggatagcacagcaaacacaggataagcgggacggcgttaccgttcgccctcttgatgggtacatggcagaggcctgcgagtggcacgttccgccgcatctgttatcgataccgacaacagagctggaatacgacgaagatcccgaattttaa

SEQ ID NO: 268223 - DNA, 369 bp, Klebsiella pneumoniae; identical to SEQ ID NO: 205538

SEQ ID NO: 268224 - DNA, 297 bp, Klebsiella pneumoniae
atgaagatttcattgcttggcgttggtaacgtgcctctgctgtctgcacgtatcaaaacactggatgatgcagggttgctgaacgtttccgcgctcgccaggctactgggatgtgctcgatcaaccttcctgagcaaggtcgccagcgtggggctggaagctgcaattctgcattactccgccatcaaaaagcagcgggatgtgctcgccacactgtcagagaaagacgccgccgcattcctcgctgcctgcaatgcaggtaatagcgcaagcaagaccagcagcaccaaacactaa

SEQ ID NO: 268225 - DNA, 1062 bp, Klebsiella pneumoniae
atgaatgtcgtgaatgcaatagcgaacctccccaaaaacaggctgtttgattatgtaaatgaagacaatgcagggaagattgccatagtctcgattcagcagcctgaggggccaattcgaatcaagcgtttcaacccagtgaaaggtgaaacgcttgaaaatgccagggttgatagtatctcaagccagatgttgtggcggctggcaaatgccatccaagaggatgcacctatcaatgttgatagagtgttaggtgccagctataacactcgttcagtcattgaaagcctgctggcgcatacgccacaattctattggtgtaaactggatcgattggaagttatcaacactcgtcagacggttaaaaaaggtcataaacacctaatttacataccaaatgctccacatgaaaatggtatccttacagaatacaaggcaaatattgttatttcggaaatgaaaactgaggtggtttaccaaagcgtagatttagaaaccatccgcccagttgaaggcatgtcaattgaggagaccaggagacatgctcaaattcaaatagcccttgtgaaaataggccatcatttaggctacagaacatgggttgcagccaatgatcgcggtttaaaatataatggaaaggctattgctcaaatggacggcgttatagatagtctttctcacgaaagagtcctacagtcatatgatgatgcgatcaaagaagcacggctaattgattgtatttggtttagaaatggtaaattgatgcctgcggttatggaaattgaacatagtacaggtatcaagagcggcttaacaagaatgaagcagttttgtgacttcgcgccacgactgcaagatattcgatggactatcgttgctccagatgaatatcgttcaaaagtcatcgaattttctaatatgccgcaattccgtgaacttgacgctaaatttttcccgtactctgctgttgaagaattatattcgttgtgcgagcggagaaaacctcaagggattacagatcagtttcttgattcattcatggaaaaatgtattaagcactaa

SEQ ID NO: 268226 - DNA, 1140 bp, Klebsiella pneumoniae
atgtccacacttaaccccgcaatcttctctttcttttctggctctggttttttagatcttggatttgaaaactctggttatgaagtggtctttgtgaacgaatatcactcaccatttatggccgcttacaagcattcacgcgcggtaatgaacaaacctatacctcgttttggttatgcggaaaagagcatagaagcagttgatcataaagagttgaaggatgcaatcaagattctcaggaaagaaaaaagactgatcggcttcattggtggcccgccatgcccagacttttctgttgcaggcaagaataagggacgcgacggagagaacggtaaactatctcaaagttacattgatatcattgtcgagatgaaaccagacttcttcctctttgagaatgtcaaagggttgtaccgtacaactaaacatcgtgagttttttgagcatctcaaagagcagctaacgaatgttggatataccctgcatgagaggctgattaactctattgaatatggtgccccgcaagacagagatcgaataatccttcttggttttcagaataagaatttatcaaaaacctttgaatggtctggaagaaaatatcctgatcgtagtgccttcgattatgaatggcctactactaatgattttgcggtggattcatctatcgagatgccaaaagcgctaccatcagagcttaccgtagagtattggtttaaaaagaataacgtttctgagcatgtaaatgccaaacatgtcttcatcgcccgtgctggcttggttcgattcatggcagtagccgaaggtgatgacagcaaaaaatcatataaaaggcttcatcgctggagatactctcctacggctgcgtatggaaacaatgaggtacatttgcacccttacaaaccacgcagattgactgtagcagaagctcttgcaatacagtctttgcctaaagagtttgagctaccggcttacatgacgctttcaaatatgttcaaaactgttggtaatggtgttccttatctcgcagctttcgggatagcaaaatcaatattgaaacatttagggataaaagatgaacttaacagcaatgaatgtcgtgaatgcaatagcgaacctccccaaaaacaggctgtttga

SEQ ID NO: 268227 - DNA, 789 bp, Klebsiella pneumoniae
atggaaaaacaatttaaaaaaacactggcaagcattcaaccacgatctaatcgctctcattctgatacaatcagagagttctttaattgtgtatcttacacaatgataatgaacagcctttttcagttagaaagaagagagttattctattcaggaagtaatatatatggttttaaccagtttgctatacaagctggttttattgagaaatcaataatgctaactgacaggcataaattcagtattgaagaaaaattttataataagtttgatactgaaatcatagaaacagctaacttaatctcgcttgaaatacaaaaacaacctttgacagatgttttcaataatatatttgaagagtgttatctaacaggaaagaaaggcgagtggctgggtcaatatttaacacctaatgatgtttcagaacttttaacagagttagcaagcttgaacaaagaaaacaattatagtattggcgatatttgtgcaggtacaggatctttaatttttccattacttaaaaaaattcataaaatggaaggatatgaaggggttcagaaaatagaacttctttataacgacattgatccactgatggcgcaattgtttatggctcagatattgactaatatgatttatcataatctcgattttaaatctctacatgtttatataggcaatgcaattacagaatatgatacagtaaagactctttttttaagggttaagcaaaatccgttagtagctcaaagagtattagaaattgataaagaaaagaaagcggcatga

SEQ ID NO: 268228 - DNA, 789 bp, Klebsiella pneumoniae; identical to SEQ ID NO: 268227

SEQ ID NO: 268229 - DNA, 468 bp, Klebsiella pneumoniae
atgaaaaaaccaaatcaacaatactctaccttcacttcatatctttctaaaaccaataaaaatgtagatatgtataggctttacaacccttataatagtcacctttccatttacagctttgattacgataactatttttacaataaatacttcggaagacatgaaataacaaaacgaaacttcctaactttatttgctatcaatacctataatgttttctctcagccgttttttgataaaaaaatagatccgataacaagagcgataaaatgtttttctttaaggcttaaatcaaatggattcaacattgataaattatcagttacttttagaggtggtaatgtgatatttagagcttataatggtaaaaaagaagaaatttcatggtttacactttcaaaaatcgcggctgatatttttgatattaaagacttctcaatgaacaataaagaattagttgccgcataa

SEQ ID NO: 268230 - DNA, 435 bp, Klebsiella pneumoniae
atgatattaaatgtagtcagcattcaaaaaaccaaaaaaaatgaagccgctttaatggagtgggtaaacaactgcgaaaatctggaatgtgctcttagtgataattatgttgtttcaatagacaatgattttgattctgaaaaattctacaccgaaaattcacgatatataaaacaatggattgatatttactttaaaagtgagaatatgacctttaaccttttattagatctttgtagtaagtttgatagttctgtttcaatagtatcaattactgaatgggctgggaatcaaagaagttgtgaaactctttgccttttcccggacggtgaagaatacttttcagcgaaacaatcaggaatgactttgtattcaagttggccccagtatgtaaaaaaagttttcccaaattgggttaatttagattctatctaa

SEQ ID NO: 268231 - DNA, 177 bp, Klebsiella pneumoniae
atgaacaaccagatcaataaagtgccttacagcagcggtgataaaccagaacttcctaaaaataaaaaagttaagttttatcacgaagacgagtatgcttttgctcatttcatgtatgacgatacagcagccgaacaagacaatgcagaaactaacagtgaaaataaatgggagtaa

SEQ ID NO: 268232 - DNA, 1080 bp, Klebsiella pneumoniae; identical to SEQ ID NO: 221108

SEQ ID NO: 268233 - DNA, 360 bp, Klebsiella pneumoniae
atgcaggtctttgggatattttgctggtctggcaaaacgacgattgaagtcaataatgaaggaatccagccaggcattggcatcctcgatgctgctgatgccttcaagccgcatttctttgataagtcgatcctgaagagtctggtttgcgcgctcaacgcgacctttagcttgcgggctgttggcgcatatcaactcgatccccagttcggaaagcacccggccgaactgagtgattccagttgtggtagtgccaccattattgaccctgaaaatgccgtgcttatcgctgtagaacgccagtggtttgccatgctgttcaagatacgcgcgggtggccatcatgtaatcaaaggctga

SEQ ID NO: 268234 - DNA, 861 bp, Klebsiella pneumoniae
atgaagtacatcgaaactccctttaggaataaaaaaacttatagcagaaaggggatatttaaatatttcaccgtttcatattttattattgcttgttgctctctggccatttggccattgaatggatggtctggtaggcttagtcctcaaaaagagaatatattatccttcactaaggatattagtccggttagaaaccaatgccacttcaatgacggtgttccggagacgtcgcaatactgtatattaggtcaaggcaataaaattcctcatgttttcgtgtggggggatagccatggcgcagaaatagcctatgcgttgtcatcgttgactccgttagttacggctacgtattcagcttgcccccctgcttatgcatttaatactgaatctcgaccagattgcataactcataacaaaaaagttatgaattatctcttaaataataaaaatattaaggatgtcgttttagctgcaaattataatttgtatggaagtgataaagacatcgagtcttttgtcaagggctttgagaaaactattgagctattaacccggtctggtaagcatgttattgtgttagatcaagttccatctccaggagtgaatgtcccatacaccttaacaaatgtagatgtagtagtgaataaagaatttagatacaatgacaaggtttttagaaaaataaagttaacggatggtgttgatttattttcttacgaaaaatacttatgtgctggcgagtcgtgcccaatgatgtataataattttccgatatcttttgatgataatcatttatcattgtctgttgcaaaaataatggtgaaatatattaagcgtgatttattgctgaccgagtga

SEQ ID NO: 268235 - DNA, 402 bp, Klebsiella pneumoniae
atgggaagaaatatagaaagcaaatcattcgtcagtatatggaaagaagtaaaaagctatacctgcactgtgaatgagacagaaacatttgaaatgttattattggtaatgaaaggtcgagggtttacatttaacaagcatgaatttttcattctatctatgagaggacaaatgataaaccagagaatcgatagatgcagccaacataaacgttttttctacaattccgttgaagaaaaaatgaaaactgcgttcctttttataaaggaaatacacaaagaaaatgagcaatacagaaaaagattgttgaatgacagaaatgagattatcaaaatactcaatgcagaatcaacagttttaaaaggagtaggtggttttaccatctataatgagaaggattaa

SEQ ID NO: 268236 - DNA, 273 bp, Klebsiella pneumoniae
atgaacaaacagcaaatcgcaaaattaatagcaataccttcaaaaataaaaatgatagaaaccgaagctaatgaatatctttttatggtgaataagaagaatgaagggtatttctggataaatgaaaatagcatcactactgaaatgggcaggaaggaatttgttaaagtcataaacgaagcgaagaaatataacctttccagcagataccatatcgtagctgcaagctttatttacgacagcgataatataaattgcattagactaatataa

SEQ ID NO: 268237 - DNA, 528 bp, Klebsiella pneumoniae
atgaataaaagaaaaaaaattaatttagtaactgccacaccagaagagttaaccgatatatattatgatgcctaccttaattatagagagattaatgaccttgttccctataactacacagctacggattatataaatgatgttatgcttgaagatgatattatcaggcaaacggctaaacaaatattcgaggataaaggtattggggaaagtgttttagttgatagtgatttcttaaataaaagattgatcatacccattagatacccttttgaagatagtcctgtttattgctatgtagatatgagaaacactcatgacagcacattattaaaagaaaatgaactccactatatgaaggataggctttcatggcaacacttcgttgaaggtgaagatcgtcaaaaattaatgaagcatttagagtctgattatttcgctcccataatagctaaaaatcaacaaaaagaaattgcacaggtaatgaatgaaaagccagttgccattaagaagaaagcccgattgtaa

SEQ ID NO: 268238 - DNA, 924 bp, Klebsiella pneumoniae
atgataataaaaaactcagaaggtcaagagatatacaataaaagaagtaatggtaatttagatactgacagtatcataaatgccatagtaaaagccgggggagtagataaaatccatgtcaaactttttgataatggcttcactatgaatgagtttattaactctgtcaggtttctaaaatcaataaattttgatattaaccaactaccaattgaacaatatagagagtacggaggaatcgaactaatcgaacaaggttatgacatgtataaaattggagaggataatgttccagtgattaccgaatgtggttatggggttttaaaaaagtgtattgaaaaaggtcttgatttaaacaaattcaatcatattaaccatttcatggaacttgtcgaatgtgacgagaagggtgaatgtttaaagaaaaactatcgtatatttaatttcataagagacaaagaaaagcctaagtttatagatatcaaaaaactcgatttactaatagataatggattgcttaataataaaaccttgtctgatttagaggggggatttggtcctttatattataattttgacttccttatgtttagcagtcctgaaactttcaaaaaacttgttgatattcacggggaaattgaagtaaataaaaaaggactttctgaaatagatgaaatagatactacgggagagttaaaatcttacttactaaaacgatatttagatataagtgagaataaagatttagccattggcaatatctatcgaatatttgaaagcggtggaggtgaaggtttaaatgaaaaaacaaacaaaccaactattgaaatgataaataagtatatcaaacaggaaaaagaagaacttcattcgatactttctcaatcctcaatacccaaacccagcaccagaagaagaatgtaa

SEQ ID NO: 268239 - DNA, 426 bp, Klebsiella pneumoniae
atgcaactattcgacttatttaatataacacatcctgttttaactgttcctattacaattatcatggggttaatatttctcaccgttctttttaatgtgttcaaaaaccagttcctaaccaaatataataagatcgatgatacaggattctggaaaaacatattccatttattgaagtggcttaaagggaagataaattatcttgttggtgtttactttttcagtatgacattgctgttttcaataatggtgtttgtattcagagatcaaacattcaagttagatatgaccgcatatattctatgtgcctttattagtgttggtttaagtgttttgttttatacatacagagatataaatttcgatattaaaaattacaagaaagtaagacaagagcaaaaagaaaagagaaggagaaaagtatga

SEQ ID NO: 268240 - DNA, 498 bp, Klebsiella pneumoniae
atgataaataaaataaaaacaactgaattagacgaaaataacattattctgagtaaagtaagcgatgatgttatattagtaaataaactgccgcataatatatatacaaatgaaaaaggtgttttaatagagaaccccctttcattaactgataaattactatcggtatccgtaggtgtaaatagatatggtttttctgtgctttatgtggctttactggtagaagttatagaagaactaaaatcaatggatcaagaagaaagaaataaagcattaagtataatatcaagaaaagcatatagcattaaacaaatgataccaaagattgaaaaaagaaaaatgcaattatttgttccagaaaaaactcttgaagaaattcagaatatgcttcctaatttatttaaaacaaatttaatacctgctttaattgattatgccatagatttgaaagaaaaaagtggaaatgtatttttatttgaatgtcatcaagaggggtaa

SEQ ID NO: 268241 - DNA, 156 bp, Klebsiella pneumoniae
atgattaatttgcgattcacacctgaactgttcaccatcatccgcaccaacgctgcggttgaggggattggggtcggcctgtacctggttcggctcatagagaaaacgttaattccaaaaactgggagagaaaatgcacgagacagaaaaaactga

SEQ ID NO: 268242 - DNA, 189 bp, Klebsiella pneumoniae
atgttctcggatcatctcttcacctttgccttatcgcggctaacgggacgttttgacttcaccccggcgttgccggtgttgtttggatggcttaaatttacagataaaactgtattttcgtcaacagacaaaactgtatttttgtcattgattacatatctaactgtaatgaaaggtgatttattttga

SEQ ID NO: 268243 - DNA, 828 bp, Klebsiella pneumoniae
atgcctaaggtattgaaatcactaaccaataccgagatcgctgccgccaaaccgcagaagactgagtatatgctgcgcgatggcgacgggctggcgttgttgattaagccatccggcagaaagatctggtacttcgaatacactcccccggcgctgaaaaaacggaccaaaatcagcattggcccctacccggttgtcaccctcgccatggcgcgagatttcaggttgcaataccggcgtttactcgtgcagggtatcgacccgcaggcccatctggagcaggttgcagaggagcaacgactccagaatgaatgtacgctggaaaaagttgcggaacagtggctcaaagagaagaaacggaccagcgaccttagcgaagatcacgccaaagatgtctggcgttcgctggagatgcacgtcttcccttctctgggcaatacgcccgtcaccgagatccgcccgaaaatgctcaaggaacacctcacaccgctggaagaacagggcatcctcgaaacgctgcgccgggttatctcacggctcaatgaaatcttccgcttcgccatctctgaagagctcatcgagttcaatccggctgacaacctagtcgcccgcttcaagaaaccgaaaaagcagaacatgcccgcccttcaccccagtgaactgggcaggctaatgctggcactacagaacgcctctatccgcaaggaaacccgctgtctgattgaatgggagctactgacctgggtacgtcccggcgaagccgtcagcgctcgctggtgcgatatcgatatgaaaaagcggaatggcgcatacccgatacctttatga

SEQ ID NO: 268244 - DNA, 288 bp, Klebsiella pneumoniae
atggatatcgtatcggtcgctttgaagcgctattccaccaaggcctttgacgccacgaaaaagctgactgccggggaagcggaacagctgaaaacgctgctgcagtacagcccgtctagcaccaactcccagccgtggcactttattgtcgccagcaccgatgaaggcaaagctcgcgtggcgaaagccgccagcggcacctacgtgttcaacgaacgtaaaattctcgacgcctcgcacgtggtggtgttctgcgcgaaaaccgcgatggacgacgcctggctctga

SEQ ID NO: 268245 - DNA, 360 bp, Klebsiella pneumoniae
atgaacaattctacctcctataacactctgcaatctgtactacaaacataccacgataattatgccgtccctatgctgaccctaataaatgaattgcagcgcgacagaacgcctgagagcctcctggcggcgattaacgcgcaggaactggcacaggaaatgctatctcatattggcgacgtagcgagccgtatggcggctacggaacactccacgctaacacaggatgaggcagatagtatttcctcagaaatctctgatgctctgcttctgctattccagtgcattgaggagacgggcgagatggctcttgaactggtgccgaacaccaacacacgagaggctctatataactactag

SEQ ID NO: 268246 - DNA, 1422 bp, Klebsiella pneumoniae; identical to SEQ ID NO: 230712

SEQ ID NO: 268247 - DNA, 351 bp, Klebsiella pneumoniae
gtgaaaaaagagatctcccgcaacccctctttcacaccttcgcctaagctgcgagcacatctgaactcccacagggaaggggtgactgaacggctgaataatatctttgatcgctatgcgcatctggttcgcgcctgtgcccttcctctcgatgacgacgaaacacaggttctgcttaatgttctgaatggctccgttgtggaacccgcctttattgaatatctggctcaggaaattcgggactcggatgattatctggaagggatacccgcagctaaatcactgtacgaaaagtgtcagtcagcgacctatccgcaattgctggccaccgtcgaacggctcgatcgctga

SEQ ID NO: 268248 - DNA, 468 bp, Klebsiella pneumoniae
atgctgaagataaacacactccgcgccgccatagagaaagcaaacacctggtgccgggcgaacccggaagcctggacggtgtttgttgaagagggtggcattgaaaccaccggtgaaacaccgtctttcatgtatcgctattctctggtgctgttcgtcatgaactacgccgggagcattgacgacttcacgctgccgctgatggcttggctctggtttaatcagcccgatctgctgctgaacccggataaaaaccagcagataaaattcaccacactgattaacaacgacgacaccgccgatctgatgtttgagctgccggtgcgtcagcgggtactggttcaactggatgaaaacggcgtgccgtgcgccgagcatttgccggagccgcgcccgcgcgtgctggccccccacgccataggctgggggctggtatttgaaggcatgcttcaggaggccggagcgtga

SEQ ID NO: 268249 - DNA, 285 bp, Klebsiella pneumoniae; identical to SEQ ID NO: 102270

SEQ ID NO: 268250 - DNA, 762 bp, Klebsiella pneumoniae
gtgattccaatagaacgacatcagcgtattttagccctggtggagcagcgtggggcggtaagcattaacgagctgacggagatcctcggcgtgtcccatatgaccatccgtcgggacgtcagtaaactggaggagcaggggctgctggtcagcgtctcgggcggcgtacgcgccgtcagccggctggccgcggaacccagtcatctggtgaaaagcacgctgcagagtgaggagaaacaggcgatcggcgcgctggcggcgagtcatatcgctaaaaacagttgcatctatctggatgccgggactaccaccctggcgctggcgcgggcgatcctcgaccggaacgatctccaggtggtcaccaatgattttgagataacccagctgctgatcgatgccagccagtgcggcgtgatccacaccggcggcactctgtgccgggagaaccgctcctgcgtgggcgaatcggcggcgcgtacgttacgccacctggctatcgatacggcctttatctccgccagcggctgggacagtcgcgggatattcacccctgatgagaacaaggttaccgtcaaggagaccgtcagccaggtcagcgcgagaagcatcctgctgtgcgacagttcgaaatacaatcaggtggccacgttcatggcgttacctttgacccggttcaccaccatcattaccgaccggcatctctccgatgccgccgccagtcatatcgcccggcacgcctgcgaggtgctacgagccggataa

SEQ ID NO: 268251 - DNA, 1998 bp, Klebsiella pneumoniae
atgaatattaaagagagttcgcagtgggaagacagcgttacgttacttacccgccagcaaagagtggagggtgggcaggatggcgccgccaatattcaggctaaggagcttgctaacagaacggcatggctgaaagaccagctggaaggtatttccgattatcgtgagtataccttttatgctactgcggaggatccggacggcaccgtttcaggtttgcagaagacgccaaacgggaaaatgttcagggtcgcgcttattgacggcaatgggcagaaaaatgtttttaaatattatcgtaacgataatgggaaagctgtctatatcaattcggcaccatcatttaacgccgtcgatgcgctggataagaagagtgtcggtcagtttttggatttgcaaaacgtcacgtcaggggtgcttaccgcactggcaataattgataacacactaaataatgtcgctatctccgtcagcgccaatagcgccgctgctgattcgtttaaggaaattgcagaaaacaggctttcaggcgtatttacatcaattgctgcaattgtaaataccatggaaagcctttcgatattgctggataagaattacgttacaattccggaaatgaacgaagacaggctgaacctgctgatgttatcaagccgattgctgaaaattctggacggactggacggctttgatccgggcgctgtgctgacccgcgcagatattgatgaggtcggcggtggagagcatgaaacagttgacggagtattcacgtttcctgagccgacgtcactggtgacgatagacctcactgctgacaaaataccgggatcaaaggatgagggggacgtcagcgctaccgtggtcatcactctcgacggcgctgtattctctgcgcgctgcaaaatttctgttcagggggccagctcggcagcgtatccaaagaaaaacctgagccttgagttttttgatggggactttgataacaatatcgagctgaagataggtaatctgcggcctcacgatacgtgggtgtataaggcaaactgggtagactctactcaatgtcgaaatcttatgagttacaggttatggcaggcgttccaggcatcccgccccggctatcctaaatatgatatagacgcaacgtatgtagggaagaaagggaaggatggctttcctacgggcgcgacagctgtgccagcaggatatccgtgcgtaatgcatatcaatggcgagttttacggtataggcacgtttttaatagggaagaaacgcgggaattacaacctgcctaaggactctccactgcaaatccagcttgatttgggtcagtggctcctgattaattccatggaagagaatcacgccaatgaaaatatactggaatttaaggcgccaaagacagtgacggaagagacagttgccgcactgagggaatgggattcgtttgccggggcggatgctaactatttcgccgaacaggtgcagatgcgtatggataagcgcaatctgatcgacttttatctttttgtcacatatatcgccgccgctgacctggtgcacaatgccaatgccaatcaggttaaaaatatgcaaatggttacatgggatggggttaagtggttttttatgccctacgacctagacactgttttcgggaataactgggccgggggttactcttataagccggctgaaaacatcccctggtgtgttggttcattttgggacaatgtgagagcggtctacgggaatgatatagcggcgcggtacaaagagctgcgcgataagaaaatcatttcggcagactgggtttatgatatgtcaacacatattcaggcgcgttatcccgcagacgcatacgaagatgagttggctaaatggtcggtaacaactccggcactcccttacgtttcaaataatggaagggaccagctggtcacgtgggccaaagctcgaattgcagcgatggacacttattttaactatgcagaatag

SEQ ID NO: 268252 - DNA, 546 bp, Klebsiella pneumoniae; identical to SEQ ID NO: 223176

SEQ ID NO: 268253 - DNA, 951 bp, Klebsiella pneumoniae
atgagcaacgatatcgcaatcacttctcagcctggtgctaccgtcggcaccgccgcggcaatattcagcccggaaggcatcaaccagttagtgcgctttgctgagctgatggctcagagcagggttactgttccggcgcatcttgcagggaagccggcagactgtatggctgtagcaatgcaggctgcacagtggggaatgaaccctttcgctgtagcgcaaaaaacccacgtcattaacggcgcgctgggttatgaatcgcagttggtaaatgcagccatcaccgcaatggcaccaacaaaggatcgcgttcactttgaatggttcggcccatgggaaaacgtgatcggaaagttcatcgaaaaaacaaacgacaaagggaaaaagtatctggcggctggatggtcagcaacggatgaaaaagggtgcggggtaaaggtctgggcaacgctgaaaggtgaaagtgagcctcgagtactggacctattacttacccaggcccaggttcgtaactcaactctatggggcagcgatccaaaacaacaactcgcatatctgggggttaagcgatgggcccgcctgtattgccctgacgtaattctcggcgtctacacccctgacgaattgcaagaagcagcaccgcgtgttgagcgcgatattacgccaacaccagcgactgcatccggcatgaacaagctgatcaacacgaagccagagcataaccaggaagagcgacagactcgctcacaagacgaaatacttgcaagttttactgatgcagcagggaaagcggaaaccgttgaaaaactggatcttatattcaacggaggcacatggccagatgggaaaaaacgcccgggcgcatgcgatgctatgagcgataaatggcttgaaatggctactgatgtttacaacatccgacgcgaagaacttaacgaaattacgatgtaa

SEQ ID NO: 268254 - DNA, 330 bp, Klebsiella pneumoniae
atggtgaagcttaaagacgtactgcgcaatgtcatctccggagctaataaacagcttccagaccactcgacaacacaacctatggcgtctactgccctagcaactgagatttacaccaaaatctcttgcataggtcccaaagtgttaggtattggtggagataagcaatctgattttgccaataaagccgctgaactggtgacaaatgaagaatttcttgacgagcttcaagataaaattggcccccctcaagccaatgagaatgaagacgaatttactcatagagcaaaaaaagaaatgcgtaacctattgaaatcaaaattaaaataa

SEQ ID NO: 268255 - DNA, 1422 bp, Klebsiella pneumoniae
atggcgaccattgtaaaaagtaatatgaaaattaaaggtaatattaagttacctcctgtaaatgccccccttccagagggggctaatcttttctcagactttgcaggctctcgtcatgtaatcaaacatgccagcggtaatgttattcgctcaactaaacttacggatattctctcattctcgcgagcaagtactgcaactcgggttgctgaaagcggattgctggagtacctccaggcgaatgagcccgctattgattatcaccccctttccggggagtgcctgggtttgcggattgaacggggtacgtcgaatcgcctcgcatggagccaggactttactaaaaccgctacttgggctgcatctggtgtttctctcacaccatcagccgctgtcgcaccggatggtaaccttacggcaacgaaaatgattgaggctaccgatactgcagcagcagtacgaaaactggcagcaacgacaacagcgcagggaactaaaagcaatcctttcgcctttagcgtttttgcgaaagcgaataccgcggacgtactccagctctcggctgtaggagcattccctgacccgacctttgttaactttgatctgaaaaatggccggctcgggaaaacctcgacaggatcaaccacaagagggttattgcaggcatcaatcgaaccattccgcaacggctggtatcgttgctcaattgtcatcatcccgtatagcgccatgaatccggaatttacgctggcgttggttgataacgataccagcgccgggccgatgccttcgtatttgcctgcaacacctaaatcggtatttatctggggggcgcaggctgagttttccgatgggacatcatcctacatcccaactaacggcgcagaggctcagcggtcgaatgatatctgcaccacgccgactgtggcatcgtttgtgactgccgcagctggtacggtcttggtttcggttgcgtttcctcacagtatcatggctctcaccgagacctatggatcgctgtcctgtgctgccgtaattgataattctgtcgtaggcccgcatgtgcgattcgcgtaccgaaatgcgaacgttgacggcaattatggtgcagtgctcggcgtggttcctgacgcgacaggaacggcgcagaatctggaaattcccagcatggctcccgtgcctgacagcgaacaatcgtgcattttttcgttcgatgcgaccgcgctgacttccaggctgtttgacgggtataactggtatgagcgcagtttgacaggagcaccgccagccctgaatcgcctgtgtatcggccggggatatctggattccagcaactacctgaagggatacattaaaaagatcatttactggcctacagctttgtctgagagcgaaatggaagaaattctctcttatcagtaa

SEQ ID NO: 268256 - DNA, 291 bp, Klebsiella pneumoniae
atgatagcgattaccaatgcagagcgtaaaagtaacgctaatcgacttcatgagctccagcgccattacgacatcttgcatcacaagaggaggatcttatggcttagagaaactccgtgcatgtggagcgatgggtctgcagttcctgaatatttccgcattaacctccttaattcgtcgctaagaatcatcaaagaagggatgagctgtaattcagtagatttaaatgactcgaattaccttgcagttcttgatgatttcaatagctgtatccaaggggctgacaaatga

SEQ ID NO: 268257 - DNA, 147 bp, Klebsiella pneumoniae; identical to SEQ ID NO: 188311

SEQ ID NO: 268258 - DNA, 681 bp, Klebsiella pneumoniae
atgacaccagaaattatccttgcacgcactggcattgacgttaccggcgttgaacagggtgatgaatcctggcaccgcttacgcctgggcgtgatcaccgcctcggaagtccataacgtcatttccaagccgagatcaggcaacaagtggactgacatgaaaatgtcctatttccacacgctactcgcagaggtttgcaccggcgcggcgccggaagttaacgccaaggcgctggcctggggaaaacagtacgaggacgacgctcgtaccctgtttgagttcaccaccgacgtgaaggtaaccgagtcgccgatcctctttcgtgacgaaggcatgcgcaccgcctgctcaccagacggcctgtgcagtgatggccgcggccttgagctgaagtgccctttcacctctcgagacttcatgaaattcaggcttggcggtttcgaggctatcaaatccgcctacatggcccaggtgcaattcagcatgtgggtaaccggtaaggatgcctggtatttcgcgaattatgaccctcgcatgaagcgagaaggtattcatcacgtggttgttgagcgcgacgacaaatacatgtccgacttcaacgaaatggtgccggagttcatcagcaagatggatgaatcgctggcggagatcggtttcaccttcggggagcagtggaaatga

SEQ ID NO: 268259 - DNA, 309 bp, Klebsiella pneumoniae
gtgcgcgactacctgctgcgcggattgctacggccggtcgcgtacaccacgggcggctacggcttgttcgatgacaccgcgttgcaacggctgcgctttgtacgggctgccttcgaagcgggtatcggcctggacgcactggcgcggctgtgccgggcgctggatgctgcggacggtgacggtgcgtctgcgcagcttgccgtgttgcggcaactcgtcgagcgtcggcgcgaggccctggccagcctcgaaatgcaactggccgccatgccaaccgaaccggcacagcacgcggagagtctgccatga

SEQ ID NO: 268260 - DNA, 954 bp, Klebsiella pneumoniae
atgctgaaaggtaagatcatgatctatctattgagtgacctgaatagcgacgacatcattgaaatttctgattgggaggtagttcgtcaacgagaaaattttcatgaaaatgttgatcttaaagataaaaagctattcaagattatcggtagttatgaactacaagataagcgtacctgtggcatcacgagttgtcacaaagcgcataaccgtggatatattgttgctaccgaagatggcatagaaactaacattggtaatgattgtgggtttaagtattttaatgttgcgtttaatgacctgacaaacttgtttttgagaaacctcaagaatgaacaaagaaaactaagcctatttaaagctattgcaaaaatatctgaatggcgaaaaaaagccgatttgctcaaagagggtgagtttaatattgactgggctattaaaaacattgaattgattaaaaacccatctgttattggaaggtatgctagtactgaattaaaacgtatggcttcaacatctaccactaaggtaactatctctcgtgtcgcttcaaaaaaagaagctgacatccaggaagtatttgaccgaaagtatgcggaatcggaagaacagacggtagaagttgccattggttcggttgaacatgtagattgcctattagagcaaaatgatttgcgtcaggcattttacatgtcagttaccaaggtaatgaaagagttgatgttctgtaacccatcaactatgtctagcccagcaatggctaagttagttttaaaagtaaataatatagaatttaatcttaatttctcatcagagagattagaagcagctagacgttttctgaaaaaagaaaaccttcagcccatttacgataaaatgtatcaaatggatattgtaagccgctctgaccttcagcgatattctaattttataaattgcttacctgcaaagtag

SEQ ID NO: 268261 - DNA, 261 bp, Klebsiella pneumoniae
atgttaaatgctaattattttatcaactttaaatcaaatcaggtctcatctattccgaataaaaataatgaatccaatgactatttgctttttagtagttgcgagggatacttcacagcaaaaggagtatttgatgaggatggtaactttctttatttctgcagatgggttgcaggggaaataaaattcttttcccctgaggattatgatttgtggattctactaccctcttcatctactttgcaggtaagcaatttataa

SEQ ID NO: 268262 - DNA, 489 bp, Klebsiella pneumoniae
atggctcccatagcgatcaagccaataaccgccaatattgggttagcaaacatcagcctgcccagccacaggatagcctggcctgctgcgccaataacttttgtgaccagaccaaacacagaagcaaatttaagctggaggatgcctgcacttacccgcactacggccatcggtcccagaatagatgccagcgccagtgacaccacgcccgcagctgtcgcagcaaccgcgaatactgcagcgactgtaaacattgcagcagtcagccgcgggtgccgtttaaccaacccatccagcccggaagccagattccccagccagtcagatagcgttttaagcactggcgagacagtttccccaatgcttgccatcgcattagtaaaagaccccgttgccgcctcccatttgttgcccagggtattaagagacgcatcgacgcgctcgcgcagagtcgcctggttctccagtttggcgacggtttcacggtag

SEQ ID NO: 268263 - DNA, 510 bp, Klebsiella pneumoniae; identical to SEQ ID NO: 83605

SEQ ID NO: 268264 - DNA, 543 bp, Klebsiella pneumoniae; identical to SEQ ID NO: 84313

SEQ ID NO: 268265 - DNA, 237 bp, Klebsiella pneumoniae; identical to SEQ ID NO: 84315

SEQ ID NO: 268266 - DNA, 1176 bp, Klebsiella pneumoniae; identical to SEQ ID NO: 48587

SEQ ID NO: 268267 - DNA, 186 bp, Klebsiella pneumoniae; identical to SEQ ID NO: 48586

SEQ ID NO: 268268 - DNA, 774 bp, Klebsiella pneumoniae; identical to SEQ ID NO: 48585

SEQ ID NO: 268269 - DNA, 837 bp, Klebsiella pneumoniae; identical to SEQ ID NO: 84320

SEQ ID NO: 268270 - DNA, 990 bp, Klebsiella pneumoniae; identical to SEQ ID NO: 227362

SEQ ID NO: 268271 - DNA, 141 bp, Klebsiella pneumoniae
atgaccctccccatgctggccatcatccacagcctgttttcgctatggtccggcgtcttatcgacgaaatacgtctgctcgcgtgcgatccaggagtttgcctccacctcggaaaagtggattccgcgccggcggggataa

SEQ ID NO: 268272 - DNA, 354 bp, Klebsiella pneumoniae
atgactgatatcaccgaactggcgcagagcctgaaacgtcgatcaacatccgcaaatgagtttggcgagagcctgtacgtaaaagccgacgacgtcatcgcgctggtagaggcgctggagaaggcgcagcagcgcatcgtcgaactggatagaaaaaactgcgagcttgattcgcttactcagcgatgggctgttgagcgcgctgaaaatgcagaccatatcgccgagctggagtcccgcaccgtgaagctgccgccatgtgttgacgatctgcatggtattgggatggtcatgtctgctgacgcagtggtagaggcgcttacctcatatggcatcaaggtggaggctgagtag

SEQ ID NO: 268273 - DNA, 555 bp, Klebsiella pneumoniae
atgaccactttaaatcacgctgtaaaaatcgaagcacccgttgcaagtatcagccacctgttaccgtccgaacagaaacaacgcactgaaaagctgtacttcccaaaggttcaacaggccactgaccgaatgaataaggctgaagccgaatataaagacgctgtagagtcacgacagcaattgattaatcgtaaagctcaagagttcttagcaaccccatcagaacgtcacggattcattgtgaagcaggtttacccaacaaaccaacagcagattattcagtcaatggctgaacaaggctacatggttcatcgtgtaggaatgggattaatctatttcatctcaactaaaaagaatgctctgaaagacgcaactgacaaggctacagcagaagctgagatgtcaactgacaaaatgattgagcgtttaaaagtaaaagtgggtgaagcaattcaccagcgtaataagattgtgattgaagcccgtcaagctatcgaatctgtaaaggacttcaccgattacctgaatgtgattgtgactgaggaaacagaataa

SEQ ID NO: 268274 - DNA, 1626 bp, Klebsiella pneumoniae
ttgggtcacgttatgaacacagcttatgcctacatccgttttagctctgagaagcagtcaacaggagattctgtcagacgacaacaagcacttattgactcatggggaaagaacaaccctgattacatactctcacagaagatttacaaggatgagggcttatcagctttcacaggtaaacatgcagcgggtgacttagggcgtttgatgaatgacatttcaaacggctctataacggctggtgacgttattctgattgaatcccttgaccgactttcaagggaaaacatatcaaccgctacagaccgtttgaaagccatcctgattcatggtgtgaacgtggtcactcttacagaccagaagcaatacacccccgaatcacttaatagcccaatggacttgataatgtctattctgaccgctcagagagcacatgaagaatcagaatcgaagtctaagaggatgcgtgaagtatgggctaaaaaacgaacagaggcagaggaaaacgggaagattatcactaagtcatgcccccgttggttaaccgtaaatagtgaccgtacaggctttgaccctatacctgatagagttcagacaattaaccggattttttcacttagggttaaaggtgagtctttatcggctatatccaaaattctgaatgaggaaggaaggctaacgtttactggtaaagcggggaagtggaatcaaagcacgattcagcagcttgttagcaacagggcattaatcggttataaggttcaatcccgtaattccgttgtgaaccatccagacataccaaactactatccggtagttgtagaccttcagacttttcaggctgtccaacagttaaagtctgaccagttcggaaaaaagcaaacaagcgacatccccgctttagtgaacctgttcaaatctgtcttacgctgcaaagagtgcgggaacatcatgattctgaattcggtcaccgttaatcgtgatggttactatgtatgctctatgaggcgacaggggagatgtgaggctaagccaatcaatcgaaaagctaccgatgaagcattagttaatgggttgttctacaaccttgacaggctgatgctatcgaagcctgaacaaaaccctgtgacagctttagaggctcagaaacaggacttaaccgaacggttaaacaatctcgttgttgctcttgaggttgcaccagacattacagagataatcagccgtatgaacgccatcaaaggtgacatacaggccatagagtcacagatagcgaagcataagcagcgtattcagtcgcatatttcagaaactgtacaggggctaaacctgctggttaaagctgacagggtagagttccaattggtaattaagcgccacgttgaaaccatcctgattaacactttgaaaaagagtgcagacattcacatgtttaacggattgaaactgtgcaacttcccacttgatagggtggttgacggtgctcaatggctggaagttttgccgctgattgacggtgatgaattcgacttcgaagggttcacaactaagccacgacacatagccttagaagaggctccggagtgggtaaaagagacggaagagcaacctagtcagccgctgtga

SEQ ID NO: 268275 - DNA, 2502 bp, Klebsiella pneumoniae
atgtctaacactatcgacctgacgctggatggcctctcctgcggccactgcgtcaaacgcgtgaaagagagtctggagcagcgtcctgacgttgagcaagcggaagtcaccctcactgaagcccatgtgacgggcagcgccaacgcgcaagcgctgattgataccgttaaacaagccggatacggcgcggagctcagccacccaaaggctaaaccgctggcagaatcatcaatcccgtcggaagcactgacagcggccactcctgagcttccggcagcccatgacgaagatgacagtcaacagctgctgatcaacggcatgagctgcgccagctgcgtctcccgggtacaaaacgcgcttgccgcggtgccgggcgtctcacaggcgcgggttaacctggcggaacgcacggcgctggtgatgggcagtgcgtccgctgcagaattagtgcaggcggtggagaaagccggctatggcgcggaggcgatcgaagacgatctgcaacgccgcgaacgccagcaggaaaccgccctcgcgacgatgaagcgttttcgctggcaggcgattgtcgccctgctggtcggcgtgccggtgatggtctggggcatgatcggcgataacatgatggtcagcgacgacaaccgttcgctgtggctggttatcggccttgtcaccctcgccgtcatggtcttcgccggcggccacttctaccgcagcgcgtggaaaagcctgaaaaacggcaccgccaccatggatacgctggtggcgctcggcaccggcgtcgcctggctgtactcgatgagcgtcaacctgtggccgcagtggttcccgatggaagcccgccatctctattacgaagccagcgcgatgattatcggcctgattaacctgggccatatgctggaggcccgcgcgcgtcagcgctcctcgaaagcgctggaaaaactgctcgacctgacgccgccttcggcgcgggtcgtcacgcccgagggcgagaaagatctgccgctcgcggaagttcaggccggcatgacgctgcgcctgactaccggcgaccgcgtcccggtcgacggcatgataagccagggcgaagcctggtttgatgaagcgatgctcaccggcgaaccagtgccgcagcaaaaaggcgatggcgacgccattcacgccggtaccgtggtgcaggatggcagcgtgctgtttaccgccagcgccgtcggcagccagaccacgctggcaagaattatccgcatggtgcgccaggcgcagagcagcaaaccggagatcggccagctggcggataaaatctccgccgtatttgttccggcggtggtcgtcattgcgctgattagcgctgcgatctggtacttcttcggcccggcgccgcagatcgtctataccctggtcattgccaccacggtactgattatcgcctgtccgtgcgccttaggcctggcgacgccaatgtcgattatctccggcgttggccgggcggcggagtatggcgtgctggtgcgcgatgccgatgcgctgcagcgcgccagtgaactcgacaccctggtgttcgataaaaccggcaccctgaccgaaggcaagccgcaggtggtggcggtgaaaactttcgctggcgttgatgagcataccgcgctgcgtcttgccgccgcgctggagcagggctcaagccatccgctggcgcgagcgatccttgataaagctgccgacggcccattgccggaagtcagcggcttccgcaccctgcgcggccttggcgtcagcggcgaggcggaaggtcatcgtctgctgctcggtaaccaggcgctgctcaacgagcagcatatcaataccgccgaggtggaaagcgagatgacagcccaggcctcacgcggcgccacaccggtgctgctggcggtggatggtcaggccgccgcgctgttcgccatccgcgacccgctgcgcgaagacagcgtcgacgccctggcgcgtttgcatcggcagggctaccggctggtgatgcttaccggggataaccccaccaccgcgaaggctatcgccaaagaagccggcattgatgaagtgatcgccggcgtgctgccggacggtaaagccgatgccattaagcgtctgcagagccaggggcacaaagtggcgatggttggcgatgggattaacgacgccccggcgctggcccaggcggatgtcgggatcgccatgggcggcggcagcgatgtcgctattgaaaccgcggcgatcaccctgatgcgccatagtcttcacggcgtggccgatgcgctggcgatttcgaaagcaacgttacgcaatatgaagcagaacctgctgggcgcgtttgtctacaactcgctgggtatcccgattgccgccgggatcctctggccgctgaccggcaccctgctcaacccggtggtcgccggcgcggcgatggcgctgtcgtcgatcaccgtggtgagtaacgccaaccgcttgctgcgctttaaaccaaaagagtaa

SEQ ID NO: 268276 - DNA, 807 bp, Klebsiella pneumoniae
atgcaaaagtcattaaagctccccgaaaacaggatacctctggaatcttcacagctgactatattcgttgaaggtactacggatgcagcgattattaaaaatatcttgtatgctctgaaccctcatcttaccccaattatagtagtttgcaatggcaaacaccatatagcaaaaaccatcaaaaacctgactaacgatggaaatgctaaatacatagcattgatagactctgatgaaccaagtgtatttgattctagggaagaggcgaagcgtcaacttggcaatccctctatccctgtattttgtgcagtacctactatagaagcttggcttttcgcggatgataaaatggctagttacctcgcaaggaatgaatcagcgatacgtaccatcgagcgaatgtcattgccagagtcgatcccctacccgaaacacttggcagaaaaaatacttaaaatcaataacctgaaaagaaatcatgaagtactgcgggacatagatattcatagggcagcagctagatccccttctttaaggaattttcttgatggtatatccgacgttttagagctgaagttggacttacctgatcactccatgtcatccacagtcagtcgcgacgttttctctacattgctacgtgaacttcctggggacgttgtagcttggcgaacgcttgctggcgagacttatagtgcagctgaattggctaggaacattagtgaggggacagaaacaggaaagcagtatatgacagagttacttagagttgcgcgtgatcttaccctacggaaggcaaagaaatga

SEQ ID NO: 268277 - DNA, 642 bp, Klebsiella pneumoniae
atgactatttttttcgtcactaatagcgacagccaaaccgcagccaatcttgcagttgcaaagaagattgcggcaaacaccgatataaaattgtttggttgcgacgcattgcgagataaacttcataacgagttatcgggaaaaaaacgcgctattttctcgatgagccatggttcacgattagcaattattgatagtgatggcaatgaagcaattgtggagcatgacggggatgcattgagtggttacaaagtttatgcttgggcatgtatgaccgctcaatccttaggcggtacattggcacaggaaaatattcactggtggggttatgatgccgctataacggctcccgatgatcgagagaaatatctcgatattttttctgaggtgatatcaactgctaagaacaacttcgaggatggtgttgatcattccagcattcaaaggattctagacttaataaaggacgcatgcgacacagctcaagaacagttggacagtatcggagcaattgatgatgaaaatgcaatgtctctctattcctgctgccatcaaatatgggctcgtctatgcatatggctgcctggggctcaacaaccaattaagcaccgaaatgctccttcggcatacattgatatgtag

SEQ ID NO: 268278 - DNA, 528 bp, Klebsiella pneumoniae
atgggcataagtgttaagtatgtagtcaaaactgaaattgcatcagatacgaacattgctaatgataccctccttccaatagaggataaattctacaaaaaatataaagcaaaaatacttattaacaaaggtagtgataatggaaaggatcaagaagatgcatggctatttatcgaaaatatgtgggaggctgcttttttcaaagatggcaaaatagagcaatatatacacaatgatttctctggcctttcaaataacaataaaataatcctgaacaaaggcttggctatatttaatgcagaagcgagtttaatatatgcatctccattttctatacatttgggagctaagtcatgtaaggtggttggtaatatagcggtagtgatattcgattacgttattgaatcattcgtgaaaacaagtgattccaatcatcatttaagacgagaggatggcatatactcctacactttgataaaagatatcgtagactggaaactgcttgcttccacgggtggggaaatttaa

SEQ ID NO: 268279 - DNA, 255 bp, Klebsiella pneumoniae
atgagcgatatcaccgaactggcgcagagcctgagacggcgagctgcttcagcaaatgagtttggcgaaggcctatacgtaaaaggcgatgacatcatcgagctggtagatgtgctggagaaggcgcagcagaggatttatgaactggagtacgatgaagttgtcaacggctggctaacgcagagcaccaactcgacatggctgtactggctaagcataaccacaaattctgccgcaaagctcagttgcatatag

SEQ ID NO: 268280 - DNA, 756 bp, Klebsiella pneumoniae
atgagtaacgatcttgtattcgttttggctagagtgcagtttggtagcgttacaaatacaaaatttgcgcaagttagagatgctatccaggagcagcttagagaggcttatccattcttagaccaaaggggggacaccactacctttgaggtacaatttggacctgaagggcaaaaagtaaacaaagttgaaatacctagcatcactttgatctctgctgaacggaattggggtgttagagttactactagtgatgtctacttgtatactaattcatatgtgaactttgagagttttgggcctaggttgtcagtcatactggaaagacttacacccatttttccaatatattataccggttttattggtatgcgctttttaaataagttctccaataccggtgaacgagcatttcctgtcgcatttaagagatatgagttcttgcagccaatgttagaatcatataaaggagctggttcaaatttatctgcaaaatatcaaactgacgcaggctggatgaatcttaatagtggtgtaactgttaatggtcctttgctgccaccagacttggagcagtttgctgttacactcaatagtaaaagcgatgtatgtgaggggccttgggctcatcttgatcttgattcacataaacctgataaatcgttagtgaagtttgataaggatagagtgattagcatattgtcatccttgaaagattgtgctaataaattttacaatggaattgtgaatacataa

SEQ ID NO: 268281 - DNA, 606 bp, Klebsiella pneumoniae
atggaatttgttgattataatgaatttggacaaaccgataaatcctacttttctttttcggaggtggatgagaaaacgggatggagtggtataggcttcatgaaagtcattatgctcttggccattgctagcttttcatttaatagtgaagcgacatcaacatttgatcaatttaatattgggagtaagcttaacgaacgagttaggtcaaataacattgtatactcagaaaaggaccttaaaggcgttaagtcaccaattcttattttaagctctaaattacaacatgagtttggctttaaaaaagctcaatgggcaagcatattaaatgttgaaaggaaaacattatataactgggaagaaaaacctgattcaactcctcatgcaaaagtcatgataaacttagaagttctaaagcattttagtgaggagattgataagggacatgctccttttatctctaaaatgacttttggaaaagggagaaaagatgaattcactcaagcgtttacgaggcaacctctgtctattgagtcaatggtttctgcttatgaaaaatattatactgaaatagacgggttttataaaagacaacttctttcttaa

SEQ ID NO: 268282 - DNA, 909 bp, Klebsiella pneumoniae
atggaacaaagtagagaagaacttataaaagctggttgggaaagaggggcctttgtttgcttatcccataatatgagattgcttgattatattcccttagaactcaaagagtttctgatgtctgttgatgatgtcagtaaggtctattttgttcctgttttatacgattgcgcattgatttcagataatttctcccatgaaccttgggttaatttagtggtatgttggaaatgtagcaataaagatggcgatggtaattttaagtattgcaaaaatccgcggaagtaccattttcctctaatggttgaagatgagttgttctattttgaaacaaacgccttggcgataattcatatgaagagagatgtttttcttcaatcgtcaatcattgctgatgtcaaatggccggtttttggccttgaaactatgttaaattggttgacagaaagaattagacaaccagtttttccggacgaatggaacgaaagactgaagagtaagaaaaaactgctagaaaaattctactcagatcaaacgcttgtcgagaaatgtgctggtgtgttttttcatatatcaccatttgcgcaaatagctaaatctgaacgctatactgtatcagcaattattgttacgccatctttagaaaatggttctgaacatagaatgtttaataaggcaatgcaaacaaaactagatgcacttaaggaacaattacgcttgattttgcaaagtatagaaaatgtcgaagttaagagtgtgattgatttgcaagaggatcaatttactcgtaaagaagaacgtttgtttaagcgttatcagcttgaattcatgacatataaatcaggtaatagcgaagagacgatggtgttgcctgcaaacttacaattttcctttgtccagccggagtaa

SEQ ID NO: 268283 - DNA, 138 bp, Klebsiella pneumoniae
atgtcacagtggaacattgcagctaaaccgaaagatgagcaggacaaggtcaacgtcgacctcgccgcttccggcgtagcctacaaagagcgcctgaacatgccggttgtcgccgaagaagtagcgattatcaggtag

SEQ ID NO: 268284 - DNA, 324 bp, Klebsiella pneumoniae
atgcgaatgccctacaaacaagatttcatcgccgctctgctggcagctaaggagcagggtatcggcgcaatactggctttcatcatggcgtatttgcggggccgctataacggtggcgctatggcgaagacgctgatcgatgcggtcatgtgcgcgatgatcgcctggttcgtccgtgaccttctcgacttcattggcttgagcagcaatctcgcttacatcgccagtgtcttcattggctatatcggtacagactcgatcggcaacctgattaagaagttcgccgccaaaaaagcaggagtagacgatgcaaaccagtcctga

SEQ ID NO: 268285 - DNA, 450 bp, Klebsiella pneumoniae
atgcaaaccagtcctgaaggaattgcactgataaaagggtttgaaggctgccggctgaccgcataccccgatccgggaactggtggtgtgccgtggacaattggctatggctggaccctccccatcgacggtaagccggtaaggccgggaatgactattgaccaggtaacagcggatcgtctgcttaaaaccgggctggtgagctacgagagcgatgtgctgaagatcgttaaagtgaagctgaatcagaatcaatttgatgccctggtatcgttcgcctacaacgtcggctcccgcgcattatcaacttcaactctgctgaaaaagctcaatgctggcgacatcaaaggcgctgctgatgagtttctgcgctggaataaagctggcggcaaagtcctgaatgggctgacccgccgacgtgaggcggagcgcgctctgttcctgtcgtga

SEQ ID NO: 268286 - DNA, 471 bp, Klebsiella pneumoniae
gtgattggtgcgctggtaaagcattaccggtttcagctactggtgatagcgctaattggcgtgctggcgttcctcgtgaaccactaccgcatcaacgccaccgaatacaagaagcagcgtgatgagaaagctcaggcgctcaatctggcgaacgccaccatcactgacatgcagacccgccagcgtgatgttgctgcgctggatgccaaatacaccagggagttagccgatgcgcaaaacaccattagcgatttacgtcgtgatgtcgattctggcgctaaacggttgcacgtcgccgcaacctgcaacgacgtgcgtaaagccaccagcaccgccagcgtggatgatgcagccgtcccccgacttactaacaccgctcaacgggattatttcaccctcagagaacgaatcgaagccgtcacaaaacaactgactggtctgcaggtgtatgtcagagagcaatgcgaatga

SEQ ID NO: 268287 - DNA, 225 bp, Klebsiella pneumoniae
atgagcaaacccgactgggcggccatcgagacggcgtttccggcccccagacttacagactccgttcaacggggttatttcaccctcagagagcgtcgtcacaatcaccgggcaagtaaggtacctgcaggactacatccgcacacagtgtccgagatgatcatgttcacactcttcattcttctgtcgatatggctctgtcgactaccggagaagccgggatga

SEQ ID NO: 268288 - DNA, 162 bp, Klebsiella pneumoniae
atgtgtttaaattatattgatttagatgattcgaccaaaaaattcatgcttaaagaaattgaatttgataaagaaaataacagtttttatttaagcaattttcttactgctcaaggtaagactgtatggccttctttgttagaagaagcatcatcaacatga

SEQ ID NO: 268289 - DNA, 123 bp, Klebsiella pneumoniae
atggccttctttgttagaagaagcatcatcaacatgatgatgcatggcttgagcaagaaatactcaatagaggattactggctacccattaccctagaagaaagcctaatagcactgagatga

SEQ ID NO: 268290 - DNA, 357 bp, Klebsiella pneumoniae
atgttgtcagaacataaagaatactttgataaaataaaaccactttctcaaaagtatcatgtatttagaaaaatagccaacttggacttgtccaatataacaatatcacacaacgatttagaaaaaaatgaaaaccacaaaccgatgaaaatcgatgagcagatcgattttttaaactctaaaataaaatcatccaaacgagccgttctttactacgaacatgaagcattacttttaaattataatgttgtgactgtttatatatctcaaatggaaaaattcttcggaatttcccattcgctacctgtcttacctatttctcacataaagaaccacgaggacaatttaggtaattga

SEQ ID NO: 268291 - DNA, 1167 bp, Klebsiella pneumoniae
atgattacagatacagctaaagacaacccacgaaataccaaaacaagtaggaatctaaaaaatctatacttagaccctaataattatcgttttgtggataatgaaaaccacaaatttgtaaatgaagaaaatttacttgacgctcaggtacaaaaaagaactcgtacttttattgaaggtcggggccaagaaaatatccgagatctcttggctagcttaaaagctaatggatatttagaggttgatctaatacaggtccgagagttgggtgaaaacagatatcttgtacttgaaggcaatcgtcgagtaacagctctaaaagtcttacaagaagcgtatgacaatggttatgatataggcaatcttgatccctctattttcaggagcgtgccattcgaaatacatagtaaagaagaaagcgaaaaacacctcattgtcatggggttaaaacatattagcggcaataaaaaatggtctaccttcaatcaatctaaattactttatgatttcttgaaaccttatgaaaaatctcctcgagaagaatatatcaacaaagaaaatgagctaattaactcattgggtattaccaaacatagactaagatcaatgttgcgagtctataatctaatccaactttataaactcagtgattatagtgagcaatttacccccgacatggtgggtatctttgaagaaataatgaaaaaacccgttctaaaaaattggttaggatggaatgattctggttattttgcaagtaacaaaataaacttagaacgtcttttctcatggatttctaaaactgaagtttattctgaaccagtcgacaatgaagacgatgaggaaggtaatgattataataatggagatgattacaaagaactcgaaccgattataacaaaatcacttgaaattcgtgatcttgctttatttattgaaaacgaacatgccttaaaagtcatggaggatgaaagaagtcttgctcgcggcttagtttcaagtggttctgttgataaacaaaattatcaaaatgctctctcaagcctttcagaatcattacgtaatctggctacatacagaagccttattggtgctgatgatactaaaattttagatgacgcaaagctgtctcttatacacatctccgagcccacgagaccgtactag

SEQ ID NO: 268292 - DNA, 303 bp, Klebsiella pneumoniae
atgaatgtatattcccatgaaagcgagcgcgtcacggtttcgcttgaagcggcctggcgggcactgaccgccctcggccatcaccggctctggctccgtccccctgaggatcgcggcgtgaacacctggctgattgtcacctgggacggtctgacggtggccgaacgtatcctggtctccggctcatggtggctgaccggggatgccagcgccatctacacgaatccggacaggatcgtcccggacgggctggaagaactcacctggctctcggtgcagcggcgaatgaaggaaggattctga

SEQ ID NO: 268293 - DNA, 408 bp, Klebsiella pneumoniae
atgtctagatttttaacttatattgcaaatgaaggcgagggtagattttatctacgcaatagtttgtcaacaagtgcaggacaaaatactattaaccaaacatcaataaaaggacttagctttttacttcctccattaaaagaacaagccgaaatcgtccgccgcgtcgaacaactcttcgcctacgccgacaccatcgaaaaacaggtcaacaacgctttaacccgcgtcaacaacctcacccagtcgatcctggcgaaagcgttccgcggcgagcttaccgcccagtggcgtgctgaaaaccctgatctcattagcggtgaaaacagcgccgccgccctactggaaaaaattaaggccgaacgcgccgccagcggcggtaaaaaaaactcgtgtaaaaaagcgtaa

SEQ ID NO: 268294 - DNA, 1059 bp, Klebsiella pneumoniae
atgaccagagaagcgataacgccattaaactacacatcttctgcgatcgatgatctgcgggcgctggaacgtaattgtctgcatgaagcgccgtattcagcttacgttctgcgcaatgtgataaacctgctggagagcagcgttaaattcatcctgccaaattgtgctgactttattgcgcctgaagatctgcggcagacgcatctggatatggctcatttgccttacccggtagtcgtgtttgaaatcccatgggaaaaagaggggacgcccgagacctattttgataaacagtccctacgttcaactaagcggatcgcattgtgctgggaagcgaaagtggacctggagcctgtacctggaattaaccggatgcttgagcgttttccggagggcggagtttttgtgtgctctgtctactgggttgatgatgataagcgctggcacccgagttacggcgggctcttttacccctatgacaacacgctcaataacgtttctgatttaacctcccgtccgggggcgacaagactggctgtggcctcattacaggacgcgggtctggtgtccagaacgcgcatgaaacaatacaaggctgaacctgtggtgatcctgccagagattgccagccagacagaatctgtactgggaagccgcgataagctttttgcagatattatcatcaactcccgggatgagttacaggcattcatcaacgcctgcagtattctgaactgcgcaaacgtggtggtggatgaactggcgccatcgaacaccagaaaaacgcaatgggtgagaggcaagcgagttaatgtactagagcccgcagtgaggccccgttttacctacaaagtgctgcagattacggatgaacaacgaacaaactcaacgggtaaaggtatcggtgtaggggcacatacaaagcgtatgcatctgcgcagggggcatattcgccgccttggcgagcgcttgatctgggtacgtccttcagttgtgaatcctggctctgctcagggtgctgtcactaaagattaccagttaaacaagtcatcggattag

SEQ ID NO: 268295 - DNA, 543 bp, Klebsiella pneumoniae
atggacgcagataaaattcagtctgatattgatgcccttttgacgtacatgaacgacgacatggagaacctcggagaaacgatcaaaaccgtttcatttggattcgatacgagccagaacgatcgcattgctattgacgagctgcttcactggccagaagagtatttgttcaaaatcatcaatatctgtcattcccgttctcttgtgcgtaaggattatggtggctttcaggatgtctccctgacagaagaaggtcagagtcgtgctatctcagttaaacacgggaaaaatcgctcatacgagttaggggccagtatgcagattgctacgctaaatgttcatgggccagcgcaggttggcaacggtaacacacaaaacatccacaacgtatttaaccagttgcttcagcagatcgagacgtcttcagcttctgatgaagacaagcaggaagccaggagccgcctggctaagtttctggaacacccgctggtcggatctatcgtgggcggtcttgctggttcgctgcctggtctgatgggatga

SEQ ID NO: 268296 - DNA, 159 bp, Klebsiella pneumoniae
atgtatggttatcatcgggttaatggttatctgagcgaaatcggtgaaacctgcgttaaaaatcgtgtagatcgcattatgcaactgaaccggatcaaagcggtacgtggctataaatctccacgccggatggcccaaaccttcggtcattgcccctaa

SEQ ID NO: 268297 - DNA, 606 bp, Klebsiella pneumoniae; identical to SEQ ID NO: 204767

SEQ ID NO: 268298 - DNA, 279 bp, Klebsiella pneumoniae
atgtcagaacttactctcaccgaatccgaagtgttaactgaccatactgacgtaatttgctccaccagcattgaacgcatcatcatcggacgtagtaacgtacttaaacaaattgagacactgatacaacacgttgccgatatatcgacgctgaccagcagtatcggcggtaaaactgttctggactgggccatgaagatgagatgttttctattaagtactttcagaagggaacagcgcatatcacatttaagcgggcagagctggttgataagctga

SEQ ID NO: 268299 - DNA, 492 bp, Klebsiella pneumoniae
atgaaactctctctgaccgtggaagccgatgccatcaacgtactggccctcaatatgggccggatcgctgtagatattgacgggattgaactggccgacctgatgaatgtggtcagcgataacggttattcacttcgtgttgctgatactcccggaaagctggttgttgaagatccgctaccacgtaccacccgtctgaacgggatccagtgcagcaccgcgcatattaccgaagacgacaacaccctgctgtttacattgtcacatcaacatgaagaccatggtgacagtgaatggataagttataccggatccggctatctgatttatctggattcctggcagtacccggtactccagcttaagaagcggggattatcgaagccctgccgtcggctaatcgtgacgctgatacgtctccacgccatcagaattatccttctggatgctctgggcgaattgctgcccggctttgccactttcgactggtag

SEQ ID NO: 268300 - DNA, 378 bp, Klebsiella pneumoniae
atgaaaatattatcagactcccccacacgggcggcgccgtcgcgcccgtctcccgttgaaatctggcagactctgttgacgtacctgctggatcagcactacggtcttacgcttaacgacacaccgtttggccacgatggcgtgatccaggagcatattggcaccgggatcaccctgtgtgatgcggtgaatcttatcgtcgaaaaatacaaactggtccgtatcgatcgtcacggtttcagcgcagacacacagtcaccgcttatcggcagtatcgatatcctgcgggcccgaaaagaaactgggctgatgacccgccatggctacagagcgattactgatatcacgacgggtaaatacagtgaggccgggcaatga

SEQ ID NO: 268301 - DNA, 450 bp, Klebsiella pneumoniae
atgcccggcgttaatcagtcgccggttggtgttctggagttaggaaacggattcttcggcgttgaggccaccgataccagcgctaactatattgcattttaccagaagaacctggagaatcagaacggcgtcatttccgcgtcttcatacaatgccggtgccaataccagtctggatacgaaaaagggctcggcgggcgcagggcgtagttaccggggatttctgtcgtatgatgctgcgacactgcttacgtacgatgagtatggattaacccaggtcgccgcctcggttgcagcagcgctttttggccgcatatgtgtaggcagagggagaagcaccgataaaaacccggatgcactatggtttaacggtactattcagaaaattgtctactacccaacaagattaaccgaagcgcagatggctgacatctacgatgcaggcatttag

SEQ ID NO: 268302 - DNA, 1110 bp, Klebsiella pneumoniae
gtgaaatatatcaaggaattagaggggctacgtggattgatggccttgtgggtagttgctgggcacgcctttgcgagtctacctatgttgtcaagcaagatcccggccaatcttctaaatacacaagctgttgacgtattcataatgcttagtgggtttgttattttctttatgatggataataaacctcagagctatggtaaatacctgactcagcgtttttttagaatttttccaatatatttactggcgttgattgtttctttcgtattgattgattttactaccagtgttttaactcacgcactcgctgcacccgcgacaaacggcagacttgaaataatcaatcagtttaataaggcaccatcactgcatgctttttttcatttgttattaattcagggtgcagtgcccgtgtcaatgctaaaagactcttcatttactatattagggcaggcatggagcgtgtccgttgaatggcagttttacattattgcaccattattatttatgttaatgaataaaataaccagtaagaaaaattgtcttgcattgtttatcattctgatattcatgattggctatgggaaaataactgataaaggattttatggcaacaatctgtttgctttttcaatagggtatcttacattctatttttacaaaaacatataccctttaattaacctcgcccagttaaaaatagcatcagcgattgctatatttctgtcgataattttgcttggaaaggatgcgtttccagtaataatatgggttgcatcattctacgctgttctaaaaaaagacatgtgtggcgaactttcgtttctaggtaaggtacttgactggaggcctgtgctttatataggtagaatatcgtactctatatatatggttcatatggtaatagttttctgtattctaagtttattatctggatacaatgaactgccattgtacatgtatgccgtatttccagtaagttgcattgtggttagcattgcaatttcctcattaacttacaggtacattgaaaaaccaatgatgtcatttggcaaaagaatctcaggcaagcgagtgctaccaccagagatgaataatcctgcataa

SEQ ID NO: 268303 - DNA, 327 bp, Klebsiella pneumoniae
atggggtttccctcaccggctaaagactatgctgaagggccactgacagtagataaaatttgtggcactggaccaaacacgagaaccatcaaaacggcatcagggtatgccgttattgacgtatcgctcaaaccgaagcaaagagatacagttctgatcacttacgcggggcaaaccgattttgcaaaaattatgggaaggtcgttaatcaccagggaaggagaatcgattgaaggagaagcgcttaacgacgttgtagttgctggagttgtgacgttcattatcaaccgtgcgatcatcgacgatgacgaatgccaagcgatctga

SEQ ID NO: 268304 - DNA, 969 bp, Klebsiella pneumoniae
atgactaaatcacctatcaaatgggctggcggcaaaacccgcgtcatgccgcagctgctgatgcaactgccgaaagccgattgtttaatcgagccgttcgttggcagcggtaccgtgtttatgaacacggaataccgccgttacatcctctgcgatagcaatcgcgcgctgatcaatttctttcgtgtgctgacttccaacaccgagcgactgattgataccgctcgcggaatgttcctgggtggcaataacgaagagcaatattacaagcgccgtgcgctatttaactccatgcagtggagcgatacgggcaaggctgatactgctttactttatgccgctttgtttctgtatctgaaccgacattgctttaacgggatatatcgcgtcaatcagatgggtgatcataacgtcccgttcgggaaatatggcgcaccttacttaccggctgacgagatgcgccgctttgccgaaaaggccaacgacacaaaagccgttttcattgatggcgattttcgtcacaccatcccttacgttatgcagctggcatatgacgcggttatttactgcgaccccccctacattccagccagcaagacagccaacttcactgcctacggcaagccatttaccctggacgatcaccgcgacctggttgcaaccctgctcgatgctcatcgccagcacggcacccgcgcggtgatatccaacagcgacaccccggaaacccgcgagatctactccgctttcaatctccacgccttcagcgttcgccgctctgtcagcgccaaaagccgcgatatggccggtgaagtgatcggcgttcttcgcggcgatgtgggtcgcaactctggcgcatgtggagcttggacgagcaccattgaaaatctgcggccggcggcgatatggatcgggtttgacctggccgccggattcgataacggggagccatctgatgaacacgcttga

SEQ ID NO: 268305 - DNA, 606 bp, Klebsiella pneumoniae
atggggattgatataaataaatttacctataaacaacatcaacctattggagataaacttaagttagttactatcgcacgtttaacggaaaaaaaaggaattgaaacttgcattaaggcctgttcagttttattaagcatgggtgttgattttgaatatcatattatcggtgatggtcctgaaaaatcaaaactaacgaacctatcccattccatgggtcttgggaatagtatcttttatcatggcttgcaatctcaggaggtaatatctaaattccttgatgagtctgatatatttttattgccctctataactgcttctgatggggatatggaaggcatacctgttgccttaatggaagctatggcagtaggacttcctgtgatttcgagttatcatagtggcattcccgagttaatcgatgatgaaatatccggatatctaattgatgaaagagattataaatcgttagctagtaaagtaataaaaattaaaatgctcgatcatgagcatattcttagaatcacccgaaatgccagaagtaaaatagaacgcgaatacaatcgcgataattgttattctgagttggtctcatatctcaagtaa

SEQ ID NO: 268306 - DNA, 1299 bp, Klebsiella pneumoniae
atgcaagtttcagttgaaaccactcagggccttgggcgccgtgtaacgattactatcgccgctgacagcatcgagaatgctgtcaaaagcgagctggtcaacgtagcgaaaaaagttcgcattgacggcttccgtaaaggcaaagtgccgatgaatattgttgctcagcgctatggcgcttccgttcgccaggacgtgctgggcgacctgatgagccgtcatttcgttgacgcgatcatcaaagaaaaaatcaatccggccggcgcgccgaactacgttccgggcgaatacaaactgggcgaagacttcacctacgcggtagagttcgaagtgtatccggaagttgaactgcagggtctggacgcgatcgaagttgaaaaaccggttgttgaagtcaccgacgctgacgttgataccatgctggaaactctgcgcaagcagcaggcgacctggaaagaaaaagaaggcgcggttgacgctgaagatcgcgtaaccatcgacttcaccggttctgttgacggcgaagagttcgaaggcggcaaagcctctgacttcgtactggcgatgggccagggtcgcatgatcccgggcttcgaagacggtatcaaaggccacaaagcgggtgaagagttcaccatcgacgtgaccttcccggaagagtaccacgcagaaaacctgaaaggtaaagcggctaagttcgttatcaacctgaagaaagtcgaagagcgtgaactgcctgagctgaccgaagagttcatcaaacgtttcggcgtggaagatggttccgtcgctggcctgcgcgctgaagtgcgtaaaaatatggaacgcgagctgaaaggcgctgtgcgtaaccgcgtgaagtctcaggctatcgaaggtctggttaaagccaacgagatcgacgttccggctgccctgatcgacagcgaaatcgacgtgctgcgtcgtcaggctgctcagcgtttcggcggcaacgagaaacaggctctggaactgccgcgcgagctgttcgaagagcaggctaaacgtcgcgtcgttgttggtctgctgctgggcgaagtgatccgcaccaacgagctgaaagctgacgaagagcgcgtaaaagccctgatcgaagagatggcttctgcgtacgaagatccgtctgaagtcgttgagttctacagcaagaacaaagagctgatggacaacatgcgcaacgtggcgctggaagagcaggctgttgaagccgtgctggcgaaagccaaagtgtctgaaaaagccacttccttcaacgaactgatgaaccagcaggcgtaa

SEQ ID NO: 268307 - DNA, 354 bp, Klebsiella pneumoniae
atgaaaagtaccagcgacctgtttaatgaaatgatcccgctgggccgcttgatccagatggttaaccagaaaaaagatcgcctgctcaatgactacctctcacctatggatattaccgcgacccagtttcgcgtgctctgctccattcgttgcgaagtatgtattacccccgttgagctgaaaaccgtgctttccgtcgacccgggcgcgatgacgcgcatgctcgaccgcctggcgtgcaaaggctggattgaacggttacccaaccccgctgacaagcgcggcgtgctggtgcagttgacgccggacggcgcagccctttgcgagcagtgtcatcagaaagtagagcgttaa

SEQ ID NO: 268308 - DNA, 2028 bp, Klebsiella pneumoniae; identical to SEQ ID NO: 231814

SEQ ID NO: 268309 - DNA, 1320 bp, Klebsiella pneumoniae
atggccagaaaacaatgccaggtctgcggccaacccgccaccgtgcgggtggaagccaatctcaacggtcgtaacagcaccatgctgttgtgcgacgaccattaccggcaattagtgcgccagcaaaagcgcaccgtttcgccgctggaagccttgttcggctcgcgcagcggcctgttcgaggacttcctcggcagtgacttcttccgcatcggcgaagacgcgacgccagttgccgccgataccgatgacgtggtcgatgcctcgtttggcgagcccgccaccgcaggttcgggtgcgccgcgccgtcgcggcagtgggttggccagccgcatcagcgaacagtcggaagctttgctgcaggaggccgccaaacacgctgccgaatttggccgttccgaggtggataccgaacatctgctgctggcgctggccgacagcgacgtggtcaagaccatcctgggtcagttcaagatcaaggtcgatgacctcaagcggcagatcgagtctgaggccaagcgcggggacaagcccttcgagggcgagatcggcgtgtcgccgcgcgtgaaggatgcgctcagccgcgccttcgtggcctccaatgaactcggccattcttatgtcggtccagagcatttcctgatcggtctggccgaggaaggcgaagggctggccgccaacctgctgcgccgctacggcctgacgccgcaggcgctgcgccaacaggtcagcaaggtggtcggcaagggcgccgaggatggccgcgctgagacgccgaccaacacgccagaactcgacaagtactcgcgcgacctgaccaagatggcgcgcgacggcaagctcgacccggtgatcggccgcgcgcaggagatcgaaaccaccatcgaggtgctggcccggcgcaagaagaacaacccggtgctgatcggcgagccgggtgtgggcaagaccgccatcgtcgaagggctggcgcagcgcatggtggcgggtgaagtgcccgagaccttgcgcgacaagcgcctggtggaactcaacatcaacgccatggtggccggcgccaaatatcgcggcgagttcgaggagcgcgtgcagaaggtgctgaaggaggtgaccgagcaccagggcgagctgattttgttcatcgacgaggtgcacaccatcgtcggtgccggccagggcggtggcgaaggcgggctggacgtggccaacgtgttcaaaccgatgatggcgcgcggtgaactcaacctgatcggcgccacgacgctgaacgagtaccagaaatacatcgagaaggatgccgcactggagcggcgcttctag

SEQ ID NO: 268310 - DNA, 3030 bp, Klebsiella pneumoniae
gtggccgcgctcgatacccgcaagtcgaaagaagccatcgatccggcagagaagatggtggagtggatgaacacgctgaaggagaccgggtttgacatccgggggtaccgtgaggccgccgatgcgcgagccgcagagctggcccgtgcacctgccgcgccggtgaacactgacggtccggatatcacggatgtggtgacgaaagcgattgccggtctcagcgaccgcaaggtgcagttcacgtatgccgacctgctggcacgcacggtcggccagctggaggcgaaggacggtgtgtttgatctggcgagaaagggcatcgatgccgccattgaacgggagcagcttatccctctcgatcgcgagaaaggcctgttcacctcaaacatccacgttctcgatgaactcgccgtcaaagccctgagtcaggaggtgcagcgccagaatcatgtctccgtcacgcctgatgcgtctgtggtgcgccaggtccctttcagcgatgccgtcagcgtgctggcgcaggatcgcctggtaatgggtattgtttccggtcagggcggtgcaaccggccagcgggagcgggtggccgagttaaccctgatggcccgggagcaggggcgtgacgtccatatcctggctgccgataaccgctcacgtgattttctcgccggtgatgtgcgtctggccggggaaacggtgaccggtaaatccgccctgcaggacgggacggcgtttattccgggcggaacactcatcgtggatcaggcggagaagctgagcctgaaggaaacgatttccctgctcgatggcgcgatgcgccataacgtgcaggtcctgctctccgacggcgggaagcgcagcgggaccggcagtgcgctgacggtgctgaaggacagcggcgtgaatacgtatcgctggcaggggggccaacagaccacagccgacatcatcagtgaaccggataaaggagcacgctacagccggctggcacaggagtttgccgtcagcgtgcgtgaaggacaggaaagcgtggcccaaatcagcgggacgcgtgaacagagcgtactcaacggccttatccgtgactccctcagacaggagggggtgctgggtgagaaagacacgaccattacagccctgacgccggtgtggctggacagtaaaagccggggcgtgcgggattattaccgggaggggatggtgatggaacgctgggatccggagacccggacgcacgatcgctttgtcattgaccgggtgaccgcgagcagcaatatgctgaccctgaaagaccgggatggggtccgtctggatctgaaggtttccgcggtcgacagccagtggacgctgttccgggcagatacactgccggtggcagagggggaacgtctggcggtgctcgggaagataccggacacacgcctgaagggcggggaaagcatcacggtgatgaaagtggaggaagggcagctgacggtacagcggccggggcagaaaaccacgcagaccctggccgtgggggcgggcgtgtttgacggtattaaagtcggccacggctgggtggaaagtcccggcaggtcggttagcgagacggcaacggtctttgcgtcggtgacgcagcgtgagctggataacgccaccctcaaccagctggcgcagagcggaagtcatctccggctgtactcggcgcaggatgcggcgcgtacgacggagaagctgtcgcggcataccgcgttcagcgtggtctcagagcagctgaagtcccgatccggcgagacggacctggatgcggccattgcgcagcagaaggccgggctgcataccccggcagaacaggccattcacctggccatcccgctgcttgagagccaggacctgaccttctcccggccccagctgctggcgacggcaatggaaaccgggggcgggaaggtttcgatggcggacatcgacacgaccatccaggcacaaatcaggtcggggcagttgctgaatgtaccggtggcacccgggcgtggcaatgacctgctgatatcccgtcaggcctgggacgccgagaaaagcatcctgacccgggtgctggaaggtaaagacgcggtggcccccctgatggaccgcgtgccggccagtctgatgacggacctgaccgccggacagcgggcggcgacccggatgattctggaaagcacggaccgcttcacggtggttcaggggtatgccggggtggggaaaaccacccagttccgggcagtcatgagtgccatcagtctgctgccggaagagacccgtccgcgcgtcatcggtctggcgccgacgcatcgcgcggtcggggaaatgcagagtgctggcgtggatgcgcgcacgacggcgtcgttcctccacgacacgcagctgctgcagcgcaatgggcagacacccgatttcagcaacaccctgttcctgctcgacgagagctcgatggtggggctggccgatatggcaaaagcccactccctcatcgccgccggcggtggacgggcggtgcccagcggggataccgaccagctgccgcccatcgcgtcgggccagccgttcaggctgacgcagcagcgcagcgccgccgacgttgccatcatgaaagagattgtgcgccaggtacctgagctgcgaccggcggtctacagcctgattgagcgggatgtgcaccgcgccctgaccaccattgagcaggtcacgccggagcaggtgccgagaaaagaaggcgcctgggcgccgggcagttctgtggtggaattcacacagaagcaggaaaaggagatagaaaaggcactgagcgaggggaaaaccctgccggaaggtcagcccgcgacgctctacgaggcgctggtgaaggactataccggacggaccccggaggcacagtcgcagacgctggtgatcacccatctgaataaggaccggcgggcgctgaacagtctgatccatgacgcacggcgggagaacggggaaaccggcagaggaaatcaccctgccggtgctggtcacgagtaa

SEQ ID NO: 268311 - DNA, 405 bp, Klebsiella pneumoniae
gtgaaagcgtactatatacttggacataacgttgcatggcttaacggtatatgcctgattctttttgttattggtgtggtcggtgcgctggctatggttgccatccctgaaaaattcaatcttcgagttaacagaggcgatacattcatatactgtgcgcttatagcggtggttgggttttccggtatgttcgttatctccattcactcattttcgatggatgaacttgaagcaggtagacactggaaagatgactgccggacacttgaggtaaacatgccgacaggcgcttttaccagccctgttaataaactggactgtgatggcatcatcattaatgtgcctggtgggcagtattattcctatatccatcagtgggaattatataaagctaactcaaaatga

SEQ ID NO: 268312 - DNA, 1098 bp, Klebsiella pneumoniae
atgtcaccggtagcggcaacggggcgtaacttcggtgcgctcctcattctgggtacctctacggttatcccggtcactgagcgtattcgccagtattcagccattgaggatatcggcgatgattttggtgtcgattctcccgagtacaaggcggcgaccatcttcttttcacagtcaccaaaacccacgctggtctatatcggccgctgggcgaagaccctggcaacgggtgaatcagatactgtagaaaccctgctgcaggcggttaatgcctctctgcaatataccaactggtacggcctggcgattgccgatagcgccgatctggttgaagcggatgtgatttcggtggccgcggcgatcgaggcttccagtctgagccgtattctggcggttaccactgatgacgcgaatgtgctggtatccggtaataccgacaatatcggctacaagctgaaggcggcgggctactcccgcacattctggcagtacagtaccagcagcaaatatgccgctatctcggcctttggtcgtgcgttcactgtgaactttaccggcaacaacaccacgatcaccctgaagttcaagactgagccaggcgtgacgtacgagacgctgacgaccgcgcaggcagccgccattgatgccattaacggtaacgtctacgtctactacgccaacgatacggcgattatccagcagggcgtgatggcgaacggtgatttcttcgacgaacgccacgggctggactggctgcagaactacgttcagaccaatctctataacctgctgtacacctcgaccaccaaaattccgcagaccgatgccggcgttacccggttaatgaccaacgtcgaagcatcgctggatcaggcggtaaataacgggctgattgctccgggcgtctggaatggtggcccgattggccagattgaatccggcgataccctgaccaagggttactacgtctacgcagatgcggtagccaaccaggcacaatctgacagggaagcgcgtaagtcgccggtgattcaggcggccattaaaatggcaggggcgattcactatggcgacgtacagatcaacgtggttcgataa

SEQ ID NO: 268313 - DNA, 243 bp, Klebsiella pneumoniae
ttgttcgtaatcggcgtcgtacccgcagctgacctcgtcatcaccatcatcaatggcctgcagggcttccggggttttgacgatgacatcagccagcagcagatcggttttatcgtccgtgccacgtcgtacgttctggatgtgcccgtgagccagctggcgccagttatcaggggtaacaaagatgatctgcccgtcaaaatctcgcggatggccgatagtgactgccattccttcgaatga

SEQ ID NO: 268314 - DNA, 255 bp, Klebsiella pneumoniae
atgtcgcagtggaatattgcctctttttcaaaagaggagcaggacaaagttgccgttgataaggtggccgctgctgtcgcctggcaggaaaggatgagcaagcccgtcgtgccggaacttgttgagcgggaacagcctgagcacctgcgcgagtatttccgtgaacggctccgcgtacatcggctgaacagtcagcagctgccgcgcgcaaatgcgcccgaatataataaaccgggcgaggatcagcagaattga

SEQ ID NO: 268315 - DNA, 291 bp, Klebsiella pneumoniae
atggacgagctgatcgcaaaagcgtggcggttcgtgcgtgagcgttttcgcagctatcaggctgagcgtaaatctcacggccggaagcgggatactgcacggcgggatgcatcacggcagcgtcatgacatcgagacgcgcgtgcgtcagcaactgacccgcgaatacgccaccggccgcttcaggggcgataaagaagcgctgaagcgtgaggttgagcgccgtgtgcaggagcgcatgctgctgtcgcgcgggaacaactacacgcgactggccactgtgcccatataa

SEQ ID NO: 268316 - DNA, 291 bp, Klebsiella pneumoniae
atggacgaactgatcgcaaaagcgtggcggtttgtgcgtgagcgttttcgcagctaccaggctgaacgaaaatctcatggccggaaacgggacactgcacggcgggatgcatcacggcagcgtcatgacatcgagacacgcgtgcgtcagcaactgacccgggagtacgccaccggccgcttcaggggcgataaagaagcgcttaagcgcgaggttgagcgccgcgtgcaggagcgcatgctgctgtcgcgcggaaacaactacacgcgactggccactgtccccatataa

SEQ ID NO: 268317 - DNA, 183 bp, Klebsiella pneumoniae
atgattctgctcggtgttcttcgcggcgtacagcagcgtcagcggctggcgttgcgccagcgccgccagccgcaggcccgtttcgcgatgggcgtcgagctcctgacgatagcgctggctgaagtgggcgaaatcgatcgcctagccgtgaaaggctttgcgcagctcagcggaaggcgttaa

SEQ ID NO: 268318 - DNA, 729 bp, Klebsiella pneumoniae
atgtcattacctcaactgaaaacatctgaaatcgttgatctactaggcccttcactgcagaaaggtgagtgtttactcaatgactttgagttaataagagccttacatgaagcaagaaaacttcctgatgatgtagacaggttgtttgtacagggtctgatcaggctggtggaggggagagatgaggatgcttactcattgatagaaaggtctttgttaattaatcctaataacgaagagatatggcttaattactttaaggctgttaataacaaacgtcactatcacaaagcattatccatacttaattcatctcttaattaccctttccctgctgttcttaatcagtgctatgagaagggtgtgacgtgggggagagtggacatggcatcagaggcaaaaaggaaactaaaaatgatgaatatctttgatgaagacagattctcagatgaattaaatttcttgtatgacggtttttctttgcttggaagtgaaaaaaatgcttttcaagaagtatgcagcatcataagcgagattgcccaaaaatataaggttaatgtggttggtaataggattgaatttacagatatattttcaataatatctcttgtgacatctaatgatgatgagctattgtccgccatgaattttgaagttgttgatttgattgtcttgaaagggcttgagaaaaataattgcattggtttttttgacgctagtggggagtga

SEQ ID NO: 268319 - DNA, 3279 bp, Klebsiella pneumoniae
atggcctttaatccgccactggggagcacgtctcccgctgtgctgctcgataacgccaaacgcctggatgagctggccaacgggcccgctgccattgttcccgatcgcgccggtgaaccgctcgatacctggcgccagatgatggcgaagaatgatgaaatccggcagaacatcatcccactcagtaagcagtacatgaccctgacggcggcgcaggaggatatcgcgaatatccctgaaagttctacaacttacgttcgtagcacagatgaatcctaccttgccatcgaatatatgaatatcggaggaacactgactgctaccggcaggaaaatgcgcagcgcattcttgccagaactcgatgtggtatctgccgggatgctgctgaaaattgtcagcgatgtttactccctcatggctggttcgtattacacagcagatggagttttgcatactgacggtggcagcacctggggaatgtataaattcccgattaagaaggggcaatgggttaagtacactggccctatgggtatcgtcacaggcagcgaatctatccccgttatctcacaactggacagtaatcaggcgtgggtgtcatcactgtgtacggtgaacgctaccggggcagcaggagtcaccttccagacgttatacggtcaggcgacgcaagatggctttgtcgctgttcgtgggcgtactggcgagacgggtacgctgggtgccattaatgtttacgccagttatgacgaaatcgttaccacagaggacatgctggacgcgattgaagcgggtgttgagaaatcatcgcaatacggacctggtgaggacatgaccggactgcgctattttcaggggagcgtattcgatgcctcaggtaactgggtcacagggaaagggacagcgtaccggacgtattttatccccgtgcagaagggtgacgttgttaaatacaccggagctatggggtcattcatcctggctgaaaccctgcccatattggttcaagctgactccaatcgcaatttcgttggcattgtttatcctttcgaaacggatactaaaattctcgatcgcgcagcctggggtattgccactcaaaccggttttattgccgtatacgttcggattgttagtgggatcaatttcactattactaaattccgtcgcctgctggattaccgtagcggtattgcggataccgtattgcgcccggtgacgcatgaggcgaccatcacgcgcggccagcgtatgacgatggccggtgcggcggaggtggccagcggctggtttattgccacactcccggtcaggcgcggggatgatgttgccattgatgcgctgcatgactcgttctcaaaggatgtaacgcccgttatctgccagctcgacagcaaaaaagcctttgtgtcggtgctgtgccagttcaccaatactggcgctgggccgaaccgtgacacgtttatcgccactgccagccaggatggttatgttgcggtcaccgcccgcctgaccggtaatgcgccgtttacgctgttcgcctcccggcaggcattttgtgacccgctggatatctggctggagcggcagattgacgccagcggagaagctgattacaccctggttaacaaatatgaggttaacaactcggtcattgacagcacattcaaactgctgacagatacaaattatcgcactatttggattcctgtccgtcgcggtgagtccgtatccgcttatacggcaacgggagccgctgcaaccggagaaacccccgccgctgacggttctgtgccagtcatgattcagtatgacacccgccgggcaaaccccgttatccgcgccacagcgagcggtacaggctcgctcaccggttatcagaccgtgtcggcgaaagcgacggctgacggatatatggcggtacgtctgtacgcggcagaccggggatggccgaccgtgaagcgcctggcggcaaaaaatggttcagattccggcgttgcatcgcttcccgtcgtgccgggacagttcgaacgcctgccggtcaatgcggacactaactgggattacaacaacagcccgtactcacaggataacgttgtgattgccggggattatcagtacgtggtggtgattggcgcgggacgggtgccgtacatcgcccagcgcagcaaatggggcggtgcctggctggccgtttttgacctcggcacgattgccggtaatccgctggcctcgccgaccactgccgacggccataacgtctataacatcggtgtcagtaaaaacgggcatattatcgtcgccgggaatatgcacggtgacggcccccgcgcggttgtgtcggataatccgcacaatatcaccgcatggacggcggtggatttctcggcgggaatgttcacgaaagacgtgacctatccgcatttcatcagctaccccgatggtacgctgcaatgctattaccgctggggcgtgcgtcactacctgacaacctatgatgagtcaacaaagacgtttatcaccccgcgtcacattgtcggggcgaaagcggacggcaggggcgggccgtatgagcaaaaatacgtcgtcgataacgacggtattctgcatgcgtgctggggctaccggatggatgccacctctgcgctggcgaatgagggcctgtactattctcagtccgcagacaaaggggcgacctggcgcgcggcggacggctcagtcatttcggcggcaggcacgcgcaacgatgcaaactcaacccggattttcagcgcggaaaccggcagcggctatgtcaaccagaacggcggctgtgtcgatattcacgggcattatcacacctgcctgacgcagtacgacgataacggcaatactcagattgtgcatgtgtggtgggacagtttggcgtggaaatcagaggttgtcacggattttgatttcaggatgaatctgtcgagcaacctggttatgaacgatattacccgcccggttatcggcgcgacgccatcgggccgggtttatatcatctatcacaccacgtacaacggcctgagcggagccattatggcgattgatgttaccgatgagggcaatcctcagtcgatggtggttgcggcgtttgatatcggtactcagtcgatggggttcaatgtggcgcatatgctgaaaaccggtgattttgttgctctgctggcgaaaggaactgctaacagcgcatcagaaaattacggggtttacagcaatcaaccggtgatgcttgcgactataccgatgccgtaa

SEQ ID NO: 268320 - DNA, 312 bp, Klebsiella pneumoniae
atgtctaagtcaaaaaatatcaaagatgctatggaatcgcttaaagtatttagaacaagcgcgcagactctttcagaaaaacaactagagttgcttactaaaataattaataaggcctcggaaattagtgttattgatatgggggaaaggacgccagaagaacaggctattttagatttctatttctcgatatctactgaagtttctgcatctattaaggcggctgaggaatataataaagccattaacgattatgttaacggtgtaaatatattaaacactattgcgagctaccaaaatgaaagcaactga

SEQ ID NO: 268321 - DNA, 1152 bp, Klebsiella pneumoniae
atgaccaaaatttcaatcaaccatgtcattgttcacgagttactcaaagaagcccaaaaagattttgatcactcgaaacggtataatcttcgtgacactgaacttgataaatcaaacaaaattgtacaacaactggtagatggtgttgtcgaattatatgggactcgcggtaatctagcacatcatggtattttcaaagaggatccctcactcaggggccctgttccagatttgtttgataaatattacaatgataaaaaatctgattcctcttcatttataaacctcacaaaacaaattatgaagcaaatgtacgaggaggccaaaaagcaaccttggtcatcaggtggttatgttgtttttactgattatatattgcaaggtttacgatttattttagttacgatgataaaaaagaaaaatggtgttaccataagcgccaacttaaaccctgaagaaatgatccacctagagctcaactatataaaccaagcagcaagagtcaactttcatcgctatttcgagtacaactcagctccagatgataaaaaatcgcaaataaattacctgagcttcataagtaaaacaaatgggcagtctgcttctgcatattttattgcggcgcttggttgcgataaagggttagcttcagcaggagccacacgaaaacttcctaatgaagctaggaaatttttcaaaaaaaatacagaaacactccctatcgctgaagaattcaggaacaaaataataaaatatctcgaaaagcaatgtgagtccagtttgccagccagcttgtcagatatagaagccattggctttgaagaactgtctatttttccagatgagaaaagaaatgaaatattatctggattgatgcaacacctcaatagtgagggggttggtataccgactgatttcgtaataaataaaacatccctagacaaactcaaaaaagtaatgtataaaaacccattatatagtttcaacttcgataaagaacttcttggcgataatgctgatgctagaattttttatgatgaagtaactggcaatctttgttttaataacctccctgaggaagcaagatctaaaataagagcagcgcttaaagagaaagcaaaattaattaatactgagaacgaaagtgaatag

SEQ ID NO: 268322 - DNA, 1218 bp, Klebsiella pneumoniae
gtgaatagtttaaaagttgttgtcgaattatttagaatatccggcacacctgattgcaatggtgaaacattttctgcgtctttagaatttactgatagcagcatagctataattaaaccgatcttatctggagatttttcttatggccgctttattgaactagatatagatgacgaagagatacaaagtatagaggaaataccatcgcagggtgaaagaattaactttactttccttgtcagccaatcaagctctgaacgtttttatacgacagcaaatgaattattaaaagtaaacaaaataatgcgtggctctctaccgagccagttctatctcattgattctgattacctttatggcgaaaacaacaagccggaagaaattgaaaaaattgaagccatatgtagtatgattactgcactatcaaaactatcacatttccatgacattaaagagaatggaagttcaaatttttaccgcttagtgttcgttttgaattccgaatcaaagtcatcttctgcagtaatagaaaccgtcttaaacgacaaggttttatcttaccctaaaattgattactccttaataaactctttggtttcaattgatccaagcaccgaccttcactatgacgaaaaaataaataccttccgaaacactttgattgaatacattaaatcagctgataacgatttctgcgaaataataaaaaattggactttaatatgtaatttatatcgtaataaccttgcagtctacatgtctgcattttcttttcaaaaatcaagaaaggaaatagccgaagctgaacttgactacgcagataaaatatcaaaaataataaccgatattactaacaaagccttagcaataccaatttccctaattggttctattgcaatatatcaattaaaatcaaatatggaaatatatattacttttgtgggactcacaatcacaagtataattatgacgttaacactgttttctcaaaagaaacagctaacacgtataactcatgcaaaagacattgtattctcgtctatcgaggataaagttctcgatgaacaatccgatattaaaatacgtttaacagaagcgaagttcgaacttaaaaaaaatgtcagattttctaatttgattttagattttcttatatcactaagttgggtgccagtatgtattggcaccactggaatattattcaagttatttaactaa

SEQ ID NO: 268323 - DNA, 168 bp, Klebsiella pneumoniae
atgactgatatcaccgaactgactagcgtacaaaaaaacacaaatcagcagcgcatctccgacttggagtctgatctgcctgaatgggatgactgcaagcatgatagggcattttacaacgacatgagcggccgagagcgctgctggagttgcggtgcggatctatga

SEQ ID NO: 268324 - DNA, 756 bp, Klebsiella pneumoniae
atggctttgattaaatttgaaaatgccggtctcgattttccgatatttgatgcggcatcacggtcaattaagaagaattttatcggcttagctactggtggtactgtaggtgagcaaaatggccgtgttgtcgtttcggcgctttctaatcttaattttgaaattaacgatggtgaacgcgttggcttgatcggtcataacggcgcaggtaagacgaccttattgcgtatgttcagtaaagtctatcaccctactgcagggaaggtcacgattgagggtgatatcggttctttgatctccatctctttggggatcaatccagaatttaccggccgcgaaaatatttatattcgtggggcattactggggctgcggaaaaaagatatcaatagtaagatcgatgaaatcattaactttaccgatctcggtgattttattgatatgcccgttcgtacctactcatcagggatgcagatgaggttgggcttcagcgtctcaacaatatttactccggaaattctgttaatggacgaatggctctcggttggtgatgaaggctttaaggataaggcggaaagacgtttgtctgatattatcagctcgactaaaattcttattctggccagccacagctatgagctgttaaaaacaaactgcacgcggatattatggttggagcacggtggtattaaaatggatggtaaacccgaagatgttcttcaccattactttaaagtagataacgctcattgctaa

SEQ ID NO: 268325 - DNA, 801 bp, Klebsiella pneumoniae
atgaaatttacgacgaaatcgataggtctgaatgacctgctttcagcgctaaaatccttccacattatcactatcatgggcggacaggatatccgccagcgctacaaacgttcgcgtttgggtccattctggataaccatcagtatggctgtcatgatcgcaaccatgggattggtttttggtaatctgtttaagaccgacataaaagagtttttaccttttctgaccttaggcttgattatctggtccttcatccttgggtccattactgagggttgcgaagcgctaatttcttccgaaggaattattaagcaactgccggtgccgttacatgtacacgttttgcgtgttgtatggaaaaattttattatttttctgcataacatcgccattttccctttcgtgttactggctgttggcaaaggtattaactggtatatcttccttgccattcccggttttttattattagtactaaatttgtcatggttcttaatggttgcctcaatggtttgtgcgcgcttcagggatatgacgcaaatcatcttgagcataatgcaggttgtgttctatctgactcccgttatctggatgcccaaactgctatcccatcggattggacaagttttgcttgatctgaatccggtgtatcatcttattgatgtcgtgcgtgctccgctgctggggcaaattccgagcgtaacgagttatattgtaacagcagttatggctattattggcatcatattttccacaataatgaccagtaaatataaatatcgtgttccttattgggtgtag

SEQ ID NO: 268326 - DNA, 1239 bp, Klebsiella pneumoniae
atgagaagacttattagaaacatagcaacactttcgtctaaagtagcatattattcatactatacctacctctcagaacgcgaaagaatgactaccacacgttttactaacgtggttcatgaaaagaatttcttgggtggtaatgtcatggttatggcattatatgaaaaaacaaatctgcgcgctgataccattgaattgctcaaagaagccaaacggcaaaatatttatgttattgccgttaatacattaaaattatcgaccgagaactactgtcaggatttgattgacgtctatattgaacgtgacaactttggccgtgattttggtagttaccaggtcggtatgaaatatttctttaacaagaaagtatcagatacttgtgaacggttgttgttaattaatgatagcgtctttttttctgttaaaggattaagtcaattcattagcgacctttataacactaaagttgatgttctgggtgccactgaaaacagagagatatcccatcacctgggatctttttgtatttccattgcgggtgatatcgccagaaataataaatttaaaagttattggtataattataaactaaccaatgtacgcccggcagtcatcaaaagaggtgaattcgcattaagtgttcttctgagaaagttagttcgtaatgaaaagaactttaaagcgctgtatgatattaacctgttcgagaaaaagttaaccgaagatattgatttcttccgtagttatcatctttatcggcgtgaggggggtgatattcaatgggccgaaaaatacgtttataaatacttccaaaaagatcaaatacttaaatcattttatgacgcctatatgaaggaaaagtatccttcagagaaaaaggccgatcgcgaagtgaactatgctgatgtggtcgatttcttatcatcatgtgattatgacaagctagctaacggacatcttctgaaggcgcgtctgctgggtatttatctggatgattttactcgtggttcacagatacataataactgtatcgctttacatcatttgggattgccaatcattaagttagatcttgtgtaccgtggtgtttgtgatttacagggcattgttaaactgaaactgcagttggcagacgagcagcaagatgaatttatggaaattctgactaaccgactcgacggaaaccgattcctgtttggttttaatagaaaggcattcaattacggtattatgtaa

SEQ ID NO: 268327 - DNA, 942 bp, Klebsiella pneumoniae
atgaaaaataacggtgtaataagtatcctgatggctacttataatggtggtaagtatataaggcaacaattagactcgattttttctcaaacatatgaaaattgggtcttgtatatatcagatgatggttccaccgatgacacaatagctattattcatgaatatatgaataaggtgtccgagggaaaaatagttcttcttaacggacccagaatcggttttgctggtaattttttctctttattacacaatgctaaaataacatctgcatattatgctttttgcgatcaggatgatatttgggttgatacgaaactagaagatgcggttagggcagtgaacgttgcaagttcgagtgctaatagcgaatatatattatatggatcacgcacatatctgattgatagtagaggaaataaatgcggtgcgtctccatgttttcagcgcccgtttggtttgcggaatgcattggtacaaagttattccggtggcaataccatgctcttttcgcacggattgaagaaagtcatcgagacatttcctgctgatgagacaatcgtttctcatgattggtttctctatcttgtttgttctgccttgggtggggaaattatctatgacgaaaatccaaacgttctctacagacaacatgacgataatcttgtagggagcaatctgggtattaattcaaaattaacccggttgagaaaaatatacggcggagattttaaacattggaatgccgtaaatgagaaaaatttgtcttttctaaaagataaaattgcaatggagaagcgtaaaataatcgcatcttattatcatgcgaacagtttttccgccattagtagaattcgttcatttatccatgctggtgtataccgccagtctgtttttgaaacgatgttctttatgatcatgtcgtttatgggtaaattacgataa

SEQ ID NO: 268328 - DNA, 1170 bp, Klebsiella pneumoniae
atgcggcaagtaagaaacattcccggaagcctgccaggctgcgcggctacttttgggcaacgcagcccacaaagccgtaacctgaagtcgctcatcatcggtagcgccatgctcagcctgtgtcacagcgcgtggtcggcgacgccacctaccgcacatcaacattcgcggcagcaccttagcgcaccggtcaaagccgttgcgaaccaacaaatatcgatcgaaacgccatcaggcaatggcctattgcctgttttcgccgatcgcccaataaaccaggcggcccctgatgtagtacgggttttcattgtcatccatggtacgctacgcaacgctgacgcctattacgcaaccgggcgcaaagtcgtaaaaaaggcgggggatgcaggaaaaggcaccatggtggtcgctccgcagttcctgaccgttccagatctcaaggcattttcgctacctgcccccgttctggcctggactcagcaaggctggaaggacggtgcgccatccctgactcctgcgccaataagctccttcagcgcgcttgatgcgttactgacgcatttcgccaaccgtacgctttatccttcgttatcaacgatagttattatgggccattcagcaggtgcccaatatgtacagcggtatgccgtcgtcggccataaaaatcagaaactggcgcaaaccggcgttgccgtgcgttacgtcgttgccaacccgtccagctatttgtatttcaccgacgacaggccaaatagcaaaacgataacaaacggaacctgtccgcgcgcaacagaatggaaatacggctttaaatcggccccgccctatgtggcgtcgcaggatatcagtaagcttgaatcacaatacctctcacgcgatgtggtgtatctgctcggtcaggctgatacaaacccgtatacccattatatcgaccgttcgtgcgccgcaatggcgcagggtccttaccgactcgcccgaggattagcctacttcaactatctgcaaagtcgacacccaaccgatcttgcgcagaaaattgtcgaggtgccaggcgtcgggcacaatcattccgcgatgtttacgtccgattgtggaatcgccgcgttatttaagctgaatttgccgcaaacatgccctgttgttggaaaatcggagccgaccgttcagtaa

SEQ ID NO: 268329 - DNA, 1437 bp, Klebsiella pneumoniae
atgaatattatctctaatgcgaaatggaattctctaacgcaattttttaagattggcattcaagctgttaatctcatttatctggcaaagataattccgcctagcgaatatggagttatggcaatggcggttgtagttattaatcttggtattttacttagggatctcggaacgtctgctgcaataatccagagaaaagagctgtctgaaactttaaagaatacaattttttggttaaattcacttctaggtctttttttggcctttattatagtggctatttctcctttggtttcatctttatttaatgctcctgagttgactaatgttctaattcttctaagtattacatttcccttttcaagcattgccgctactcatttggccctcctagaaagagaatctttgtttaagaaaatttccactatcgaaattagttcttcattgatttctgtagtttttgcaatcattatggcgaatcttggttttggcgtatatagtttagttgttcaggcaatagttttaagttttatgtctatggtgcaattttggtttgcttctaattggagaccttcttttaaaatactcattaataaaaatgatttgatgaatatttttggttttagtgcaaacttatcattatttaatttgataaattatttttctcgtaatgctgatagtttttttattgggaggttcatgagcgcaggaattcttgggaactataatttggcttatagaattatgttgtttcctctacaaagtttaacttttgtaaccaacagatccctgtatccggttttgagtagagttcaggatgataataaaaaaatattctctacatattcaaattgtgtcttcattattgtatttattactgcaccgctaatgagtgggttggcttattttagtgatcctttcattcgattgatttttggttctcaatgggacttgacggcatcaattttaaaatggctcgctcctaccgcaatcctgcaagctgtacttagtacatctggttctgtatttatggcaaagggacgaactgatgtcctgatgcggcttggaatcatcggtgctattttacaagtcggttctttctttattggtgttaattataccattacgacattttcaatgtgttattttattgcaaatcttataaatttcttccctgttatgtattgtttaatgaaggttattgaagggagcttaatgtctttactgattcgtttgcttcctatttttttatctactatacttatgctttcttgtttgttttttttaaatcaggtttatcccatatccaaatttctggatgtatacattcttgttattttctctttacttggttctagtgtgtatattctattcatggtattattttcttttgattttagaaggtttttgatttctatgcttagagcaaggcattag

SEQ ID NO: 268330 - DNA, 645 bp, Klebsiella pneumoniae
atgaattggcaagtaaattatgcgattgaatatattaatgataccctaaacgcaccagggtctgcagcgcatgtaaagggagatgccattagaatttctattcatggtaggcctgatgcattagcagtaatatcagcatcagaggaaatcaccttggaaattgctcagaagtatcattctgatttcccgaaggtagattttatatgtggatatagaaaacagtgtgtttggactggagaggctatcagttatgttacatcagctaacataggctggggtagcgctggaacattttatagcgccttgtctgataacactctcaacactgcctcacataaagactacttttactcgtatcgacgaataagccagtcgagaaaaataagaaatatagagaggcagtttgatcgtgtttttattattactttggcaaacaatcataaggtcagagtaggtatgttaattgaatatgaaccgactgcagatgctgtgcgcacattctgggaaagatttggccccgttgatattttgtggaatataaatccaaatggagaaccttctaaaaatgcctatgaggcaggtcgtgaacttgggtgtgaggtaatgaaatggcagggattagaagcattgatcgctcaaaaataa

SEQ ID NO: 268331 - DNA, 2166 bp, Klebsiella pneumoniae
atgtcatcagttaaaaacagagccgtcgagaaagaggcggatgaaatcgatttagcacgactggttggtgagcttatcgaccacaggcagcttattatcgccgttacctcactatttacgctaattgcgcttctgtatgcactatttgctacgcctatctaccaggccgatgcactgttgcaggtagagcaaaaacagggaaacgcgctccttaatagtctgagccagatgctaccggatagccagcctcagtcggcaccggaaatagcgctactgcagtcgcgcatgattctggggaaaacggttgatgatctgaatttacaagctcgggtagaacaggattattttgctttagttggcaaggggtgggcacggttaaccggtaagaaagcggggagtgtgacagtcagtagactttatttaccttcggatagtgggttagatactcccagcctgaaattgacggtaaaggataaaaatcactacagcgtgacttttaatgataagcagatgtcgggagaggttggagttttactggatagcaacggtattgctcttaaggtggataatattgaggccgagtccggatcaacatttatcatttcttatgtaagtaaactgaaggccattacagatcttcaagagactctctcagttgtcgatcaggggaaagataccgggatgttaaccctatcattaaccggtccggacccgctgctactggagaaaatactcaatagcatcagtagtaattatctggcgcaaaatgtggctcgccaggcggcacaggacgcaaagagcctggaatttcttaacgagcagttacctaaggtacgcaatgagttagatattgcggaagataagctaaatcaatatcgtcgacaaaaagactcggtcgatctctctttagaagcaaaatcggttcttgagcagatagtcaatgtcgataaccagttaaatgaactgacgttccgcgagtcagagatttcacaactgtatacgaaagaacatccaacctataaggcattaatggagaaacgcaagactttacaggaagaaagggcaaaactgaatcaacgtgtttcaggaatgccaaaaacgcagcaggatatattacaattaagtcgtgatgttgattcaggacaagcggtttatatgcagcttttaaaccgtcagcaggagcttaatatagccaaatccagcgccattggtaacgtcagaattattgataatgctgtagcccagcccaaaccagtgaaacccaagaaggttataattttattagttggcattatcttgggcggaatggtatctgtcggactggtgttgttgagagtgttcttacgtcggggaattgaaagtcctgaacaactggaagagctaggcattaacgtctatgccagcatacctgtttcggaaacctttgctaaaagaagtgggcagtctctgaggctgaagaaaaaagcggatggtgaatacgaaagtttcctggcagttgaaaatccagcggatttagcaatcgaggctatccgtggtttacgtaccagtctgcattttgcgatgatggaagcacggaacaatgttctgatgatttccggggccagtcctaatgcggggaaaacgtttgtcagttctaaccttgcggcggtaatagcgcagacaggacagaaggttctgtttatcgatacggatatgcgcaaaggctatactcataagttatttaatttaactaacgataatggactttccgatatcctttctggtagaactgaaatcgataaggcaataaagaccgttccaaatgcaggtttcaattatatatcgcgcggggtggttccacctaatccggcagagttattaatgcaccgtcgcttgggtgaactcctaacttgggcaagtcagcattatgatattgttatattagataccccaccgatattagcagtgacggatgcagcgattattggccattatgtcgggacgacgttattgattgccaggtttgagcagaatacagccaaagaaattgaagtcagttttaaacggtttgagcaaagtggtattgtagttaaaggctgtatcctgaatggtgtagtgaaaaaagccagtagttattatggttatggatatagccactatgggtattcctatactgacgataattaa

SEQ ID NO: 268332 - DNA, 468 bp, Klebsiella pneumoniae
atgagccggttaaccgccattatcagcgccgttgtgatctgcctggttgtttgccttggttggctggccagtcactaccacgacaacgccaccgagttcaaaaggcagcgggacaaagcgactgagcaactcagcctggcgaacgacaccatcgctgacatgcaggtaaggcagcgagatgttgcagcgctcgatgccaaatacacgaaggaattagccgatgaaaaagctaaaaatgatgctctgcagcgcaagcttgataatggtggtcgggtgctcgtcaaaggcaagtgtccagtgtcagccgcaacccaaacctccggcgccgccagcgtgggcgatgatgccaccgtcgaactctctgcagttgctggacgaaacgttctcggtatccgatccggaatcgtcagcgaccaaacagccctgagggcgctgcaggagtacatcaccactcagtgcctgaaataa

SEQ ID NO: 268333 - DNA, 144 bp, Klebsiella pneumoniae
atgaaccacaccgactttctccggtaccaggcagagagcgttaagcgtgccagcatgtcaccagtaacaaagcacagccagaaaaaaagtaatcagccgaataagttcgttcgcatctatcagaccctgggagagacagcatga

SEQ ID NO: 268334 - DNA, 135 bp, Klebsiella pneumoniae
atgagcatatacgagaaaaacccctccggagaggggtttgatttcaactggaggctttgcgttctgctggggatttgctcactgttttatccccttctcggtatttttcagatcgttttctgcgaagaggattga

SEQ ID NO: 268335 - DNA, 216 bp, Klebsiella pneumoniae; identical to SEQ ID NO: 230738

SEQ ID NO: 268336 - DNA, 831 bp, Klebsiella pneumoniae
atgaatcaaaatccattttcattttatgatttcttaggttatttaataccaggaggtttattcctttacttactttatttcgtaggagttacatacgagttagaacctgctatgcagatagttaaattcataaacacacaacctaatgcttttagtctattaggttacgcttcattaatagtatcatcatatatctctggtcactttgtatctattctatcagctttctttattgagaaatacatgaatgaatcactcaattatccatctatttatttatttgaaaatataaatgataaatatactgagaaaagaaaaatcgataaaacgaaaaaaataagaaactttattatcaaggtaattacttcaccgatcatgtttcttgacctgtgtacatttaagttttgctactccagaggattgccaaaaaaactagcagagaacctgtggaaaaaagttagtgaatcgtatgaacataacctaggcataagcttacataaaagcaaatacttagatggtgatctgttcagattcgcctatcattctgcatatgagttttctcaaacccatcagagtaaaatacaaaattacgttgctctttatggattttgccgaaatgtttgcttcattttcttgcttaatttttggatttcagttttagcgttagccttgactttctttgataatgacactcataaatacaattacttatcaatattcataactctatttattctttacgtgttctactgtggatttgttaagttttatagaagatatagtctagaagttctcatggcttttagtctcattaaattaaaatcgcagtaa

SEQ ID NO: 268337 - DNA, 357 bp, Klebsiella pneumoniae
ttgaaaaaattaatcccaattctactacttggctctatttcaatgtttatttctacctcttatgcagaaaatatgacttcagaaaccaaacttgagacagctaaggacggaatgtctaaagacggaatgtctaaggacggaatgtctaaggacggaatgtctaaagacgaaatgtctaaggacgaaatgtctaaagacggaatgtctaaagacggaatgtctaaggacggaatgtctaaagacggaatgtctaaggacggaatgtctaaagacgaaatgtctaaggacggaatgtctaaagacgaaatgtctaaagacggaatgtctaaagacgaaatgtctaaagacggaatgtaa

SEQ ID NO: 268338 - DNA, 732 bp, Klebsiella pneumoniae
atgccaaataaacctgaaaacgagttaaagagtgagataggtaagcgtattcgctctaagcgagaagagttaaagcaatccagaaaccacgtagctgacttcctaggggtagctttatcgaccttacaggcgtgggagaatgaagacagggaaccaagcgctacacatattctcaaattagctgagtgcctaggggtctctgttgaatggcttgtcagcggtgctacgggctctgaagtacataactctcttttaccggcagtggatagcgcagggactgctttagatgttcaaggtaatagcgttgacttagaagagttcgtgtttgttcctaggtataacgtcgcggcttccgctggatttggcgcatggaatgatgatgaaagcccgatgtttaccgtcagctttcggagatactgggttgtaaatcatcttaaagctgacccaaagagactatcagtcatcagcgttaatggtgattcaatggcgggaatccttaatgataaagacataatacttgtgaatcatgatgatagagacccacgcgaaggtatttatgtgatccgccttgatagccaactgttagtgaaaatggtacagcgtttaccaggagcaaagctgcgcatcagtagcaccaaccctgcttttgaaccgttcaccgttgacttagataagattccagacgattttgatgtggtaggaaaggttgtgtggtatggaagagtcgtttaa

SEQ ID NO: 268339 - DNA, 168 bp, Klebsiella pneumoniae
atgaaaacatatcttgaaaacattattaatcgtctggttaagactccttatctgcgtggaatagtctgggtgttttgcattttattttgcataaccttctggggcgtctgtattcagcttggtattcaagcatggggtctcgtatcaaaattgtttatgggggtttaa

SEQ ID NO: 268340 - DNA, 546 bp, Klebsiella pneumoniae
atgctggactatgaaagaaatcgctcacaaaaatggcattcgggattaaacggagaaaggtggagcaacaacgaaatatcgtatttaatcgaatatggcaacagtcagccattaagggaattaactgcggtattagggcgtagttacgactctgtaaaaggaatgcgccacagactggggttaggcaagcggaaaaactatcagttctgggaaaagcacgaaatagattttctcaaaagtaatgccgggaagatggtatgcagagatatcgcgaagcatttaggacgtacccaacaatccgtaaagggtaaggctgaatacatgggactcagtcttgtctgcatcggagaaaatagccctacagccattcacagtgatgaagatgtgttgctttgccgtgaactccgtaatgccgggatgagtttaaaacttattgctgaaaaaatggaaatgtcgttgggttccgttctgtggattatttatggcgagcgcatgacacagcaggatcgtgtcatgctggagtttgaccgggagaagaacctatga

SEQ ID NO: 268341 - DNA, 315 bp, Klebsiella pneumoniae
atgggtaagttaattgaaattagcgccacccacagtgtggccgctgaaaccattgcggagctgtatgttatacccggcgaagcggtggtggtcggtttaaaaaatggcagcacgttgtttgccgatgtgaaagaagatgagcccctttgccgggcatatcaccgcatcctggttgagatccagatagccctttgcccgatgggttatatcgtgagttcgcagatgcaactggaagctgacccgcgattgtacgaagcacttcggtggaaccacgaagagcttcgcgttattgcggatcacagcttacttaaataa

SEQ ID NO: 268342 - DNA, 207 bp, Klebsiella pneumoniae
atgagcaatgttaataacaatttgctcctgaaacagtttcaggaaaaggacaggctggcgcgtaaggttactgacttgatccgctccggactggaggatgaagaactgtattcggtgattcagagtgatgtgatgtggctggtcatgcagatgatttgcagcccttcaggggctgcaaaatgtatcagtcagtcttcggttaactga

SEQ ID NO: 268343 - DNA, 189 bp, Klebsiella pneumoniae
atgtcaaaaactgaacaaaacattgagatagccaaactggccgttgaactgatggcgctgatgcagtcagcaaaaacaccccatgcttatgcaggtatcaatgatgagttgaatacctatacgcctcagttggtcgatgtttttgacgctctctatgatcgtctgaagggtcagttaaccgaagactga

SEQ ID NO: 268344 - DNA, 405 bp, Klebsiella pneumoniae
atggctggtaaaacaaaacccgaagcccagacggcagaggacaaacaaaaggatagcgcgggtgcagtgaccggcgctgatgtaaccactggtgacggtgcagcgactggcttcggagatgctgtcggagatggtgcatccggcgatggtacagaaaccggtgctgatggtgctaatggcccaactggtgacaacgcgaaaactggcggtgatttagccccggtagagtcctgggttaccgtccaggtcgtccgttcccctgcgggtaaacgcattcgcggcggtattgagttcaccacaaccccgacaccgctggactttttgacgctcacgcaggagcagcgcgaaaaaatcatgcgtgatccttacctgcgcgttaagccgtacaccccggctgaggagtaa

SEQ ID NO: 268345 - DNA, 798 bp, Klebsiella pneumoniae
atgagtgattactactacggacaagggaaattatacctggcgcgtcgaaattcggcgggccaggctttgtcctggcgttgggttggtgatgtttccgcgctgaatattgaactggagtttgaagagaaaaaatcccgcgcgtcggtcggtggacgactggttaactctcagcgttatatcaccgcgctggaagggaaaataacatcaacctggcatgaattttcaacggaaaacttaaaagttcttcttgaagcaaagaatacacctcagataccagacgtgtatgcacaggacatattacctgaaggcatcgaagccggggacagaattacgctacgaaatccaaatgtgtggagtgtttctatagaagacatggtcaatggtgatgattatgttgttgacaggttgtggggggcgataacctttctttcaactccggtagtgcagcccgttgtggctaattatcagcacccgggcaataccgtattatctttagctgaaagcataactgaagaattctcattacgttatgaaggcgtcaatttggctgaaaataaccggcctgttttagtcgaaatttacagagtgtcattagaccccgttgcgacgttaacgttaataaatgcagatacagaactaaaggggctagaaacaacatcaaatattttatatgacggtcaaaaagcaaatgatgaattacttggtcgtctggggcgcatcgttctgttcaacaggctaagcggcattacacataacggctctattagtcatgatggcagatatactcgtagaggataa

SEQ ID NO: 268346 - DNA, 2820 bp, Klebsiella pneumoniae
gtggctattgaccagacgtcttctttttctctgattaattcacctgtaagcattgggcgaggtcgtgattcatcaggatggtacacaagttctaatatctgtgttgcctttattggttctggtcttggtgaaacagaaattttttctctgaatgatgctattcagcggtacatccatacatttcgtcagtccgtttcagctgacggtgtctgggttcagactcagttttctttgctgaaccccgactcggtggagagtatctcatctgaaattgttgcaaaaaaaacagcgctactcagtaacgttataattacctacagcaaatacagcgaaatttctgccacaacggcagattcaccatatattcgtgcactggatgaatcgacgggggtgatttatgaaccgtctgatattcccgatgctgtcctcagtgaaaccacggcattcattgccagaatgacaaccatcccggatgccctgcaacaggtggcactaaatcagctgatttatttgctcaaaaaagacggcgtctgggacgcgctggaggggctgtggcttggcgtcagcacgagttatgctgattcattgctgaacgtggttaaaaataaatttaacctgaccagcgataatgccccttcctggaatcagtccggcgggtggacgttctcccgctcaggtatgacctggctggatacggggtttaatccctcacttgccgcaggaaagttcgcccttgaggatgcctcctttggagctttgctttttcccccggcaggaatgacggcaacaggtcacatcatgggggcattcaatggcaccgacgggatggcgctggctccgcgcccgtcacaggcaaccagcagcccgatggcggtacgactgaaccagggtaaagcctacatgccgggtgattaccctgtcgccaatgctgtatacggggtttcccgtcttaatggtgagcttgccgtatatcgtgaaggtctactgctgggttcaacgacgcagatagcgacagccctgacaaattcgaatgtattgctgggatgctctcagaaaacagccgggtatcatatgtttgatggggccattggtgctgcctgggtgggggcgtccctcaccgcaaaacagatgctgaccctgaccaatgccatcaggcgctataacgatgtatttcgcagtcgcatgtccccggacgcctcctggtggacgccgactgaccggcggatgtattcgcaggccgatatcattgctattgccgggagcaaagcaggaagttcagcgcttgaaccgcctgcctccgatgccacaatgaccgccgatatcagcctggtactcagtgagcaggggcagacgtaccggggcgggtatatcgaaatccagcctgattcctttatcggcggaaccgaacccgcgaccgacagtaccactgagctgtgggggttcccgcactcgcttaccctgtcagagcagaaccgtctgcggagcatgatgctgcccggcaacgggtacggtattcattatattcgtctccccctcggctttgcctatcgtggttttcgcaacatcgataccacgaccgggctggcgaaaaatatcggcgagcggtatgcggggcaaaatgccggcctgaaaagactgatggctaacattgttgatgcggggggcggtctggcgccggaatactggtgccctgcaccctactggatgaccaacggcaaatacgcgggtacaccgtcagcgtataaccagccgtgggccgggggttcgtatccccgaaaaacgaccctggattcaattaaaggctcagacccggagcagtacgcggcccaaatcgacgcgatgtcagatgcaatgctgaatgacttcgaatacctgcatcagaatgtcggcccggtgcgcatgtatggcctgcagaatgaaccgcagtacggccacgaactgtatggcgtgtgcaaatacaccgaccgcgtatacagcgacctgctggcagcactgcaaccgaaaatcgcagccagcgctattctgtcggaatgggaaggtcaggaaaacacgccgctgttacacgtggcgtcagataatgactggcatatcgggcagacctatatcgatgctcaccctgaaaccatctggggatacagccatcacaatatcaccgccattgccacggacgccgactggttaaagtcttcgacgtttattaaccagaaagggagcaagaaaaacgttttcgtgaacgaaacggaatatatgcacccggaaaacagcagcaatgcgtggaagtgcgccaacaatatgctgagggatgttcataacctgacgtttggcggtgcggaagttgtcatgccagttattcacctttgcaagcagctgggagaaagcaccagttacacctcaaacacggacggctacgccattatgcgctgcaaccttcctcagcagtatggcgtctctcccggcgcgtcaggtaatgaggatttcatcggctacggtggttttggtgaaaatgcctggaactataacgcctaccgtctgacggccgacaatctgcctgtaggttccattcgtgtgggaggtcagccgacgatatcggccgcgggaattggtgttgcggtattcagggcgggaggaaagctaaaactcttcctggttaaccgtaacgctggcgtggcagcaatcactgtgtcacttggaacagcaaaaaccctggcgggcagacattatgacctgtcccatgccggtgatgctctgacgtccagaaccggcagcaccattacatttgttctacctgcatacagcggtcagtgctggatcgagccttga

SEQ ID NO: 268347 - DNA, 282 bp, Klebsiella pneumoniae
gtgaaatctttgtcttcaagtcgccgggaggtacttgtagattgttttcacgtctacacctattacatcggctacctgctgccgcgtagcgcccgtacccagcatcctgcggcatccctccactacttcttcaatcattccccggcgaagccctccagtacacaccggcggtcacgctgcaaactgccaaacgtaagttatttcgccttttgctatctgaacgctagaataaaagaagcaatcaaaattgcaatcgatgcttctgaagcaaaagttgcttaa

SEQ ID NO: 268348 - DNA, 270 bp, Klebsiella pneumoniae
atgatagctaccacaggagtcgtcaagcgtcattgccacttcataaaagtgaatgccacgccgccaatgcgtgacgatgtcttactgttcatgcatgttccgacctccgataaaaactgttttaatataaagcagttttatcgtaagggaagatcaattgaggatgaggctatcaattttgatgacagcctcaagttactgctaaacctctgtccaacactgcccgctataagcaggaagaacaaaagttatggtgctaccagtttttga

SEQ ID NO: 268349 - DNA, 681 bp, Klebsiella pneumoniae
atgtctataccggttgtgatctcagcagagcataaccagctgatcgaaaaagagcgtgatctgcgctacgtcatcgtgaaggccacagcgggtgggctaacccacgaagagcggcagatgtatgtgctgcttaatagctttgaactatccgtcccggctcagtcgtttgccaccgtagccgatgctcaaatgcaggccattgatatgatcaatggagatacattgctggctgatggagagggtttgatgcgcaagcggctaatcgaagcgacacggcgaatcaaaaccttacctttctctatccggaggatcatgcgtatcgatttcgaccggtatgaccgtccccaaaacatgctgaatgtctatgacattccctggggggctgacggcgtttatcgacaggatttggtggactgggaacggatcacttcggagcagtttgcggatttgccagactactttaaagaggcgctgcttctggccaccgttaatgaggcatgcgagatcgccaatggcaacgatattgcgagtgcgcgagaagacggcattttgtctgaatcgatcggtgaaacaaccaatatgtaccgcacaagcaaagtggcgaatgtccgtgtggcccgcagcacctggcgattgcttattagttacatcaacaatcggatgattgttcgtcgtgcgtaa

SEQ ID NO: 268350 - DNA, 1446 bp, Klebsiella pneumoniae
atggcaatgtatgaagttggcaccgtaacgggtgcagcaaaccaggcaaaggttactggtatttcaacaaagtggtcggagcccgcacttggtattcaagagggttcaattttagtcatttatcgcaatgggagtgctgatctgtatgccatcaaatcagtaaataatgacactcaactgaccctgacgagaaacataacaactgctttttctggtgcgaaatatggaattattacgtcagaaactgccagcacatcgtcttttgcgaatcagcttgccagcgcatttactctttggcgtaacgttgtccaaggatggtctacagccctgaccggaagcggcgacattacgatgacagaccctataacaggtacgtctgtgactgttcctgctgtatctgggatggcgaaagcatctgacctcgcggaactcaggaactcactgaaagattcagcgaagacgagcgcagcaaacacgttcacacagacgcagatattcagtaagggggttactttcagtgccactataacggctgcagggcaaattctcaggaagaatagtaatacacagttcactgccatcgacgccggcaaccttgaaattagcagcgacactacgccgtatattgattttcaccataaaggaagcgctgcggactacacacataggatcatcacagaagacggagcgctggctatatatccggctttacgagttcggggtggcactggtctctacggcgccacaacgctttatggtgatatttggtggggatacgtcgcaaccagattaagcgatcccgtaaacccggccattgggacgatcatcaacacccctaattcctgctggaaatttcagtcccgcggtgccgacagtaagggcgcaacagcaggtatggcgaccgcatggtttgaggaacaagtaggcactaaccaccgtttagcgttaagtgtgcagggattcaatgccaaccagcagtggtggcaattccttagtgatggaaggatttacagcagccaaaacgggaacgttcagtttcaaggaacatcggacgcgcgattaaagcatgatattaaaccgactgacggtcagctttcttttgatcgtattcgccagcttgagctagttacgtttatctataacgacgatgagcaggaaagagtccgcagaggcattatcgctcagcaggcacaggaagttgatcctcagtacgttaagcagatgcgtacctcgtatattagtaatggcgagcagatagatgatgatcgcctgcagttggacaacaacgtcattatgatggatacgcttgcagctgttaaggtgctgattcagcgagttgaagcgctggagaacaaacttaactcaacagaggagaaagagccccccttgaatacaaaccagaatactttagatgctggtttggctatgaccgatgaatacaaataa

SEQ ID NO: 268351 - DNA, 879 bp, Klebsiella pneumoniae
atgccattactgcgtgaagaagctgaaaagctgtctaataacgagcttgaacagggcgtgatcgagaccattatcgatcgtgacgacctgtttgccgtcctgcctttcatgaagatcaattcgaaggcatatctttataaccgcgaaaaaaccctgagcgaagctactttcattgatgtgaacgacaccatcaccgaaggtgcagcaaccttcgaagagaaagttgcgaagctgcgcattctggctggcgacgttgacgtcgacaaattcctggctaccactatggctgataccaacaaccagctggctatccaggttcgtcagaaagtcaaaggtctggctcgtgccttccgtcgcaatctgattgttggcgactccaccactaacaacaaagccttcgacggtattccgaagctgatgcatgacgatcagaagatcgacatctccggcgcctccatgactttctccatgttcgacgaactggtcgacgcagttaaagatctgggcgcagactgcatcatgatgcgttctgagcatcttcgcgcatatcgtgcgctgctgcgaaccgtaaacgtaggcccgtccgaaatcatgatggaaaacttcggtcgaccaatgctgtgccataacggcgttccgtttatcgtaaacgacttcattccggttgcggactccaccaaagcggatatctactgtctgcacctttctgaagaaaacggtgtaactggtctgtacggcggcgaaaacgccggtatcgttgtggaaaacattggcaccgttcagaacaaagacgcagtacgtactcgtgtgaagtggtactgctctctggccaataagcacgacaaagctatcgcggcgctgactaacgtcaaaatttaa

SEQ ID NO: 268352 - DNA, 423 bp, Klebsiella pneumoniae
atgtttaaaccgctttggcagcacggtcgagcgatctgctttgccgatggctggttcgaatggacaaaagaaggcgacaagaagcagccctactttatccatcgtgccgatggccagccgatattcatggcggcaatcggcagcgtacctttcgagcgcgggaatgaagcagagggatttttgattgtgaccgctgcggccgataaagggctggtcgatattcatgaccgccggccgctggtcttggcgcccgaagccgcgcgggaatggatgaggcaggatgtcacaggggcacaggcagttgaaattgccggtgacggaacaatatccgcccaccatttcacctggcacccggtttcccgcgtggtgggtaacgtggagaatcaggggcccgaattgattgaggcaatcaaaagcctatag

SEQ ID NO: 268353 - DNA, 147 bp, Klebsiella pneumoniae
atgattgtaaccatatccataataactacttgctttcttaactacgccattaagtatacatcctttaacaacaacaccactttgttcaaaccgttttatactaatatcgatttccttcgctgtattttcctcaaatcgggcaactaa

SEQ ID NO: 268354 - DNA, 1041 bp, Klebsiella pneumoniae
atgctggaaacaaatgaaaagaggctcacttatcttttaaaaaacaaaaaaaaatatttcaaaacggtaccggtaataagaaaaggtaaaaaaagaacgacgtataaagtggttggtgaattattaaagatacatgagcttattaaacagcgtgttttttctaagatatcactcccagagtatattactggaggtaggaaaggagtcagctatattgatgattgtaaatcccatcttaataagtcaattatcattcaagaagatatgaaggatttctttccttctataaaagaagatctgatagctaaagcttttcaatattacatgaacttctctcctgaagtttcgttattaatagcgaatctatcaacacttgaaggctcacttgttcaagggactaagttaagtactgacattgccaacttaatatttttagaagaagaggctctcctcagtgaggaagttagaaaattaggtggaatttacacgagatatgtcgatgacataactattagtttcgaatctgaagttaataatgatgatatttcaaaaataaaattaatgatattgtcaatggcgcttaaaagtggggttagattaaataggaagaaatcaagggttttgaggaatggtcagtctaaaattgtacatggtgtaaaagtaatcaaaaagcttagaccaacacaaaaaagaaaagataatataagggtgtgtctttttaatttgaagaaaaaagtgattgaaaaagaaagtgttatggatgtccttacgttgtattttaaaattagaggattaataaatacattaaagcagcaaggtgataagaatcatgcagagtatataaaacaagctaatcagttagtagctggtgttgataaaaaggaggcaataaaatcaatcaggaaaatgagaaaggttaaagatatcaggaaattaagatcgttatattcaaagttaaaaccattaggctatacatctaaaagtgtttctgccattttggatgctgaatataaaacctgtaaatgtaaaattaataactaa

SEQ ID NO: 268355 - DNA, 735 bp, Klebsiella pneumoniae
atgaatactaatgacactgaactacttcgcttatttgaaacattaaccacagagcaaaagattgatatcgcaagacacttgctacaaaacaaagatataaaatcaaccaccgttattgcaacagaagaagataaagcgatctcatttgcacagccttatgtttttgcttttacttcaaactttcgagttttttctgatcttgatatttctaagaatgaattccgcgtattaacatacatcttggaatatatggagtttggaaatctgattaacctttcacaatcatcactgtgcaaagcattgaatatcgcttccggtaatatgtctaacattttcaaaaaactcagacagaaaggaatactcgtcgagcatcatggtcacctctatatcaactcaaatatttttgctaaagggatgagtcatcaactggataagaaacgtaaagaacagctaagcaacgctcgcaatctttgcgctgaaatagagcagtatccagatgaatatactaaatattcacaggaagaaagaagaaaactgtccttagaaacagaagttaaagaaatctatactgacgcattcgtttttagcaagaagaaaaagaataatgcagttcctaatgctaaaaacagtatcaagatagataaaccccgcaaggtatataaacgaacaaaagaaaatgaagcaaatagacaagatttagttaatatcactaaccacttaaaagctgtttcctaa

SEQ ID NO: 268356 - DNA, 624 bp, Klebsiella pneumoniae
atgagcggcgatattaaagcagtatttgatagcaatttgcttgcaactcaggcgggtaccgttcaggtatttcattttgatatggcttcccgtgagtttatcggtaccgaggaaatttatattcatgtcggcgttggccttcctgcattttcatgccttgaggaaccaccggtacaaagtgaatatcaggttgctgttcgttccgaagataatttgtcctggtctgttaccgatgattatcgcggtatcaccgtctatgacattcagaagctggctagccacgttattaccgaacctgggcccatacccgatactgtaacgacctctgcaccatcaaccccatacgacaaatgggacggttctgcctgggtaacggatgctgatgcacagcatactgcgtatgtcgttgctgcgcacctgcaaaagaaacagatgattactcaggtctcagacgatatttcaattcttcaggatgccgttagtttaaatatggcaactgatgatgagaaatcccgtctcactgctttgcaggcttatcgggttctacttaaccgggtagatacatcgcttgcacctgatattgtttggccgattatgacaactctggaggatggtaatgtctaa

SEQ ID NO: 268357 - DNA, 2781 bp, Klebsiella pneumoniae
atgtctaatttacccgaacagactgcgtgggaatcagggattcatcagctcgaagaagaggatcgggctaaagctggtcccggtggtgtattaaatattcaggcaactcagttggcgaatcgtacacggtggctgagagctatggtggaatcagtagaagattaccgagaatatactttttataaatcagaatctgaccctgacggaacaattacgggccttgctaatacaccggcagaaaaaatatttcgtgtggctcagggtttaaatgatgaccttgcgtttatttattatctgaatgacgacggagtagccgtacccatcacatcactgcttggccgtggcgctattacaagcaatgtaagagaatactcgactcttacactcgctgaagacgatgtatcagctggtaatattctcgacggtgccacatgttgggtggctgattcatcatatgagactcttgcagtcgagtacatcaataacggcgggacgcttgaagctaccggcggcagagtgccgtctaagtcatatctggattccgtcagtgctgtgactgggcagatttattctgatgtagggcgcggctcactggtcattaactatttcgacaaagagcggactacggatggttttgcggttggctctaccggctcgctggtcgcaaatgcggcgtactttgtgagtgacatgatacccgcactcgacggtacgcagtatgttttcgctgtgaatgtgtcacaactggcattttatgatttacagggcaatttcatttcctatgttgcaggcgccactgcgggggctgtatttaccacgccagccaggactcgttatatccggttctcgcagacgctgagcactggaaaatccggacagatgctaattaaaggtacttctcttcctgctggttacattggggccggtctggtcgaccctttctccgccaaacgaactgccctggcgcaggcaattgatattagctcacgttcgaacgctctggtacggaacctgtttgataaaaaccgggcaaacgacggatatgcactctcgactaatggcagcctgacggcaaatgccagttattttgttactgactatattcccgtgctgccgggggagagctacatcctttcatccggcacacaggtgctctgcttctacgatccggacctgaacaaaacgtcaaacatcactgtcgctgctgcaacggcttttaccgtgccgacgggttcctattacctgcgtttccagagcacgccgctatcgggtaaagaaagtctgatggttgttcgcggaacctctctgccatcttcctatgtagggtttggtgccctgactactgcggaagccaccgcaatcactcagtcaatcagctggggaattgcggacggtactctggccgccatacgcaatatgttcaacaaggatgttgcgctggataattatgcgctggcgactactggagcaccatatgccgctaacaactactttgttaccggctggatacctgtcaagccatctcagcaatacataatgaacgctgcctcaggcgttgctgtattttttgatgccaataaagctaaagtttcaaacggaactattgctaacggtaccgtatttaccacgcccgctggcgcggcatttgtccggtttcaggttctgggtctgaccgtcaaaaacacactgatgatggttgaaggctcagcgcttcctgccagctacctgtcgtttggttcgccaacatcgacgtatgtcgatacccaggctttaaccgtagcccggtcagtggcgctgtcattacagccccagcaggtcaatttgtttgataaatcgctggccatgctggatacggccgtttcataccagaccggcggcacgtcggcagcggccgggtattttgccacacctaaaatgatggtcacacctggagactggttcgtttctacgtatggatcgggtggcggcgcgttctataaaattgacggcacgttcctcagtggattccagaacctggttgcgaacaccccctatgcagtgcctgaaaatgcctactacgtgcggtttcaggttttaggcctggctcgattagaatccctgatggtgagtcccggccagaccgtgccatccgggtatgtcccgttcggaggaaaaaccgctacgttaccctggcagggtaaaaaaataatctggctgggtgacagtatcaccaataaccgtctgtatgaaccgtatgttctggcagggaccggcatgacggagttagctaactatggtgttccgggtcaaaccgtgcgcaccatggccgactcgctcaccgccgagactatcgcgaatgctgattttatttctatcctcggggggaccaacgactacggcggcaatgtcaggctggggaccatcgcagacgcgaccagtgcctacgatgaaacggcaaacggcaggtcgttttatcacaacgttttctacgtgctggataaaatctatacgctgaaaccctcggtacgtgtggtgtttagcacgccaatgaaacggggtcagaccgatgggcagagtgtcgtttatccggcggcaaatgccgctggtttttttctggaacaatatgtgcaggccatcaaggacgtttgttcaatgttctcggtccccgtctgcgacctgttcaataattcagggataaatctctacaatctgtcgatttacacaaacgacaacctgcaccccaatgcggccggttctgcgttgcacgcccgtcctatgattgcaaaatttaactcagcgtaa

SEQ ID NO: 268358 - DNA, 291 bp, Klebsiella pneumoniae
atgatcaataaccagttagcagaaaacagcgtaaatcagcttttgaacagcgtaaagctggcacgctttaacgcagaactagctgacaatcgcattgatcactcgttttatcacgcgctgacgattgctctggaagagctacaggaacgccgcaaggccgcagccaaaaccatcacactgcctacgccagcttgtacttatgctgatcacagttatccggcatacacgaaacagcaggttcttaccatgctggaatcgctgggcgttactgtcgttgaggaggatgtatga

SEQ ID NO: 268359 - DNA, 267 bp, Klebsiella pneumoniae
atgtcagacaaaccagtccgcgaatacgataaattcatgctccgcttccctgatggtatgcgtgatgccatagccgatcgcgctaagcggaacggcaggtctatgaactctgagatcattgctgctttggattcctggctttctggggagccaatggaggaagttaaccaaagaaatatagataccatggtaaggatagccactaaggcttttacagaagagatctctaaaaattacgacctagtgccgaaatcaaaggataaataa

SEQ ID NO: 268360 - DNA, 717 bp, Klebsiella pneumoniae
gtgggcagtaaaaacagcgaagccccattggcggcaacctttggggcttctatcgaaaataaccgcgaaggaaatatcgacatgaacagtgtacagaataaagagctaagtttccacaatgtcaccctggttccggcacctgttgcggatggtatatggctgacatcggcagatatcgctaaggcactgggatatgcttcaagcaaaagcgtttcgaccatttactcacgcaattcagatgagttcacaagcagcatgtcaatggtcatcaaaatgaagaccaatggaataaacaataacttacgtgaaaaatcggtccgcgtgttctctctccgcggttgccacctgatcgctatgtttgccactacagacaaagccaaagagttccgccgctgggtgttggatattctggatcgggaagtggcgcattcgccgattgcgaagcagttcagtgatgatgagctttgctctctggcatggttatggcgagcgagtgacatcatgctgacagcctgtgagagcgttactccattgctgaaggtagccgagcatcggcaggccgggcgctttcacacgatcggtcaggagttgcctcggacaattaacaaggcaagggcgctcattagccgcgagacggcgcatatcgagtttcacccatggaaggatgacaactggagcagggtattaccgcacctgcgtcaggagatgttgcagtga

SEQ ID NO: 268361 - DNA, 768 bp, Klebsiella pneumoniae
atgggagttttaaacctggtaatcaacacaaacttcacagatacaacgctgccattagactatccagatgcagttatgacccccaggaccttgtatttatatgatgctctggatacaacaagttacccacctcaggccgatattggggcaactaactggataaatttaatgccaggtctggaccctgcacagattggcgcaacagttggctggagcaatggatttacttttgctgatgcaacttctggtagcgaacagatattgctgcctgcttcatctaaggtggatgctgatctaccaggatttgtttttacagtgtggataaaacacactgcaactggctctggaagttgtggtatcgctggtgttgctgattccactggtacatctcaatatgcgatctgggctactacttccggaggggttgatacgatcagcatgctggctaacgggacagggacaaccgtttcatttacggctactccaggcagcatataccagcttacaatagcgctgaagaaggccacttcatcaacctacacagcaacttattataaaaatggggtggtaatttctacacagaccatctctgcaacatccatcaaacagccaactgacggaggacgaattggtcgtcttggctcttctttctctctccaatggcagggaactgtctaccggacatggatgaactccctaaacgattctgatgatatctcttcactggtatccagcgattactctataaattcgagcaggttttcataa

SEQ ID NO: 268362 - DNA, 744 bp, Klebsiella pneumoniae; identical to SEQ ID NO: 178223

SEQ ID NO: 268363 - DNA, 570 bp, Klebsiella pneumoniae; identical to SEQ ID NO: 140387

SEQ ID NO: 268364 - DNA, 519 bp, Klebsiella pneumoniae
atgaaaagattcaaccttctgcaaatgttacaaagcatcgggcgatcgttaatgatccccattgccatgctacctgccgccggtattttgctggccttcggcgtcagctttcaggatcccaatattgtcgccagcctgccgtttctcggcgctgactggctggttcacgtgcttaagttgatggcggaagcgggcagtgcgattttcgctaacctgccgctgctgtttgcggtcggcgtggcggtagggcttagtgacgatcagggcattgccgggttatcggcgatcgccgggtttttgattatgaacgtcaccatcggccagtttctggggatcacgcccgaatcagtggcgcaggtgcgtgactacacgatggtgctggcatcccttcgctccagaccggcgtgtttggcggcatcattatcgggattattgccgcctggctgtataaacgctattaccgcatccagcttccgtcctggctggagttcttctccggcaagcgctttgtgccgatag

SEQ ID NO: 268365 - DNA, 246 bp, Klebsiella pneumoniae
atggcagtatctctcgtgatacttttactccgtcctgtatgcgaccgtctctcagacatgtcccttgtacaagcatgcgatgacccaaggtccgccgagtaccctacgctgcgctatgatttcgtcatagaagacagtgtctacgacaatgataaaattcagatcggagtatttatcaaatccgccatgaataatcgagccatcagcgagaagggagtgaatctgcgaatcagactgaaggcataa

SEQ ID NO: 268366 - DNA, 267 bp, Klebsiella pneumoniae
atgaatacattatttattaacatccactacccaagctgcagggcaaataaattctacagcgaagactttataaaggctatcaaagaagaatttaaagatgcgaaattcactttagaatttggtgttcacgactatggtgacggaatttttccatacggacactctgacattagatacccatcaaacacctctgacatcgacgtaaaagatatatcttcaagagtggaatccgtattcatatctttagtagaagcaaatagaaattaa

SEQ ID NO: 268367 - DNA, 813 bp, Klebsiella pneumoniae
atggatgatatctcattatctattgctagaaacatgtttcacctccaagtctatgagtctgacggagttcgctttgaggacttgttttcaaaaataatgtactataagtcgccagattttcagcaggtgaaaccttatggaaatattggagacagaaagaatgatggttttattaaggggcagggggtatattatcaggtgtatgcaccagaagatgcatctaataatgtactagctgctgttaataaaataaaagatgattttgaagggttaagggattactggcatgatatatgtcctattaaaaaatattattttgtcttaaatgataaatataagggttccttaccgcagctgcacaaggagttaattgttttgcaaagtgattttaacttaattgatactggagttattgtagcgaaagatcttgaacgtgaacttttcaacttaccagatgacatgattcgttcagttgttgggcacctgccagacattgatcatgaagaatatatgtttgtatctggctttacttgtttcatctctgcttggattaattttgaaaaaattgcaaggcataaggttttttcggctaaacaacctaatcgccctctttttatagggaaagtagtcaatgctttagtaaaaaacaaaataatttctaggcaagatgcaacttttattaaaaaaattactgaggttagaaatagtcttgtacatggggtttcgatgttagtccctaagaagaatgaaatcgatatgttaattttcattactgaaaaaataaaaccagctggtgtatgtaggctagattaa

SEQ ID NO: 268368 - DNA, 441 bp, Klebsiella pneumoniae
atgtttcgttcgttgtctaaagaaatttacgccaaggaggggggaagacggtcttccgattttgctaaaaatgccgataaaggaaagttacaggccgaacaagtctatattcaggaatttgtcagcctgcatcaaagcggtttgaatgcagcaataactgaactaaataatcttaaaactagcctcgaccgcattctgcttaacagacagttttcagaaattgaaagtgttgtcttcacgttttcagaaccattacccattgcggtttcgtcaattctttcaccggagagggattttgatgggaccaaaattcaggatttgaacgatcttaccgtgtcggcggaacaggtctgcttcaatgctttttccagcgaaggtaagggatatgtagtgttcagttggctgggaacttcagcaattatcagacgttttgtgcgataa

SEQ ID NO: 268369 - DNA, 216 bp, Klebsiella pneumoniae
atgccggtatctaaagccgaagccctgaaattttcaaagtctaattcgcagagaaaggcgtgttatgcaccagcatccatacacgaagattgtgacaaacgtatcgttcaggcgcacacgctttctaagagcagtagccttaaggcgatcgccgactctagtaatcatgttatgggagtggtaatgaacctgccgagcctgatgaaaaacaactga

SEQ ID NO: 268370 - DNA, 2613 bp, Klebsiella pneumoniae
atggcctatgttccacccgtggggcagaccactgaccccgatattttcctggaaaacgttaagcgggccgacgaattagtgaacgggccgccagccaccgtccttgatcgcggcggcgagccgctcgactcctggcgccagattatggcactggtcgccgcggctatcgtcgaagcgcaaaacagcatcaccgctattggtctgccgtttaccaccctggccgaagcccaggctgcggcagatgaggggaaaatacctgtcggggcggtggcctgggtgcgtagcgctgatggtgattcgctggccaatgagtatatgaatgtggctggcacgatgaccgcgaccggacgccagatgtcgtcgcagtcatatctggatatcgtcagtgcggtgactgggcagatttattctgatgtcgggcgcggctcgctggttattaactattttgacaaggatcggactacggatggttttgccgttggcactaccggctcgctggtcgcaaatgcggcgtactttgcgagtgacaggataccggtactcggcgatacgcagtatgtgttcgcggtgaatgtgtctcaactggcattttatgatttgcagggcaacttcatttcctacgtcgcaggtgccaatgcgggtgctgcatttaccacgccagccagtaccaggtatctccgcttctcgcagactctgagcacagggaaaaacgcccagatgctgataaagggcacggctgttccgactgattatgttggggctgggcttgtggacccattttcggccaaacgcacagcactggggcaggcaattgatattagctcgcgtgcaaacgctctggtacgaaacctgtttgataaaaaccgggcaaacgatggatatgcactctcgactaacggcagcctgacggcaaatgccagttattttgttactgactatattcccgtgctgccgggggagagctatatcctttcatccggtacgcaggtgctgtgcttttatgatccggacctgagcaaaacttcaaatatcactgtcgctgcttcaactgcttttaccgtgccggctggttcctattacctgcgtttccagagcacaccgctatcaggaaaagaaagcctgatggtcattcgtggaacgtccctgccatcatcctatgtagggtttggtgcgctgacaaccgcggaggcaacggcactcactcagtcaatcgcctggggcattgctgatggaacattggccgcagtgcgcaatatgtttaacaaagatgttgcgctggataattatgcgctggcgactactggagcgccctatgtggcatccggatattttgtcacgccatttatcccggtaaaacctaacacgcaatacatcgcaagcagtgcatcaggtgtggttgtctattttgatatcaacaaaaccaaaattttgaacaccactattgctgccggaaccgtattttccacgccatcgggtgcggtttatgtccggtttcaggtatacggtctttcagcaaaaaacacactgatgatggttgaaggctcagcactccctgcgagctacctgtcgtttggttcgccgacgtcaacttacgttgatacaaaatcgctgactgtagcgcgctcggtcgcactgtccctgcaaaaagtgtcggtgaatctctataacagtgaacttgccctgacagatacgggtgtttcttatcagaccggcgggttgacatcttcagcggggtatttcgcaacaccgaaaatgatggtcacccctggtgactggttcgtgtcgacatatggttcagggggaggagcgttctacgggcttgatggtacattcctcagcggcttccagaatctggtcgcaaatacgccgtatgctgttcccgataatgcatattttgttcggttccaggtctacaacctgacacgcctgaacagcctgatggtttcacctggtcaggctgttcctgctggatatgttcctttcggtgggcaggggcaggaattgccctggcagggaaaggggatcggattccttggtgacagcataacgaacacggggaattatattgcgccactactttcccggaccggtatgcgccagattgccaattatggcgtaccgggtcagggagtcagaacgatggctgattcactcaacgccaccactattgatgcgatggatttcatttcgattctgggagggacgaacgattatgggggaaatcgccggctcgggacaattgcagacgccagggcggattatgacgatacgacggttaaatcgttttattacgacgtgttcttcgtattgaacaaaatctataccctgaaaccagcggtacgagtgatgttcagcacgccgatgaagcgtggtgcatttgagagccagccagtttacccggcggcgaactcggccggatttaccctgccgcagtacgttcaggccatcaaagaggtttgcgcgttattcagtgtgcctgtctgcgatttgtttgctgaaagcgggataaatctctacaacctgagcgtttacaccggagacaatctccacccaaacgtcgctggcggagagttgatagcccggagaatggcaagcgttgtgaatatgctttaa

SEQ ID NO: 268371 - DNA, 417 bp, Klebsiella pneumoniae
atgaacatctcaacagtaaacgagctcatcgcctccctggagagcgcaggcgagctgtcgatcagagagacaaaggttatggcgctggcgaaagcgtttaagcagctggctgcggagaatgtggcgatgctccgcctgttggccgatatcagtgagaaccacgttgaatatttctctgaaggcgaagacggaatgtttgccggtgttccactggattatgtgtccgaaatcaacatgtacgtttcccgcgacgttaacgcggagaacccattccctgccaccgatcgcatcgtagccgaagccgaggcgcgcggagttgagaagttcgcgaaaaagcttgagtcacgtggaaggcatcaggactacgttgcaattgccaacgcattcgccaagcagctgcgcgagggggccaaatga

SEQ ID NO: 268372 - DNA, 654 bp, Klebsiella pneumoniae
ttgagtaggactgacgaagaaataaagcaagcaactgcaattttcgcggtttacaaagcggagattgataagcgtgagctatcaaataccgacaattatgacaaaaatattctcactttgtcttcagccgggctagctatatcgctgaccttactaaaagatattgtcagtaaggaaggacctacacttgtggcttttctttacctgtcgtggactttttttgggcttgctatcctatcaactattgctagttttctcattagtaacaaggcattaaccaaacagttatctatagctgaacgatattacattgatggagatcaaaatgcgttcagtgaaaaaaacagatggggaaatttcacttctctgttgaactggctttcaggtagtttcttcatattggctatcatttcggtgattgtattcggtttaagtaatttttctaagaggtcgcaagtggacactgaaaattccaaaaaatgcgtggtaagcaaccttaatgaagggcaagtagtaccgagaatgcaacaacttcctattgataagggggctgtaattcctgctatgccaaaagttccagcacccaatccttctccggttaatcccgtagttttaccaaactccccagcagcccccacgacgacgaagccgtga

SEQ ID NO: 268373 - DNA, 576 bp, Klebsiella pneumoniae
atggatagcgtcatgtatgaggagcgttttgaacgctggctgaaagtttccattggtttggcacgatttgatccttttttaccgagccttgtgcaaagtctggggaaaatggatgcaactctttgtgagacggatgtttctttagtagaaaagtataggcagggaggaaatgcaaacgaagactacgagatgatacaagggcatcttactcactcatatttatggattttgggctcttatgaagtaattcgcactcttacgcagagcattaaggaaaacaaaagtgatgaccctgcggaagtgttagagcgttttcaaaatgcaaagaaacgttttgcacgcttaaggatacccttagctaaatttgaagcagctaaagcacacaataagactgactttaagattgcatatccaggatttgcctatcagattggcatagcatggcaagttagtgatgacgttgtgatttcccgacaagaactttcagatttgtttttagagacgctagagtttactcgtgtcctaaagcttagaaggtctcttgccaatcatgacccctctcttcatcttgattga

SEQ ID NO: 268374 - DNA, 1215 bp, Klebsiella pneumoniae
atgagtaagctgagttatctcgacaaattgctagatggagttgttgttgagtggaagcctctggaagaagtcgcgaaatatatacgtggtttaacttacagcaaatcgaacgaaagcacagatggtcaaggttacagggttcttcgtgctaacaatgttactttgtctagcaattgtttaaatttaaatgatgtcaaagtggtgagatttgacaccaaagtaaaggattcgcaaaaactatataagaacgacatactgataagcgcagcaagtggtagccgtgaacatgtcggtaaagttgcttacattaaatcagatattgactactactttggcggatttatgggtgttgtcagatgcaatgaaaaattaaatccgcgttatttatttcacgttttaacaagtgatatttttcaaaaatatctcgatgaaatgttgaatagctcaaccatcaataacttgaactcagcagtaatgggaggattcaaaatccctataccttgcccgaataaatcggacaagtcacttactatccagtctgaaatcgtccgcgctttggataaatttacagcacttacctctgaacttactgctgaacttgccatgcgtaaaaaacagtacaactactaccgcgaccagttgctgagatttaaagagagtgaggttgagtggaagacgctgggtgaggttatacaaatgcgtgctggacagcatatttcgaccagtaaaataatggaaagaagagaagatggttatgtatatccttgttttggaggaaatggtattcgcggttacgtgaaacaaaaaagccatgatggagaacatctgttaatagggcggcaaggggcgctatgcggtaatgtcaaaagaatgaaaggccagttttatgctactgaacatgcagttgtagtttctgccctgtccgggattaatattgactgggcgtttcacatgttaacagcaatgaatctaaatcaatattcttcgaaatcagctcagcctggacttgccgtagggaaattacagaaattgacattacctgtgccttcaataaagagacaggaatacattgcctcaatactggataaatttgacatgttgacagactcctccactgaaggtcttccccgcgaaatcgagctacgccagaaacagtacgaatactatcgtgatttactgtttagcttcccgaaaccagaagccaccagcaactga

SEQ ID NO: 268375 - DNA, 222 bp, Klebsiella pneumoniae
atggccatcgtccaggtcatggacttatttgacgaaccaatgaaaatcctgatgcttgctcgtcactttggccgggcgtatgtggaagagcatgaacgtgccaataaactgcaggcaactctggacatgatgagcgaaccaaaatgcgcgccggcgccagctctctccggagataatatgggcattgaaagcaaagagcgggagatcgccagccttaattaa

SEQ ID NO: 268376 - DNA, 276 bp, Klebsiella pneumoniae
atgattaattttgagcaacacaagcatatagtagaagaatttattgaacagcattacccactggcgcatagcttgatgatggatagctatattgacccggaagcctattattcaaactatcaaatattgctggcggcgatgaataatctcccggagcatccagaatatttcttagaatggttactggaagatgagccaactctttatactaatctgatggaacttatcgtcatcgctagaactatccataacgtgtttgaacaagtaactgcataa

SEQ ID NO: 268377 - DNA, 366 bp, Klebsiella pneumoniae
ttggcgctagcacgaaacacagtattcgaggaaacgattgaaatcggatttaataatcaaacgaaaaaagtaaaaaaatctaaaaaactaaaaccattagaaatcattaaactctacgaaccatccccaccactgacaccagacgaacaagcaataatcgcttccctgcatggtgttgaatggaaacctcgccaacggtataccggatttaaattcaatagagagccgctacagtgggaggcgctggggtttatatctgaacatcactatagccattggctctatttccaacaactgtccaacgaacagtaccaagggtatgatgtcgattttatggatgctgggaacaacagcatcaccgactaa

SEQ ID NO: 268378 - DNA, 1470 bp, Klebsiella pneumoniae
atgaacaaaacggaacaatccccaaaactaaaaatcgttaatgccatctgcggtagtggaaaaagctacaaactcaaacaatatataaaaaccaatcctgataaacgaatcctaatagctgtcccaacacacgaattagcttctcaaacacaatcagacctccagaaactgggcattcctgcgtatcacaatcaggtagacaggggcgagagcgcaacacgatcattaataaacgcgctggatgatgattttgggcgaaacgttgtcattgtcacccatgaatgtctattacatttttgtctatatgcatattgtgatgaaaagacgcaaaagaaattaagccagtttgaactctatattgatgagatcccttctgcatggtatggcgcagagatagattacaaagatgaggaatataaaaaatcaaactttccatttttagagtggatagaggaacagaacggtttatattttattcgtgatgaggacagagaaaaatttcttgcatactacgacgctgaacacgccaacagcaaactgttgaaacaggctctattctccatgctgacaggtcagggaatgctcctggaagaggacaaatattttttctcgtttaccgccaacccaatcctgtatagcgctctgtgggcaaaatcattcaccgtgttaggggctaatgtcggaattagtgagttcgcattcgctgctaaaaccatcctgaatgcagatatctcgctggctgatgatgagttgcaacctgacctgatgcgccgcgttcataccgacacaaaacgaattgaaatgatccctgtgttcaaccagaaatgcactaaaaaacttctgagtgaacactacagcgacattctgaacgggacacgcagagcgctgagagacggattcatctatacgagcaacaacgatgaacagcacagcaacggattctattactcgtcacgggctgacgacgttttagagattggtgagcgtgtctccatggcctcatacggattaaaccactatcagcacctgcataaagcggcgtttctggggtgtgcaaacctggacaggacgactattggacactggcgaaaatattgcgatttgaatggctgggattgggcagaactcgaagagaaacggcaagctgcattgaactatgagaaggtttaccaattcgtttcccgctgttctgttcgtgtcagagggaacagcaatcaacaggtctatatcgttcctgatcttggttgtgctgagtatttaaaacaacactatttccgtgatgcagtgatcaaaccggaaatgataaaaacagagaagaaaaaacgagatacaagcaagggtgataatacgctggaaatcgttaaaaactatctcgaacagggactaaaaccaaaacagattgcacgactgaccggattagaaccacgctatatcagcaacataaaactaaaactcaaaaaagcagcataa

SEQ ID NO: 268379 - DNA, 903 bp, Klebsiella pneumoniae
atggcgcgggtttggtctgaacgtgatcgttttgtcggccgagtactaggccgagctgcaagtattcctgcacaagacagatataccggatatgcgtgttttatcgatgatacagtgctggctattggtgattatgctaccgtccaagcccattccgtcgtcatcgcaacggggtcaggcccttacattccaccggcattacttgttttcggagatcgtctggttgtaaatgacgacgtattcaactgggaagacttgccgcatcgtattgccgtatttggtcctggagtgattgggcttgaagtaggacaggcatttgctcgtttaggagtacaggttcgtgtatttgatgtacaggaagctgtcggtctgttaactgatccgatggttgtcgaacaagttaagtttgaccttggcgaggagttctaccttcatccagatgcaaccattcatgagatgaagcttgatgacaacgaggccgtaattgttttcaccgaactcgatggttctgtcgtgacaggacgattcaactatgtactcgcatgtacagggagaaaatccaatgtggactcactgaatctcgaaaacaccaccttacagcttaataagctgggtattctagttttcgatgctaagaccttacaatgtggtaccgcgcctgtgtttatcgcaggagatgccaacaatattctcctgttgcttcatgaggctgctgatgaagggaaaatggctggccggaacgcagcacactacccagatatcgaagttttaccaaggcgggcaccaattagcatcgtatccgctgaccctcagatcgccatggtagggcagcgttatgtggatcaggaaccaagaaatattgtcacggaagcaatggatttcacagatcaaggacgcagctga

SEQ ID NO: 268380 - DNA, 498 bp, Klebsiella pneumoniae
atgatgaaagtcgaaacagcaataaatttagcaaaatacagcaactgggcagaccaagttttatttactgctatgaaatcacttcccgaaggtgctatttatcagaaaagcaatactctcttcaagtctatggttggcacgttaaaccataactatgttgttgaccttatttggagagcacatttgcttggggaaaaacataatttttcaacacgacgagatgttctacatccagtatttaatgatttaattgatgcgcaatctcgggttaatcaatggtatatcgattgggcaggtgaacagaccattgaaacttttagcgaatgtctgaaatttaacttcgtctccggtcaatctggtgagatgacccgaggtgacatgttcctgcatatcattaatcataaaacttatcatcgcggatgggttagtcagatgttttttgaatatgaaataaatcctcctgagacagacttatgtgtgtttttatgtgatcaatga

SEQ ID NO: 268381 - DNA, 735 bp, Klebsiella pneumoniae
atgtgctggatgggtttcactgaacatgtttttgcgctaatgcatctacttgggtttgcatttgcaccaaggatccgggatctccatgacaaacggctattcattcatggaaaggcggaaaaatattctgggcttcagtcaatcatatccacgaccagtctgaatctcaaagaaattgagacacactggaatgaggtactgcgcctggcgacctcgatcaagcagggcacggtaaccgcctcgctgatgttaaaaaagttggccagctaccccaaacaaaacggcctggcaaaagcgttacgggaaattggccgtatcgagcgaacgttgtttatgctggactggtttcgcgatccggccctgcgtcgtcgtgtgcaagccggtttaaataagggtgaagcccgcaatgcgcttgcgcgggccgtttttatgcaccggttgggcgaaataagagacagggggctggaaaatcaaagctatcgcgccagcgggctgacgctgttgactgcggcgatcacgttgtggaacacggtgtatatagaaagggccatcgaatcactaaaacgaaaggggctccagattaatgagccgttggtttctcacctgtcccctctgggctgggagcatatcaacctgagcggagattacatctggcgtaataatcttaagctgggatccggtaaatatcgaccgttacgcacagttgatgtcagtctgtacaaaaaagaggcttag

SEQ ID NO: 268382 - DNA, 399 bp, Klebsiella pneumoniae
atggacgctcaggactatgggaaacaggtcaacttcgcggacggcccggactatgggaaacaggtcaacttcacggacggcccggactatgggaaacaggtcaacttcacggatggccgggagtgtgggaaacaagtcaactccgcggacggcccggactgtgggaaacaggtcaactttgcagacggccaggactgtgggaaacaggtcaactttgcagacgtccgggactgtgggaaacaggtcaactccgcggacggccaggactgtgggaaacaggtcaactacgcggacagccgggattgcgggaaacaggtcaagttaggcaagcactatgggaaatacagcaattttagtatccccccatatgtcagcaacaaactaagggggaggaaataa

SEQ ID NO: 268383 - DNA, 1179 bp, Klebsiella pneumoniae; identical to SEQ ID NO: 101499

SEQ ID NO: 268384 - DNA, 387 bp, Klebsiella pneumoniae
atgaataaaccagcagatctgaaaccccgcaacttatcggctgctgtcagattgcgcctaaatgaaatcgagaactggctggacagagggctaacgcggcatgaaattgctgaaatcctcgacagcgaatacagcttttcggtaacagccaaagggcttgagatggcactgtatagaacgcggcaaaaccgaaaaaatgtattgcacaatacacatgataagagtagcgcgaagggtgcagcggaaagtgtattgcacaatacacaaccgtctgagcctgaagcgcaggaaagtgaaaaagcagagagtcccggcattattgataaagaattcttcaataaaatcggtgagaatttcgaccctaagaagttcaacaaaaaattctga

SEQ ID NO: 268385 - DNA, 168 bp, Klebsiella pneumoniae; identical to SEQ ID NO: 220397

SEQ ID NO: 268386 - DNA, 141 bp, Klebsiella pneumoniae; identical to SEQ ID NO: 102393

SEQ ID NO: 268387 - DNA, 168 bp, Klebsiella pneumoniae; identical to SEQ ID NO: 220397

SEQ ID NO: 268388 - DNA, 924 bp, Klebsiella pneumoniae
atgccattagctatagagcaactcgatgtttcatcacacgatgttattatttcaagcagccatgcagtagccaaaggaatattaactggcccggatcaattacatattagctatgttcactctccaattcgttatgcttgggatctccagcatcaataccttagagagtcgcatttagataagggtgttaaaggcattctcgctaagtatcttctccataaaataagacaatgggattatagaacagcaaatggtgtagatcactttattgcaaactctcaatttattgcaaggcgaattcataaggtttatggaagaacagctgatgtgatctatccccccgttgatgttcatcgctttttgatgaatacatctaaacaggattattatcttactgcttctagattggtgccgtataaaaaaattgatctcatagttgaagcattttctaatatgccagataaaaggttagttgttatcggtaatggttctgagatggctaaaatcaaaagtaaagctaaaagcaatattgaaattttaggttatcaacctgattctgtgatgcttgagcatatgcaaaatgctaaagcttttgtttttgctgctgaagaagactttggtataaccccggtcgaagctcaagcttgtggtacaccagttgttgcatttggaaaaggtggtagtcttgagactgtgcgtccttatggtgtagataaacctactggggtatttttcgatgagcaaagtgttccatctttagtaaaagctattaatttctttgacactgtgtctgataaaatagaacctcaggattgcagggagaatgccatgcgattttctgttgaaatatttaaaaataatttgtcaaaatatgttgaagataaatggaccgagtttaatctttctaaaagaatccagtactga

SEQ ID NO: 268389 - DNA, 222 bp, Klebsiella pneumoniae
atgagaaaacgactgttaaccgcggcgctgacgctggctttactctgcgcgcccgcgctggcgttgaccctgagcgaagcgcgccagcagggacgagtgggggagacgctgaacggctatctcgcgccgctgcgtcaggataaagagacgctggcgctggtaaatacaggcgtggctcgagcagaatgctacgctgcccgtacggcgctgtacggacggtaa

SEQ ID NO: 268390 - DNA, 198 bp, Klebsiella pneumoniae
gtggtacaggccggcgtagtgccaatggataccgccgccatcgcctctgagctgcagcgcacctggaatcgcccggacgccgcagaatgggcggaggtgtacaccaaagtcttcccggcctaccagctgctgatcgaaagctacagcaaagcgcaggacgtcgtgaagaataacgaacagctggattcccagcgctaa

SEQ ID NO: 268391 - DNA, 756 bp, Klebsiella pneumoniae
atgttacctaaattaccatctgagactgttggggaaatctataaagatctatttcaaccagctttgcgtcaatttggggaggctggtgagagtgtagctaagacagtttgtttgctaagtttaccatttgtgtatgctggtggacggtatgaccagctcttagccagagttaaaaaatcgtttgaaaaggttccacaagatgacttaacaaaacctccaataaatgcagtttttcagatagctgaaaaattaatttcaatgccagctgatgatgccatatctaaaatgtatattgagctactatcatcttgcataaataaaaaatgggttagttctgtccatcctgccttcgtaaatctgattagccagttatctggtgatgaagctcgttttatcgattttcttgcccagagagaaaggacaatctatttaagaagagataactcatgggtaacccctacgcaaactgaaatcgataatgttttgattccttggtatggttctatccttgatggtaagcctattaatgaatctgttttttatcctcatatattagatgtgcctgagtatttttatacttacctagaacatttacactccttgggtataattgagtatgtgcatgggcctgaatatctattaaataaagagtttattaacagtattaagggatacggtcattggtacatttcgttatccaagtttggtcgtctgttctataatgtttgcataaagaattcaggcgcgaatgattag

SEQ ID NO: 268392 - DNA, 261 bp, Klebsiella pneumoniae
atgtctttagagcaacgtatagaaaactttgaagctcgcattcagaagcttgaaggtgttacaactcacttacacataagatctgaattaacgatgtacattatttctgcaatgattggtgcaggccttgttaaacgtgaaggggtaaaagaactgatagaaagtgctgatttgaccccgtttaatgctccagcaattgctacggcagaaaagaaaatcatgcttcagctgatagataaagtcgatgtaaaggtacagtag

SEQ ID NO: 268393 - DNA, 531 bp, Klebsiella pneumoniae
atgaaatctgcattaatcagcccgctgctggcgggtctgctgctgttaaccggctgcgcacagcctgccgcacaggccggaggcggcggtggcggaacaataaaagccatcaaccacacaaaatgggcgatcaaccacttcagtatcaacggtcagtcgggcatcgacattataggtccgtttcagggtggcggtggcggctgctgcttcagcgtgcccgcccgctggacgccgggtatgacggtgcgcgttgactgggaaagtggtgaggcatcgactgaaggttttcctggatttgctgattcaaaaaaatacagagagtggagagataatttaaaacaaaacaaccgtcagcacagtaaaaccgtcccgctacccgactataacggccaggatgtgtgcggcattacggtacactttttaccctgcgatgacgtgaaggtgaccaccagctgctggtcaccgagaaatgcgaactatccgataaaagagcccgtcaggatgaaggagcccgccgtatgtccgaaataa

SEQ ID NO: 268394 - DNA, 396 bp, Klebsiella pneumoniae
ttggcaaagatacaagcatatgtaagcgacgacgtggtaaataaaataaattctatcgtcgaacagcgccgggcagaaggtgccaggaaagaagatgtcagcagttcaagcgttatatcgatgctcgtcgaactaggcttgcgtgtctatgaggcgcaaatggagcgcaaggagtcgccgtttaaccagatgcttttcaataaaactattcttgaagccgtacttaaaacacagtttatctccagtaagcttctcgcaatggagtccatgagcccgcacattgcaggaaatgataaatttgagttccgggggatggttcagaatatacgagatgatgttaaagagatcgtggaaaccttctttccagagtcaggtgaagaaaccgataatgattaa

SEQ ID NO: 268395 - DNA, 705 bp, Klebsiella pneumoniae
atgagtgcgcgcgatcttatgcgttcttctgattccagtcaatcacaacaagaagcagcaagatttaaaatttttgataattctgaagttcccatctgtatcagaaattcttctggtgtctttgtatattcaaatcacaatttttcgaatgttataaaaggctgtgaatatgactccgcctactggtttgaaaaacttcctcttgagttgaaatgtgcacttctggaaaaagaggtcgatgcattagctaatcctgatatggcaataataaagagctttgttattgaagattatttctactggtgtgttctgtttcaggtggtttgtattgattctgaatcgtatatattgtggcattttataaaggatgctgtttttagtcaggccaatagcagggatcttaatcatattgtgaatgatgttttcgagataaagaaccctgctttagtccttgagcctggtgtttaccaaagcttttgtcttttcttcagcggttttacacatgattttatttctcgattactaagcgtaacatctggtgcttcaaagaaaagaatttccaaagcatattctattatggaaatagacaataaagatgacatgattctatatctcaaggctcactcgttcttaccaagtattcacagatatgcattcgagttaatcaattctaagtgcaatctacttcgtaaggcgaaattatga

SEQ ID NO: 268396 - DNA, 183 bp, Klebsiella pneumoniae
atgagtaaagcaatcactgagcagggcaattttatggtcccgggcagcacgggaagcggtaagacggctttctgcgctcagatggtacaggcgcttctgtcaggacagcgttctgacggcgggcgcaaaggcattgagaaaaatgacaacgattcaggagagcgccatgacaaccagggataa

SEQ ID NO: 268397 - DNA, 564 bp, Klebsiella pneumoniae
atgatgcttaagcttttgtccgttctgctgtattgccttcgatggcttgcctgggcttttcactatctggttatctggcctgccgccacgctgatgctgctggttgccatgcttttgtggatggagaacaccacgcccggagaggcgatggcgcaggagattatgtccgtcacgcacagcgtcagcaatggcgagttccgtattgccgcctgccttgatgaacctttacaacccgttataccggctaccccgccggacaagcctgtgcagatttttgcaggtggcccttctgccgtttgccaggacagaggcagcgacatcaccgatgctaaaggatatgcagctcatgttgacggggcgctgagtccgcttaagttgttgtggattgtgatggctattgtgttttcaggggcggcgctgcttatgggatgtcgtccgtatttctgcctgtacggtcagatgcgctcagcgcgttttcgctacggtatccccgccagccgcccggcccctgcgacggaagcggtaaaaacggccgaaaataaaaaggagggggatcatgagtaa

SEQ ID NO: 268398 - DNA, 1881 bp, Klebsiella pneumoniae
atgaaaagagcaatactgatgccggtgttggccattgccaccacgatggcgggcgtaaatgcatttgccgatgctgacgcgcagtacagagcgggggctgattttgcccgtcaggtacaggggcagggggagagcagcctgaaaaactttaacccctcagcgtctatccccaactataccgcctcgcccggtgagaagaagtactatggcggcgtgacggcgaccggtgatggtgcgctgaaagcggacggtaccacgggctggacgactaatgaggccacaaaggccgtcatcgactcgtttgttaacaacccgaaggagcccatttcacccgacgcgccgtttattaaggccagccaggatgtccagtcccgcgccgataccatcatcggcaaaacggggcagatgcagtgcgaagcgcagaacatcagccgcagcgagttcaccaactatacctgtgagcgcgacctgctggttgagcaggcctgtacgcgcacggccagcattaccggccactacgaaaacaccacggtgacgcgcactaacacggtgcccaacagcgactttacctacacctacgacggcaacaagacggtgaacttccgcttccgtgcccccgcaaccggtaccgtgctgagcgcctcggtcggcgtccacttcaatgacagaaatatgctctacgacttctcgtggtgggggttaaacgtcagttcggtgaaaggccgcgataacggatgggcgttgccctctgcgggaggggcttcgctgaccgccggacagtactctccacagggggcaatgctcaacaagaattgcctgagcggcaggcagtcgcgctgccaggagtatgcccgtaaaacgctgtcctggatgcagggcggctcagaggcctggatgacagccaccctgaccatgcaggtgacggacaaaaaatgggtgccggacgtggtctggaacgaatcctgcccgttcagcaagagcgagggtacgctcaaaaagaccgaatgtattgagccggggagcacaaaaacggtggtggttgacggggtgtcatacccggtcacgcaggcttgctggaagtacaaagacacgtatatgacccaggctgctgacaatggcacctgcaaaacctacatgaacaatccggcctgtacgcttgcctcacgcacctgcgccttcacggcagaagacggcagcggctgcctgcatgaatacgcgacgtactcctgtgaaacgcgtacttccggtcaggtgatgatatgcggcggcgacaccttctgtcttgatggtgactgtgagcgggcgcagaacggtaaaaacaacgattttgcacctgtcgtttcggcactcgccgcgctggccgctgcgggcaaggacgtggccgccattaacagcgttaacgtgcgcgcctttaccggcagcgcgaagttctgcaagaagtttgcggcaggattcagcaactgctgtaaagacggcggctggggccaggacgtcgggcttgccaggtgcagcagtgaggagaaagcgctgggcaaggccaaagagaataagctcacggtcagtatcggtgagttctgttcaaaaaaagtgctcggcgtctgtctcgagaaaaagcgcagctactgtcagtttgactctaagctggctcagatagtgcagcagcagggacgtaacggtcagcttcacatcggctttggcaaggccagcagcccggactgtcgcggcatcacccagaccgagctgcagcaaattaattttgaagcactcgacttctcgaactttttcgacgatctgcaaaagaacaagaaaatcccggataacgacaccctgacgaagcgcgtccgcgaggaaatcgccgcgcagctgaagaacaaacagtaa

SEQ ID NO: 268399 - DNA, 429 bp, Klebsiella pneumoniae
atggctgatcagaacaatgcagaggaacacgacatgatgacttccggaatgcttcagagagctacgacgccagagttaatcgcgctcagggcacggaaagaggacgcacggttcggcgtttatgctgagtgggcgggcattttgctcattgccggcgtgctgtcgcgcgtctttatgacatacgttttcaatgcctgcgtcggcgactggctcagggacggtcacctgcagctgaaagatttgtggaacgtgttgatgtacgccattccactgatatttatcgcgctgagcggcgggcttgccgttgcaggtggcgtttatgcaatccttaactcgctttatacgaaagggcaaatgttcatactaaaacgaaaaatgggaaaactcgccctgcaggcgagccgggagggtgccgatgttcgtccgtaa

SEQ ID NO: 268400 - DNA, 2862 bp, Klebsiella pneumoniae; identical to SEQ ID NO: 141060

SEQ ID NO: 268401 - DNA, 210 bp, Klebsiella pneumoniae
atgattgttaccgcgattaccatcgatatggtcaaccaaatagccatcaggaatttcaccatggaatatttgaaatataaccctatggacttgatagcgaatgccatgaagcattacttgataatgccctgtattgttttttgtccctgccaccatgccagcctttgccttactgctacgcccgattttattcttcaggtagcttggtga

SEQ ID NO: 268402 - DNA, 714 bp, Klebsiella pneumoniae
atgaggcccttttttaaaggatatacgattaaacagtgggggatgcaaccctcggaactgcccgcatctattcttaaacgtcttcctgttcgttttaactatgatgataattattttaaccacaaatttcagggcatgccgaaatgtggttatacgcagatgattaagtcaattctcaatcatgagaatatcaaggttgacttacagcgggaatttatcgttgacgagcgaactcattacgatcacgtattctatagcggtccattagatgcgttttatggctaccaatatggccgtctgggctatcgaacattagattttaaaaagtttatctatcagggtgattaccagggatgcgcagtgatgaactactgttctgtggatgtgccctatactcgcatcactgaacataaatatttttctccctgggaacaacacgacggctctgtttgttataaagagtatagccgtgcttgtgaagaaaatgatattccttactatcctattcgccagatgggagaaatggctcttcttgaaaaatatctgtcattggccgagaatgaaaccaacatcacttttgtcggtcgtcttggaacctaccgttaccttgatatggatgtgaccatcgccgaagcattgaaaacggcagaagtctatttaaattcactcactgaaaatcagccaatgcctgtgtttacggtttctgtacgatga

SEQ ID NO: 268403 - DNA, 720 bp, Klebsiella pneumoniae
atgtggaatcctttccggagaaaacagggaaatgaaaaagccctgcagcagcctgccagtcgcggaggctggaacccgttatacagctctatacatgagccgtttgctggggcatggcagcgtaaccttgagatcagtcaggataccgttctttcttattatgctgtctttgcctgcatatcgctgattgcgagtgatattgccaaaatgccgccacggctgatgcggcgcgactcaaagggagtcatgcaggaggtaaaatcaggggacattccggctttgtacaaaaggccgaatgcctttcagaacaggatccagttcttcgagaactggctgaactccaaactgtgtcacggaaatacggtggcgttaaaaatccgcaataacgccggaaaaattactgaactcaggctgcttgactggcgcaaggttacgccgctggtggcggatgatggctctgtcttctatcagataaaccctgataacatgaccggtattgaatcgtcagttactgtcccggcacgggaggtgattcacgatcgcttcaactgcctctttcatcctcttatcggtttgtctcccatttacgcagctgggttggcagcaatgcagggccaccacattcaggaaaactccgcctttttttccgtaacggaggaaagcctagcggcgttattgaggtgcctggttccctcactgaagaaaacgccagaacaataa

SEQ ID NO: 268404 - DNA, 612 bp, Klebsiella pneumoniae; identical to SEQ ID NO: 151086

SEQ ID NO: 268405 - DNA, 171 bp, Klebsiella pneumoniae; identical to SEQ ID NO: 151087

SEQ ID NO: 268406 - DNA, 453 bp, Klebsiella pneumoniae
gtggcgcagggcggctggatactggccgggctgcgcccggacctgggcaatattctgtttgcctttgcggtcagcggacaggcactggcgatgatgcagcggcacgggccgcgcacgtggccgctctccctgatgctggttctggcctggctgccgttttcggcgggaagctacgggctggcgggggtagtgatgctgatgctggcctgcggcgtatgtatgacgggccggcgcaccacgcgcacggggctggcgctgtgtctggcactggcgatactcgcgctgaatgccgcggacagccccgcctttgccatcgcgggtctggtaatacccggcgttaccctgacggtgctgagccggacctgttgccgcgtgccgaggttctggccgcgcgaatttttcccgctgttctacgcggtgcaccttgccgtcatcggactgatggtgatgtga

SEQ ID NO: 268407 - DNA, 1203 bp, Klebsiella pneumoniae
atgaatcaggcatttatctgtgatgcggtgcgtacaccctttggccgtttcggcggtgccctggcgacgatgcgcgctgacgacctggcggcgctgccgctgaaagcgctgctggcgcggaacccgggactggatccctcgcgcattgacgatgtgatctttggctgcgccaaccaggccggggaagataaccgcaacgtggcgcggatggcgctgctgctggccggcctgccggagagcgtgcccgggagcaccatcaaccgcctgtgcggttccagccttgacgcgattggcgtcgcggcgcgggcgattaaaagcggggagacgcagctgatgatcgccggcggggtggagagcatgtcccgcgcgccgtttgtgatggggaaagcggagagcgcctttagccgcagcatgcagatggaggataccaccatcggctggcgctttattaacccgcagatgaaagccctgtacggcgtgcattccatgccggagacggcggaaaacgtcgccgatgagtttgccatctcccgtgccgatcaggacgcgttcgccttacgcagtcagttgcgtaccgccgcggcgcaagaggcggggcgtttcgccgatgagctgatcgccgtccaggtgccgcagcgcaaaggcgagccgctgctgtttagccgcgatgagcacccgcgcagcacctcgctggaggcgctggctaagctgcgcggcgtggtgcgcgccgagggcagcgttaccgccggtaacgcctccggggttaacgacggcgcctgcgcgctgctgctggccagcgagacggcgctgtcggctaacgatcttcagccgctcgcccgggtggtcggcgtggcgacggcgggcgttgcgccgcggattatgggctttggcccggcgccggcggtgcgcaaggtgctggcgcagaccggcctgacattaggccagatggatgtcattgagctgaatgaagccttcgccgcgcaggcgctggcggtgacccgcgatttgggcttaccggacgatgccgcccacgtgaaccctaacggcggggcaattgcgctgggccacccgctcggtgcctccggcggccggctggcgatgaccgcggcttatcagctgaaacggaccggcggccgctacgccctgtgcaccatgtgcatcggcgtcggacaggggatcgccctgattattgaacgtgtttaa

SEQ ID NO: 268408 - DNA, 390 bp, Klebsiella pneumoniae; identical to SEQ ID NO: 211603

SEQ ID NO: 268409 - DNA, 255 bp, Klebsiella pneumoniae
atgtcagtacgaaaactcgacacaggaaaatggatttgcgaatgctaccccggcgggcgccgtgtgcgtaagcagttcgccaccaaaggcgaagcattagcctttgagcgtcacacgatggatgaggcagaagctaagccatggctgggtgaatcggtagaccgtcggactttgaaagacgtgattgaattttggttcaaactgcacggcaaatctcttaccgctggtgagcatgtttcgacaagctggtcctga

SEQ ID NO: 268410 - DNA, 201 bp, Klebsiella pneumoniae
atggctgttaacgctgaaagcatgaataactacggaatgacagccgacattctggagcaggcagccaaagaggttggcggagtgtacaccagccggatgaacgtggagtatgctggcaaaagcagcaatactgctcagacccaggctacaggacttagcccgcaagaagccgccgatggctacaaaaagatgatggattga

SEQ ID NO: 268411 - DNA, 465 bp, Klebsiella pneumoniae
atgaacccgataattacggcacatcaggaaatcgttatcgaaaactcggttcgctatatcgagttactgaaatcagaagcgacaaaaattctggatgaatactgggagacctggaaggcacgaaaccaactgatatcccagaccacgtatgcaaacggggggaaattcatgcccggtcgattcgcaccggtgtttaaaaaggtcggctcatcgcaaaagttgacaattgtatggaaagatttttcgcccaggttcaaaaacaaaattgaacatcatggcgtggttgttaaacctaaactcggaggatacagcgttagttgttttaaaaatgccctggactgggaactggagatgatcctggaaacagaaaacaaaattaaaccgatccgtgaactactcgcggaataccatcaacgaaaactggccgacatcaaaagactggaaaaactgaagaggttaatataa

SEQ ID NO: 268412 - DNA, 1005 bp, Klebsiella pneumoniae; identical to SEQ ID NO: 31749

SEQ ID NO: 268413 - DNA, 180 bp, Klebsiella pneumoniae; identical to SEQ ID NO: 104100

SEQ ID NO: 268414 - DNA, 282 bp, Klebsiella pneumoniae
atgatttataaagatataactattctttacatcgatagtggtaaaaacaatcgactcatccgttatgatttactgcgaaaagaaaataatgactttgttgttcaagtgtttgatgaccagaatgaagacattgctgatcctaaaccaacaataaaaattgatcagtttgagatcacttatgataattaccttgataattgcaagcattccaataagttaccggcctcatttgaagaatatgtcgacataaaattacaggaccaccgggataagcttgattaa

SEQ ID NO: 268415 - DNA, 147 bp, Klebsiella pneumoniae
atgagtattatatccaggatttttttaaaaattagggtcgccctcttcggagggcctgaccacgatattgttttttatacagatgatgagtacgatatcccgcacacgcttaacaaggatgtgcaaagctatggaaggtgcgaataa

SEQ ID NO: 268416 - DNA, 282 bp, Klebsiella pneumoniae
atggctgagttacgcgcaggtgggttggcgataattattcgctccagattccctgaaaacgtggggaaggtcgttaagttggtgacttgtgttggaaaaataaattacgaccttaatcctggaatttattgggaggtggaagctctgtctgagctttcagggacgctttggcgcgccaaacctggattgaatggcttggcgctggctaaaaacctgatgcccatcgacggcgacgacttcagcaatgaagaccaacaccagaaggagcgggagcatgcctaa

SEQ ID NO: 268417 - DNA, 348 bp, Klebsiella pneumoniae
atgtcgtctacggctctctggtcatacaacaaaccatgtactttttggaagaatcttggatttgatgaatatggtgacccattggggtatgaacctccaattatcatcatgtgtgattacattggcggaatgtccgcaaaacttggccagattggtaaagaggtggttgtaaaaaatactttttttacagctttcgcacttgctgaagagggtgattacattcttattggaaccagtgccgaacttgatccattaaacactaaggcagatgaaatacgagcttctacgcgttggaatgacacactcgatggtcttgaagatgactgggctataattacgggagtctga

SEQ ID NO: 268418 - DNA, 162 bp, Klebsiella pneumoniae
atgaaaaaagctgtaagcaccccaccgacagggattagatttgatagtaacatcaaggagttgctaaaaattgcagcaaaaagagaggggcgatcagttaatagtgaggtgattaaacgaattgaaaggagcttgaaagaagatggctacatcaaggcatga

SEQ ID NO: 268419 - DNA, 774 bp, Klebsiella pneumoniae
atgacttcattaaatttagcagttcatgagacaaatgtcgaaccccaagcattcccagttattgaatgggctggctttcgcgttgtcaccactgaaacgttagcttctggatacgggtgtgaagagaaaagcatccgtatgaatctctctcgtaatttggagcgattcgaagaagggaagcattactttatggtcactggtgaagaacttagaaagttgcgagccactgttggtggctcgcaaatctccagtaaggccagagcggttactctttggacagaaaagggtgcggcccgcatgtcgaagatcgtcgatactgatgaagcgtggtcgttttttgagaggctggaggattcttactttcacccacaggaagccaacggactcccgatgtcatatgaggcggcccttgaagacctgttggtcaaggttaaagagaatcgcatcgttactgaacagcgtgaccgtgcgataaaggaaaagctctggatcgctgataaacgtgaagctactgcgatggctacggcttcagctgaaaagcgcaaagcaaacgcactggcagcgaaactgggcgagtgtaagaagcatgcgactatcaaggcagtgcagcgcgctacaggaaagccttttagccactggcctatgaaaaaatggtgcgccgcaaatggaatggtaccgaaggacgttccagatgaaacgtatggaactgttaagtcttggccggctgaagcttggaaagcggtgaatgatgtagacctgcgcaaactgttttaa

SEQ ID NO: 268420 - DNA, 1533 bp, Klebsiella pneumoniae
atggctctattggataaaattaaaagtctcatatcagcaaatgagactgctactcaaaacatagaagaagaaagcgtttacgacactttaactcctaaaataattactgatagtagtgttaaacactattttgatgcattggattttgctttttcgaaacaggatgtcaaaaacatcgcaatcacagggccttatggtgcggggaaaagcaccgtgattcagtcctatctgaaaacacatctcaatagagaatttataaacgtatcacttgccgatttttcattatcaggaaaaagtgatgaagcaccgttggaaaactcagagattgaattaagtatacttcagcagattttatataaagagaacaaagataaccttcctgattcacgtatcgatcggattcagaataggaataaaaaacacatttcctctctatttctcaccgtactgtcagtagtagcaccattattattactggctataaccatattcccaaaatatttcttctctttatttggtgcaacagaacccacgatcaacgtgatcgttaatatgtttcctgaaaggtttttcgttagtatcatcatgggtttgctctgtttattctttattgtaagagttgcatcaaaggctggtatttttgataaaaaaataaagctcagtaaaatcgcatttcttcaaggtagtgccgatatggcatcacaggaatcatcatccttgctcaataactgcttggacgagatcgtctattttttctcccgttcacaatataaaattgttgttttcgaagacttagacagactaggtaacgctgaagtatttgttaagttacgagaaataaaccagatagttaataacaaccttcaaagtgaacctgttagatttatttatgcttgccgtgatgatattttccttggagcagatattagaacaaagttttttgatttcattttaccagtaataccggtaatggatgccaggaatgcctacactcatttaaaaaataaactatatgatttcccagaaaatgaacaaccacttcttaagcagatgtcactatatataagtgatatgcgttccctacaaaatattgtcaatgagtttaatttatttaaaaaggttgttgatgataatactaaccaagcgaagatatttgcactcattttttataaaaatatatatgcccaagattataatttaacagataaaaaatcaggtgtgctttattcattcatacataattatcgcctacgtaaactacatgaaaaccatttcaaacttctcgaccaacgattagaagaacttaataataaacttgtaaaaattagaaaagaatctgttagcactgatgcagaattacgtaaacagattattagtagatttatttccccagaattatggcctatagtttattttataaaagatacagggaattatcatcagcgttatatatatagttctcagcagaaagcttttataatagtgaacatgaatttatcaactactttgaacaaaactcgtcactttatatag

SEQ ID NO: 268421 - DNA, 222 bp, Klebsiella pneumoniae
atgcgtttcttcctgtggagtaaacttcagctcaatcaacgcgatcgctttttgcaccgcgcgaagggtcaccggatcggcagaggccggatggctggcgaagtcgatagctttcagctgagtggtcattttttcacgcacttccaccggcgcaatgacgtcaatgacatcgaggatctgtttgataaccagctggcaggcaaccacatcggaaaccggtaa

SEQ ID NO: 268422 - DNA, 291 bp, Klebsiella pneumoniae
atgaacctaaatgatttaatgagcgtgattggagtaaaaacccacgaattcgaactagcaccaaatgtagttgtgaaaattcgtatgccgtcactagctcaatattcccaatgtactacaccattcaaaattatctatcattgtgtagttgatgacgaaggtaaaccactattcgaatcaccagaacagattgaagaaaacgtagaattatcagtacagatgaaactaagtcaagagattgatcgtatcttcactgaatcaatgaatattgataatgttgaaaaaaagtaa

SEQ ID NO: 268423 - DNA, 456 bp, Klebsiella pneumoniae
atggcagatataaaagaaaggttacgactatatgaaggtacagcagattatcaaagagcattaggatattaccgacaaggtaaattctatatgtataaagatacggaaggttactggactatcggctacggtcataaagtactaccaaatgaaatgcaaaagtacaaagatggtattaatgctatggatgcagatctactattagcatgggatattgaccgtactaaaaaggatttagcaacactaggattagtactaccaaaggattgggaagatttcatgatcatcatgactttccaacttggtctaggtggagtgaagaaattccgtaaaatgattgcagcactcaaagtacagaattggaaagaagcgatagtacaggctaaagatagtctatggtatcgtcaaacaccgaaccgacttaatgcaatgatacaagaactaaaaaacaagtaa

SEQ ID NO: 268424 - DNA, 429 bp, Klebsiella pneumoniae
atggaatggaatagttataacgaaaacgaatggaaagtagatgatatcaattcaggacagtacgccgcatttgtttacttaatcacttttgataacggtgatttttatattggcgtaaaacaggtttacaaaggtatcaaagacattaagaaactaaaggacagtactaaagaatccaactggcgagaatataccagtagtagtaaatcagttaatcagatgattgatgatggagtagagtataagaagtatctactttggtgtttccctactactaatcaagcagccttagtagaagcaacattgattgggctatttggttcaaaaagtaattgtgtgaataaagcagtaatggttaaggcaagaataccaaatgataacggtgcaacgttccgtatcattcaacagttaatagaggaattaaactaa

SEQ ID NO: 268425 - DNA, 288 bp, Klebsiella pneumoniae
gtgggtgaccacgtcatacatcgtctccagtgggatcccggcgcgggcggcaagcgccatcgcttcggcggcaacggcgatgtgcaccccggccagcagctgatggataatttttaccgtcgagccaagaccaatgtcgctcccgatgcggtagactttgccggccacggcgtccagcaccggcgcgaggcgggcaaaggcggcatcgctcccggaggccatcaccgtcatgtcgccggcggccgctttcacggcgccgcccgataccggcgcgtcgagcatcaatag

SEQ ID NO: 268426 - DNA, 3108 bp, Klebsiella pneumoniae
atgcaaattagcgataccggccgcagccacactcctgactttcacgccgtcctcgcccgtgaagactggcagaaccagagcattacccaccttaaccgcctgccagcgcatcccgttttcgccagctggcgcgatgagcttgccgcccgcgataacctaccttcatcccgccgccgtcaactggacggcgagtggcagttctcttacgcccgcagcccgtttgccgtcgatgcacagtggttgacgcaggatcttccggactgccgcggcacgcctgttccttccaactggcagatggagggctatgacgcgccgatctacaccaacgtccgctatcccatcgacaccaccccaccgcgggtgccggaggataacccgaccggctgctactccctgcactttacggttgaggacacatggcgcgagaacgggcaaacgcagattattttcgatggcgtcaactcggcgtttcatctgtggtgcaatggcgtgtgggtcggctattcgcaggacagtcgcctgccggcggcgttcgatctcagccccttcctgcgtccgggcgacaaccgcctgtgcgtgatggtcatgcgctggagcgccggcagctggctggaagaccaggatatgtggcggatgagcggcattttccgctcggtatggctgctgaataagccgcagcaacggctatgcgacgtgcagttgacgccagcccttgacgccctctatcgcgacggcactctgcaggtccaggcgaccgtcgaagcgactgaggcggcgcttgccgggctcagcgtcggggttagcctgtggcgcggcgaggagcagatcgccgccgggcggcagccgttaggtaccccgacggtggatgagcgcggccactacgcggaacgggtcgatttctccctggcggtggcgacgccggcgcactggagcgcggaaaccccgaactgttatcgcgccgtggtcaccctgtggcgcggcgacgaactgctggaggccgaagcgtgggacatcggttttcgccgcatcgagattgccgatggcctgctgcgtctcaacggtaaaccgctgctgatccgcggcgttaaccgccatgagcatcatcatttgcgcgggcaggtggtcaccgaggcggatatggtgcaggacattctgttaatgaagcagaacaactttaacgccgtgcgctgctcgcactatcccaacgcgccgcgctggtatgaactctgcaaccgctacggtctgtacgtggtcgatgaagccaatattgaaacccacgggatggtgccgatgaatcggctgtccgacgatccggcgtggctgccagccttcagcgcccgcgtcacccggatggtacagagcaaccgcaaccatccgtgcattatcatctggtcgctgggcaacgagtccggcggcggcggcaaccacgaagcgctgtaccactggctgaaacgcaacgatccgagccgtccggtgcagtacgagggcggcggcgcggataccaccgccaccgatattatctgtccgatgtacgcccgcgtcgaacgcgaccagccgatcccggcggtccccaaatgggggatcaaaaaatggatcagcctgcccggtgagcagaggccgctgatcctttgcgagtacgcccacgcgatgggcaacagcctcggcaacttcgccgattactggcaggcctttcgcgagtatccgcggctgcagggcgggtttatctgggactgggccgaccaggcgatccgcaaaacctttgccgacggcagcgtcggctgggcctatggcggcgactttggtgataagcctaacgatcgccagttctgtatgaacggtctggtgtttcccgatcgcacgccgcatccgtcgctggtggaggcaaagcacgcccagcagtattttcagttcacgctgctgtcgacctcgccgctgcgggtgcgcatcatcagcgaatacctgttccgcccaaccgataacgaagtgctgcgctggcaggtgcaggcggccggtgaacccctgtatcacggcgacctgaccctggcgctgccccctgagggcagcgacgagataacgctgctcgatagcctgatcctgcctgaaggcgcccgcgcggtgtggctgacgctggaggtgacccagccccaggcgaccgcctggtcagaagcggagcaccgcgtcgcctggcaacagtttcccctgcccgccccgctggcgctgccggcgcccaccgtgtctgccggcgctccggatcttatcgtcagcgacgaggtctggcagatccgcgccggttcgcaatgctggaccatcgatcgccggacgggtctgctgagccgctggtcggttggcggtcaggagcagctgttgacccccctgcgtgaccagtttattcgcgcgccgctcgacaacgacatcggggtcagcgaagtagagcgtatcgaccccaacgcctgggtggagcgctggagaagcgccggcctgtacgatcttgaggcgcactgcgtccagtgcgatgcgcagcgcctggcaaatgaaaccctcgtcgactgccgctggcactacctgcgcggcgaagaggtagtgattgtcagccactggcgcatgcacttcactgctgacggaaccctgcggttggcggtggacggcgaacgggcggaaaccctgccgccgctgccgcgggtcgggctgcacttccaggtggcggatcagcaggcgccggtgagctggctgggtctggggccgcatgagaactaccccgaccggcggagcagcgcctgcttcgcccgctgggagcagccgctggcggcgatgaccaccccctatatcttcccgacggaaaacggcctgcgctgtgatacccaggcgctggactgggggcgctggcacatcagcggtcatttccacttctccgttcagccatggagcacccgtcagctgatggagaccgaccactggcacaagatgcaggccgaagacggcgtgtggatcaccctcgacggcctgcatatgggggtgggaggcgatgactcctggacccccagcgtgctgccgcagtggctcctgagccaaacgcgctggcagtacgaggtctcattgcgttgcctttaa

SEQ ID NO: 268427 - DNA, 1065 bp, Klebsiella pneumoniae
atgccgcgtcgtaccgcaaccctggaggatgtcgcccgcgccgcgggcgtgtcccagcagacggtctcccgggtgctgaaccgtcctgaggtggtgtcagcccgcacccgcgagcaggtgatccgcgcgatgcaggcgctgcactatgtgcctaaccgctcggcgcagctgcttgccggcaaagcggcgccctccatcgggctgattaccgcctcgctgacgctgcacgccccctcgcagatcgccgccgcgataaagagccatgccagcctgcatcagctggaagtggcgatagcgatgccggcgcaggctgattttgtcgcgctgcaggcccggctggacgagctgcgcgctcagcatattcgcggggtgatcgtcagtctgccgctggagagcgccactgccgagcggctggtgcaagacaatccggatatggcctgcctgtttctcgatgtctccccggaggccgatgtctgctgcgtgcgcttcgaccatcgcgacggctgcggggcctgcgtgcgccacctgtgggagctggggcatcgcgaatttggtctgctggcgggaccggaaagttcggtttccgcccgtctgcgtctcgccagctggcgcgaggcgttgcacagtctgaatattgcccgctctactacggtgtttggcgactggagcgccgccagcggctggcagaaaactttcgagctcctccacctgcagccgcggatcagcgccatagtggtggcaaacgatcagatggcgctcggcgtgctcagcgcgctggcccagctcaatcgcagcggcagccaggcggtatcggtgaccggctacgatgacaccgccgacagcctttacttccagccgccgctcaccacggtggcgcaggacttcgatctgttgggcaaaagggcggtggagcggttgattgccctgatggcggccccgcagctgcggatccgcgagctgctgccgacccggctcatcgtgcgccaatcggcctggcctgtcgccgccgcggaggaccggcagcagaccctggcgcagctgaaagcgctggtggagaagctttag

SEQ ID NO: 268428 - DNA, 441 bp, Klebsiella pneumoniae
atgatggtgatagagggtaaagaggcgatcgcgcgggtggactggcagcgagtgcgaacgatcatcgccgaggccgggctgaatgagcgtgatgttcagcaactggagcaggcgttccgccagagcaccttctgctggtttggctatgagaacggtcagctgattgccgtggcgcgagccatcagcgactgcacctggagcagctatctggcggatgtggcgatcgtccccgctcgtcagggacagggctacgggcaacagctgatgctggccatccgggagcaactcctgccctttggcaaaatatttatctatgcggtggccgataaaattacgttttatcagcgctttggctttgccatgttgactaccggcatggtctgcgccagcgaggaaggcatgcagaaaatgcaggagcagggctatatccgtcagccctga

SEQ ID NO: 268429 - DNA, 219 bp, Klebsiella pneumoniae; identical to SEQ ID NO: 212214

SEQ ID NO: 268430 - DNA, 990 bp, Klebsiella pneumoniae
gtggagatcttcggcctgccgcgcccggaaatgggcgacaactggtaccagttcgccgtcgccgccgtcgatgaagggccgctgtgcgctaccggcggcatccgcctgatgaccgacggcggtcctgaacttctcgcccaggcggatacgatcgtggtccccggctggcgcggcgtcgacgccccggtccccgaggcgctgtgcgccgcgctggcttccgcccacgcccgcggatgtcggattatttctatctgttccggggtgttcgttctcgccgccgccgggctgctcaatggccgccaggcgacaacccactggcgctacaccgcggcgctgcagtcccgttttccgcagatccaggtggtggaggatgtcctttacgtgggcgatgctttgctgatgacttccgccggcagcgcggcggggatcgacctttgtctacatctggtgcgtgaagatttcggcagcgaagccgccaacgtcgtcgcccgccgcctggtcgtctctccccatcgcgacggcggtcaggcgcagcaggtcctgcgcccggtagcccgcagccgggagagcctgcgcctcggtcagctgtttgactatctgcaccagcatcttgccgccagccataccgtcgcttccctcgcccagcgcgccggcatggggacgcgaacctttttgcgccgctttgaggaggccaccggtaaaacgcccgcccgctggctgctggaggaacgactgctgcgcgcccgccagcacctgacggagagcacgatgggcatcgatcagatcgctgagcgctgcgggtttgccagcgccggcaccctgcgccaccattttcgccagcacttcgcgctcagcccgctgcagtaccgtaaacagtttacgccttctccgattgcaaaatcgtcgcagccacggacaatagacggccacagtaaaccggtcgccaggagggtcgatgatgaagaaagagtgtcgggtagtgatctataa

SEQ ID NO: 268431 - DNA, 492 bp, Klebsiella pneumoniae
atgtcaaacactcgcaagttcgatttaatgagtactgtatatatcggtgaaatcattactttcgatattaagagtattaccgccattgtagaaatcattgatccgttgggaaatagtactacctattcccaaccttttcaggatattgatactactaactggactgatggaatgtatacgggaattgtacgcgatggacaatttcaagtaactacatttgtagtcaaagatccacgagcagcggcaaatcaacttaatgaactaaaacaagctattgatgaaattgaacaagtaatcaaagcaaaactaactaatggtggagtactttcaacttccattaataacaaatcgttagtaaatgaaagtacagaagtattatggcgtatgaaacaagccttactacgtcagtacaataagttgaaagcaaaaatgaataataaaaagagtggtaatccaattaaaagtattactacatttaagaggatacgctaa

SEQ ID NO: 268432 - DNA, 1578 bp, Klebsiella pneumoniae
atggcatggaatttttttggtaaaaaagaagaaccgaagattgaactacctaaacaatccgaacgtatgattgatgggaaagtacctcgtactgcaccgccacttggacaagatttaaaacgttctattagtgcaattaatgttggtgcaattgttaataatgcacagccaaagaactggggatttagtaatggtctatcagttggaaatataaatagcattattaataacttttgggctattcaggccgcaacttctgcaaacctccatttgaaaaacccaatcgcacgtaaatacatctatgcaaatacatcaggtgtggttggttgtgaaggtattacagtacgtccaaatgtacatattggtagtgatgaagaaaactttgaaacctcaaagattttatatgaagagttttataaatgggcagaagatccacgccgttttagtctatgcggtactatggacttctctaaattccaacaacgtatggaagaaacacgtgcaatctttggtgatgcctttgcaatcgttcacattattgatggtactgttaaattagaaatcattgattcaatgcgtatcaatactaaattcaatcgttggttagaatcaggaaactacgtttcaaatggaattgagtatgagttaaatacaggacgtccaattgcatattacgttacccagattaacccaattgattattcatatcatattggtaaatgggatcgtattacagcagatcgaatgattcacctattcacagcaaactatccaaatcaacaacgtggactacctgacttaatgtgtagtgctccagttcttgatgatcttgaccgtttcatgaatgccgctattcagtcacgccaggtagcagccagtgctatggcctttgttactaatacgcagaagactacatatgaaggtataccagatgaagatgatgaagaaggtgaagatgatagtggtattactcgctttgatgatgcctaccttaaaggcggttctattatcgaacttgaagaaggtcaagacgttaaaacggtaacaccatcagcaacatttgatgctctatcagaatttgttgaaaaccaaatgctattagtagctatgggtttagatatgactactcaaactttaaaaggtgatacttccaatgcatcttattctgcaagtaagttagtcgataagattcaacaacaaacctttaagactaagcaaaacaatttaattatttcagtactgaaaccaatttatatcaattggctacgtatggaaatactaaataacagtagtccagttagtaatttcaatccctccgattttaataaactaaccgaagctcaatatacaccagctaaaccacaatcacttgacccattaaaagatcttcaatttgaagaactcgcaatgcaattaaatttgaaaagtagagagcaggtaataacagagatgggctttgaccctcgcgtaatgcaggagcagatcaacaaagagcaaaacaaggataaggaagaaccactaaatggaaattcaaccgacgcaacagatcagggcagtaacacagatccagatcgataa

SEQ ID NO: 268433 - DNA, 438 bp, Klebsiella pneumoniae
atgtacacggcagactatacaataagaaagtacctaacaaacaagttaagtactaaagctaatcttcattttccatcgaaagcgacagtagaaaaaaaagcaatggtatatattgggggaagttcagttaccagaaataaaattccacaaaatatgccagtaatcgcggctcaaatagtaccgcaagaagtgcagaatctatgtcagtttactattgattttgtatcaattgccgaagactttaaaaatgcctcagatgaaattgaaaagattctagaggcaatctttactaatggttttctagatgatttagataaactactaagaatgccaatttatgaagtactagttggtgatagtttaatgactactcaagccgaagcacaaaaaacaatgtatgtacatacgcaatcaattacatttagctacggggagtaa

SEQ ID NO: 268434 - DNA, 1386 bp, Klebsiella pneumoniae
atggatcaagaagaaaataaattaactgatgaaacacgtgatttaccacaagtagatgaagttaatgaacccactctaagcccagatgcagaaccagcagaagatagtaaaacaactaccttccaacgtgatgaaaatggaaaagagtttgtagagattgaaggtgctcgtttttatcgtgcggatatcgtagatgaaaaagattcccctgaagatatcgatgatcaggaagtaaatgatcaagaaaataccccagtgattgatagtgaaaaacgttcactagaagttgaagcagaagataaacgtgttcgtgatattcaaggtatcgcaactcttttcaatgtggacgcaactcaagcactaaataacaagactagtgtagaagaatttaaaaactccattcgctcactaaatactgaaaataaacttaacgttaaggaaaatccaaaaatggaaaaaaatgttattcatgatatggttcaatctgtaattgacgacaccgaactaaaaactactgcaactcgtggtactcgtggttataacgtagctactcgtgctattgacccttcaactaacactacttctggtgctggtctagtacaagaagtatatgaagattcatatatccctgaactactaaaacgtagtgttctaggtgatctaatgccaactctatacactggcctagcaggtcgcggtactctatctattcctaaagcagatggcgtagcaccagcattcaaagtatatgccgaaggcgaagaagtagaaacttctattgcatctttcagtaagatcaatatggttcctaaaattctagctggtgaaatcccagtatctaaatcactaattctaactgcaccaaatgctgcacgtttcgttcaagaagaacttctacgtcacgccgctgaaggtctagagaattatgtgtttgcacaaatcgcagcaaaagcaccagtagttgaaagtgctgtatctggcaaaatcaccgaagcagacgtacaagcagcagttgcagaactaggttctaaaaacgttgatactcgtcgttgtgtcgccgtgatgaatagcaagatggtagcggaattccgtcttcaaccagtactaggcaacgtagcagcagttgcaatgatcgaaggtcaacgtactgatgatcgttggttgaactctgaactaaaagtattcgtatctgaacacgtagcagatggtgtagtactaattggtcagttcgatcaacttttaatcgcacagtgggaaggtcaggaagtggattatgacacaactacttaccgccgttcaggaactgtagcatatcgcgtttggaactttatcgacgtagctctagcacatgatacttgcttcctacaactaactaagaaagcgtaa

SEQ ID NO: 268435 - DNA, 1065 bp, Klebsiella pneumoniae
atgttcggtgaacgtttaaaacgcgctcgttctgccgctggcctgtctatgaaagagctttctttgcaggcaggcgtcagcgccacaatgataaaaaaatacgaacataatgaaagtatgcctagttctggcgtgctggtgaagatgtctcgtgcgctgggggtccgaaatgaatattttttccgtcctgcaaagtatgaattgaaaggtatcgaataccgtaaacgaagcactgttgccatgaaggttcttaatcgtataaaagctgatgtgcttgatcaggctgagcgatggatggaactatgtaacatttggccaagctttcctttaccttcatttgttaaaccaaaattctcagtatcattgattgatgattataatcaaattgaaaccgtagccaatgagttacgtgattactggggattaggaaatcaacctgtaactagtatgattgatatactagaaagccatggtattttggttatagttactgacgttgattcaagtgaaaaatttgatggccttcaagcgacagttagctctaagcctgtagtagtaatttcttctcaatggcctggtgatcggcagcgtttcacgttagcgcatgagctcggacatttgattttacatgatatgattagcaaaaaccttgatgaagagaaagcttgcaatcgtttttcaggggcgtttattttccctgaagtatcagtgcgtaagtacttagggaacaagcgctcacatcttgaagttcaggaattgtacctcctgaaaatggactatggtttgagcatgatggcgtgtatttatcgcgcaaaggatcttggtataatcactgatgccaaattcaaagatctcttcatgtacttttctgttcgtaagtggcgaagccaagaacctgggcaagaatatccagcagaacaaacgagtatgtttaaacagcttatttttcgtggtttaggtgaaggtatattatctgaatccaaagcggcagagcttcttgggatttctttagtgagtttccatcaggctcgtaagttggaatcatcagatgataattttaattag

SEQ ID NO: 268436 - DNA, 486 bp, Klebsiella pneumoniae
atgataattttaattagtgatgcaaatattataatcgatatggaagagggagggttgatagatcttatctttactcttccacattgctttaaagttcccgatattttgtattacgatgagctcgaagagcaacatggcattttgcttgatagaggattggtactaggtgaattatcatcagaaacgcttacctacgcattaggacttgctgaaaatgctagtggaccaagtcgaaatgattgttttgctttgtgtttagcaaaacaagaacaatgtcccttactcactggtgataaagcacttcgtgaattagctcaatctgagggaatagaggtcaaagggactttgtggattgtagaagaaatgcttcatcatggtttgattacaccatcaatggctagagaagcatataacagaatgagagatgccgggcgtcgtttaccttgggatattgccttcagacgtcttgatgaattagatttgtaa

SEQ ID NO: 268437 - DNA, 570 bp, Klebsiella pneumoniae
atgaaactagataaattatgggtaagtgagttcaaaaatctcaaaaatatcaccattgactttgatcaaaatgaattggtaacagtgataattggctggaatggagctggtaaatcaaatgttattgaagcgctagttattatattcagagacttggatttacattatccacctgctttctcatatgacctagaatatgtatgcagaggacggaagatatatatagaagctagggttaatgatgataaaaaagatcgatacaaaataaaatgtcatccaattaataaaccaaatgagagtaaaaatctcagtaataaggagttttttgaagatggagataagaaatatctaccaacaaatgtctttggttattattccggcccaagtgatcggctggctactcacttttatgaacatcagcgaagatttagagaacaattgatttaccctgaaaagttcaatctaaatgaaaatactctaccgctgcgtccgctattctatgcgcaaaaggttcacagtaactttgtattctgtctcttatacacatctccgagcccacgagactcctga

SEQ ID NO: 268438 - DNA, 141 bp, Klebsiella pneumoniae
atgataaattcccaatccatgaaggtgttcaattgcagctatcaacttattgataataattattttttcatcctgcgtaccctgcacagtatcaaaaaaatccccagtgcatttgtcagtaacaagaaagaggctagctga

SEQ ID NO: 268439 - DNA, 1161 bp, Klebsiella pneumoniae
atgaagaaattactcgaattacgccagcagaaagccgctctcaaaacccagatgcgttccatgctggacaaagccgacaccgaaaagcgcagccttaacgaagaagagggcaaaaagttcgacgaactccgcgaccatgctgatgcgcttgaagttgaaatcacccgtcttgaagcagtcgccgacgatcagcgcaatatgcctggtacttccgttgaaggtgagccagtaagcaacgatgaactgcgccactacatcatgaccggcgatacccgctcactctccacgctggtgcaggctgatggaggatataccgttatccctgagctggacaaagagatcatgcgccagttgcaggatgacagcgttatgcgctccatcgccacggtgaagaccactaaaaccaacgaataccagaagctggtgtcagtgggtggcactaccgttaagcgcggcaccgaaggcgaagcgcgtaccgaaaccagcacatcgaagatggagcgcgttgatatcaaactcaacccgatctacgcctacccgaaaaccactcaggaaattctcgacttctccgaagttgatattctgggttggctgtcttccgaaatcaccgacaccttcactgctaccgaagaaaccgactttgtaaacggcgacggtgataaaaaatccaaagggttcctgtcctatccgcgtgcggccatcagcgataaaacccgtccgttcggcacgctggagaagatggaggctgctgccgtttcctctgatggtctgatcgacatgctgtacaagctgaaagccaaataccgcaaaaatgccgtatgggtgatgaactccaacaccgccgctacgttgcaaaagctgaaaaacggcaacggtgattatatctggcgcgatcgtctggttgctgattcccctgataccctccttggccgtccggttcagtatctggaaacgatgcctgatgcggctgcgggtgaagcgttcctggcggtcggcgactttaagcgcggttacttcatcgtggatcacactactggcgtgcgtacccgccccgacaacatcaccgaacctggtttctacaaggtgcacaccgataaatacctgggcggtggtgtggtggactccaatgccatcaagattctggagcttgctggttcctga

SEQ ID NO: 268440 - DNA, 603 bp, Klebsiella pneumoniae
atgactaaaaaagtcaatttaatgaccggtgctggttcgattgccagcacagtaaatgaagctgtatctcagcggattaagctgtatcgcaaacaaaaaaaaatctcccttgatgaactctcccgccgggcgggcgtcagcaagggtgcactggttgaaattgaggggtgccgggcaaatcccagtattgctctgttgtgccgcctggccgtcgcgatgggggtttcggtggcagactttgtggatgtcagttcgaaaccaacggtgcatctcatcgctgaagaggaaatccccgaattatggcaaggcgaaaaaggcggacgagccagactgcttgcaggatcaggtggccctgatatgaccgagatgtggatgtgggaaatgcaaccgggggaaaagtttgcttcccccggccacacagatggaacgcttgaattgttttacgtccaggaaggcacactcacactgggtgtacaagatcacctgtatcaagtgaacaccaactgttcggcaaccgcgagaacagacgttgcgcattgctatgaaaaccgaggagcgagcccattggtgttcatcatgacggtacatgagaaatcatcctga

SEQ ID NO: 268441 - DNA, 696 bp, Klebsiella pneumoniae
gtgttaacagtatctccgtcaattgcccctgaaatttatcgtattgcacccggtttccgggcactcagtatctatgtaaacgctgcgccggtgctgaaccctgatattggtgaaacagcgctgagagaagcttgtgaagcggttcttgtcggtgagcctgagtgggcagaatcgcatttagctgcatgggctgagatttttcagacgtttggcgctaagcctaaacgcaccccttgttcagctgatgcgttacgtaagcgtgtattacgtgacggcgcgatgccagcacttgaccccatcgttgatctctataatgccgttagccttcgctacgccgtgccggtggggggcgagaacattgctgcctatcaggggctaccacgcctcgttgtggcaacaggcactgagccgtttgatacggtaaaagagggtgaaatcgccgttgaatatccttcgcaaggtgaagttatctggcgtgatgatgccggtgtgacctgccgtcgctggaactggcgacaaggagtcagaacccgcttagatgtggaagcacagcacatgtggtttattctggagagtctgccgcaaatgccactggaaaaacttcacgaagccgggaagatgctgaccgatggcctcgaagcaatgatgccaggtctgcgggttgacgtaactctcattgaagagcaacaaccgtaa

SEQ ID NO: 268442 - DNA, 297 bp, Klebsiella pneumoniae
atggaagtactgcaggagattcgtcagtgctgcggtcctgatgctgtcatccttatcgacagtggatttcgccgtggcaccgatgtggtgaaagcactggcgctgggcgcgaatggcgtgctgattggccgacctgtgctctatggcgtcgctgcctttggtgaggcgggtgcgaaacaagcgctgaacattattttgcaggagatggatcgcacgctggcgcaactgggatgcacttccattgcccagttagggccgcatttgctgcgttttcagcctgctatggcggggttttaa

SEQ ID NO: 268443 - DNA, 1302 bp, Klebsiella pneumoniae
atggctgatattcaagtatcgataatttctgataatgcatctgaaagcaatcaggcggggtggtggcaccccgttgattcatttcagggtagcgagtattacgccctgtgtgcggtctctggaacagcggggtatcataaatgcacggtggtaaaacgagattccgcaggcaatttaacatctggcgactgcaaactatctgacggcacaacggcaacgtttattgatgatatcgggcataaccagccgtcgattgttattgatggtgctggattcatccatgtgtttacttcaatgcacgcgaacttactcaactatttcagaagtacgcgcccgggagatgtaaccagtattgtaagtgcaacatgggatttccctgatgttgagtggacgtggacctatccgatagtatcccgtgcacccaatggcgatatttacgccatgttgcgggcatctgaccggtatagcacaggtgagacacttcgcgctgcattcatctacaagtgggatattattgcccttagatgggatcggtatgctcacatcgcagagaatgacaaccgagcggtataccctgacgacctgagagctacatcaaccgggttaagcataatttttgaatggtcgttgtatgctgcagccgctgtccgccatgtcggtgattacggtaaaataggcactgatggtttcatgtataacattgccggaacgcagttcccgatgccggttacacaaggccagcttgcctataagccacttcaaccaggagaaaatgccaactctggctctggttatgtaatgggcattcagtctgcaaaattcgcgttcaatgatgatgaaactttatccttcatcacataccgattcagggatgccgacgacccgacaggtgattcgtttaccaacttcagggtaaaggttgccgcatggagcggtagcgcatgggttgagcaagagattgcttatgtcccgaccacgataggtaatacatcagcggctcttgcgtctacagtgcaatcagggaaaaagcgggtgtatttctccgtggaatatacatctgccggctctcctgtggcggtgattgtactggcggaaaactccgggtcggcctgggtgtattctatccttggcacaaaggccccaacactgcttcgccttggttctgcgcccggtactggcggagatgttatctatgtgtcgtcgccatacgaaggaaaggtaagtcgctattttgtcccgtcaaactacacgccatcaacttcatacacgaactttaacgaccttctcgccgctcttccttaa

SEQ ID NO: 268444 - DNA, 684 bp, Klebsiella pneumoniae
atgaccggaacagctatccttgtttctgatgaacaagctcaggcttgggctcaaaaatatatacctccagttgctggcgcattagattttttcaatcttggttcttccgccatttcatctgcaagaagaactaaaaactggggttctgaaactaacgcgctagtcttagcaggaggagctgcgttagctgctgttggtattgaaaacacatcaaccactgttgatagccgatgcaccatgcgggaaactacaccaacaagttttactgctgttggtattttagatgttggcgcgaatgcaggtgttcttcgtgttgctgatattcgccttgtcactacgagtgacaaaaaacttaaacgaataatgaccgctggacagtcaacaattgccacatccttaccagctagtggcgcagtgatatattttgtacaaggcgatacaacaggtcatcgttttggattcatcacgaatgatggcatcattagtttatcatctacagctgtcggtgacagtacaaaagcctcgtatattggtggtagtactgaatcaggacaagtagctgcgccatataaagcgtacggggccactgtgtatgggtctgttctttctgactcagatcttttgcttattgcggaaagactttatcgttacaccgctggattcggagtagcagtaaatggctga

SEQ ID NO: 268445 - DNA, 123 bp, Klebsiella pneumoniae
atggactgcttcgtcaatgtcgaacaggctatcgctaagaaaggatgcagggcagtttacggctgggctgtctggcaagtaccaggcaattatattgaagctgagtttcactatgtttggtag

SEQ ID NO: 268446 - DNA, 2718 bp, Klebsiella pneumoniae
atgagcagcaggaatttcgctactaggatgtcatgtttttcattagtttctgcaattgaaacggatcttcgggcagtaataattggagaactacctgataattattcagattatttaccagctgatgttgttaaagtggccaaagatagatacttagaacataacaaagaagtcttctcaaaagatgttgaacttttagaattactggattttattgatttttatgatttaagtaaaattttgcataagattactgatattcaaacattttccacgaaagaagacttaaaaaaaatagcgtatgatttagaaaggctaagtgcttgcagaaatagaatctgtcactccagaccattagaacctaatgatttctctagtttgctcgatttctctaatgagttaaagaatatcgggaatgtatatgattggaagaatattcatattgcattaaagaatctcaataatcccgcatatgctttatcattagaaattccttcattttggcgtgttaatacaaaaaatattagcaataaccttccattgcctgaatttgatgatacaggcttcatcggcagggataaggataggaagtcaataacaaagctattaacttcaaatactaaaataatttcaattgtcggggaggggggcgtcggtaagacagcgctggcacagcgatgtttatatgatatattggaattgtgtgaacttgatagtaacaaggaacccagttttgatatcattgtgtgggtatccctgaaaactaaccgacttacatcgaatggtagtgggcaaataaaaaatgctataactacatgtagcggtttattccaagatattgcccttaaccttgccgggatttcaaactcgtcaatggagcaagatttggaagagatacttgaatacatgacgcagtttaaggtgttgctatgtatagataacatggaaactattcaaaactcggaggttagaagttttttagctgacatacctaataattcaaaagtgctgatcactactcgaatcggtcttggagaaattgaatatcgatacaaattagataaattagatgataaaccatctgttgaacttatgcgtaatatgtctaggttgctcaatttagataaattatataaaaagaaagctgaagctttaagtgatctttgtcggattttatataataaccctcttctaataaaatggtatgtccttgcagttgctgcgggaagtagtaattcagaattgataaataagaaaaccagcaacttccaagaggctcttgctttttgttttgaaaatctttacgacaagcttggcgacgttgaaaaggaagctatatctgtaatagcctgtattagaaagcctgtttctgctgttgaattaaggttttatctgagtggtatcaacgatacagcaattgaagaagccctacatcaactacataattcaagtatgttgatctcctcagaagataagaaatctcaaggtggtcaggtatatagtctaaccggtgtggctgaagaatatataaatagtataaggccagtttcaaccgaaacatacaaaaaagttaaagacaaaagaagagaacttcaggtaattgtagatgaagctaacgtacaaaaaaatcattataattatgatttaaatgtaatttattggacaaccaaagatgagaaaatatgctctatttatctcaagaaagctttgacggacgctaagaagggcgattttgagaatgctttaattaatgttaataaagcgaaacaactcatgcctggattttcagagtgcaatcgaattcatagctttattcttaaagattcgtccccatttcttgcagaaacggaaatggaaacagctatagatctcaatcctaagtcggtcatttcaagatatgcttatgcacaatttttgatttctgaagatgagtttgaaagagcaaacgagcaaatcgatgaggctttgaaaatcgatggtgaagatattgcacttaaaacttgtaaggcatggctattgactttaatgggagactataaaccagcctcttcattatatgaagaattaattccattacaaacgtctaggcatcgtaaatttcgtatcagtacatatgatcaagcaagttcttgctatcgcaggatgactgaggttttcctgagggaccatgattataatgaagctagaaaaagtctacaacgttctgttgagttaattgagcaagctgtcaactctggtgattatgaccatgggacaatagataaactcatgaatgttttagactgtgcagctattttcagcaataaagcaggagacaaaataatcttgggggatataatttcgtttattgaagcgaatgtagaatccttagatgttcgttcaatgcaagttttaaggaaagggctggagtctttcataaaaacctgtgattcaataactgagaaaagaatagatagaattcttcattctttaatatcaggaagcagttataaatcatctgaaagagttttaggaacaattgataataccatttcctcggataggggtgtatcatatggattcttaacagatgttgaaaatgttagatacttcttcccaagaagtgagttgaatcctagagatcttcttgatggcgactcctctcagatgaatgtaactttcattcctggtgaaacggaaagaggtaagtgtgcctacagtattagagagagaaaataa

SEQ ID NO: 268447 - DNA, 642 bp, Klebsiella pneumoniae
atgaaaaaagattctaaacgcggttccgcattgataagtgctatcaaatcagaatcagtcgtcgatctcagcaaggagtacgctgagtacggactggatatgttgattgactcagatgttctaaaagatattccttttattaatactgccgttggggtatttagtgcagtaggttctgcaagagactatatcttcaccgaaaaactcattcgcttcttgactacattttctgatctttcaaaatctgagcgagtagctatggtcgataagttgaatgaggacgataaatttagcgggaaggctggcgcaagaataatcgaaataatagaccgcattgaaagtgaagataagccagagttggcagcaaagttttttaaggcattcgccagtgaggagattaatttttctgagtttcgtcgtgtgcttgtcgcattagaacgtattcctgcgtttgacattcctgcattggctgcgttttcgatgtgtgatgtttctgaatccgtaacaatggaacaatctcttctgcttgcatttgttaatgcgggacttggacaaaataatggcggcctcgatggtggtgcaatactaccaacagaactttgtgaaacattcgtaagagccgggaaattaaaatcagactag

SEQ ID NO: 268448 - DNA, 2133 bp, Klebsiella pneumoniae
atggaactactacaggaatacggggctatacttaaagttgtaataatgcctaccactggaaaacaaactataatccagggtttcgatactggtattctcagctcggagatatcagatattctttttttattagccaaaacaccaaaagaaatcagagatattttcatcaaaaataatgataatcctcagccctcgctaaacgggcaaaatcctattattttgatatccaaagaaaatattgacaacataccaaatctctatcaaacaccattctgtataattttttgtgttcaagatgatttctcatatatttgtactctcaaaaagcgttttgatatccctccgattatatgttgcaatgctaaacacgcagacttacaaccgaaagaaatcaatagtatatactcttttgataaaatcctcttttctcgctttaaattcattgaaaacaaaataagaaaaattagtggcgagaagaaaatatccacaaatttaaagcgaagaggatcttttttttataaatcaacttggaaatcgacacttaacaactcaacgcttcccattgaattattaattgaatcactcggctatatgttatcttcacctaaaagaattaaagatggtagtagcaaaagagaatttataggaacaatacttcaaagtattgaagcatacaatgaatgcttaaagcaattagacataccactaccaacggaggttatactttttgcgccgggcatgcactcttttttatatgataaaaacaatcaattttatgatttaataacgcaagatttatccttagttgagaaaaaacttcttatcgatggagtgttacgaaaccctggctattccgggatcagacttaatgtagactcggatagaaaagaacttttcaaaagccctgctttccgttacttcacttcgctgagacgttctgaaatgcggttaacaacggctgcaattgctttacttagtatgaataagaaaaccccagcgataaggatgccaaacgctataaatcattactcaaattatttgaaaaaacttgaagatcttgcaatttcatcagggataaatagtgaacaattcattaccaaatctaaagcattcaatactgtcattaaaagagcccttggtttcaagttgagaacatatataaccaaaaactataacgatttatcctttgtttgtgatgtaccattggactggataaggtttaacaatatacctattatgtttagtcatgagatatcaagaataaatgccacacctggcaacgttcttctacagaacacctcagatttcccacgagctttagttaaagcatctgagctaaagaagattttaattatacgttcttttgaaccagatgatcacttaaagttcatattagagaatgctattgaaatattcaagaaacagatgcccgatcttgactgtgagattattgatgttagaacgagaattgaacttatagatgctctaaatcaatatcaaggttacattcttgttatagactgccatggaaatcatgatggcaataaaggtaatggatggttaataataggtgaggataaagtagacacttggaatttgaagaaagttgcaaggattcctcctatcgtaattcttagtgcgtgtttaacatctgctctaagtggttctcatgcctctgttgctaatggtttcgttataagtggtgcattaagtgtcatcggaacattactgccagtaaatgcggtagactccgctgtttttgtcagtcgactgatctatcggttttacgagtttccttccacattatccaaaaatttcacgcatgttaatgtaaggctatttctttctgtttttcttagaatgtcctatgcgaccgatttattaagagggtttgagcgtgaagggttgataccgaaaaactcatgggaagaagacgccattgatattaacatatatataaacatgcttcatcatgattggttcgattatgtaataaataaattgataaaattaacaggacttacgctcaaagatgtaattagttttattgatatgaaattattcataaccgagaccatgtgctatagccaaattggttttccagatgcaatcacaataagtctcaatgattaa

SEQ ID NO: 268449 - DNA, 1263 bp, Klebsiella pneumoniae
atgattaaagaaatatatgacatagtcgaggaaagatatttttcatccggcgattttaatgggttgcctatttataagttagagggtattttcgatatcaatagcgaagatttcaaagctttggttagaaaaggaatcgaagatgatattttgaccgcttgctctgaaggaaatccccatatcaaagcattttcaaaaattcctaaggagaaaatacttgagagtttcgatagctcagaatatccaggtcatacatgcttatatccccatgaaaatatgctagccaactctggaaagctttccgcttatagtcattcaccgtatggaatggaactagcaagtggcgcaggacaattagactatagaacttttgatctatctgttttggaatactaccgaaatgacccccgttatttatactttacggattttattcatggccaaatatccattactgatgagtattatgaatcaggcaatgttccggaacacgatcagatattacttaaaacatttggatttgcttatgatgacagtttaaatagatatgtcgctgttttcttgagatacctaagtgaccttagtcctgagcaccaaaaagtttgggcggcgaaagaagtaaaaggagatataaagttgcatcccgattactatgcttcaaacatacttggatcatggggaactaaaatttcaatttttagtgcatttacggaagaacttaaaataattaataaaatgagtgtgttaatagggaaacccgagctttttagaaaagattacagcgatgatatgcctaaagagttcgggtttcttttgcgaccaactctttctgagtttaataatttcatgcttttattagataaaatgatgtccgataacattaataagaagttcttcgaaggggatgtggagcttgaaattgagaaagagcgcgaagatgggaaaatagtcgtaagacctaaaggcactatacaaatacttgatacatgggttaataaatatttccggccaacagatcctacgccagttaaagatatgttggatacatttagaaaggtaaggcaacttcgacaaaaaccagcgcatgccatcaataataataacttcaatcaggaatttttcaaacaacaaagggatattattataaaagcctatgatgctatcaggacattaagactcattttggcgaatcatcctagcgtcaagaaaaaccccccaagaattagcgagcatctttataagggcgagatctgggatatatag

SEQ ID NO: 268450 - DNA, 477 bp, Klebsiella pneumoniae
atgatgaagttaactatcaggcagcaggaagttcttaacctgctcattgagtaccagcgcgcccatggattcccgccaaccacctatgaactgaccggcatgttggggtgccggtcccccaatgctgcggcaagtcatctcaaagcgctggagaagaagggcgcgatcaaaatcacccgtggggtttcccgcggtataagcatcgttaattttccccctcagagggaacttgtcataaattttaataccctcgttaaagtcaaacttagtgatgtcgcccttgtgtttttggagcgtcagcatgaagaaaaccgtattcgccacccctccatttttggtgagtttgaaccaccgtcaaaggatgaaaatgggtttacgaaaatgacgctatggagcctcatgtccgaactggggaagctatgttattgcggtggggaagtccctttcgtacttaaaattcccctggaggatgaatga

SEQ ID NO: 268451 - DNA, 192 bp, Klebsiella pneumoniae
atgatcgattttttcgaaatccacagccgaacgattgatgtaggtttcaacaatttccacaccaagatcttctttttttgggaaataatggtgaatactggcctttctgataccgaccattttttccagatcagcgtaactgaaggcagcataacctctggaacgcagcataaactctgcagaattgattaa

SEQ ID NO: 268452 - DNA, 342 bp, Klebsiella pneumoniae; identical to SEQ ID NO: 193006

SEQ ID NO: 268453 - DNA, 216 bp, Klebsiella pneumoniae
atgctctgtttcgatttcttgtattacctgcacatcaaacaccgccgctacccacctgatcacgtgacgcacgttccgtcagcggcatctataatgatgaattcagaacgggttgggctcgtctcagaaatacgtgcttccctgatcattatgtatgggttgttttcgcatgcttttaacagcgatacagtctatgttaaggaacagatcctttaa

SEQ ID NO: 268454 - DNA, 495 bp, Klebsiella pneumoniae
atggaaatggagcttatggtcgttgaaaattgttcaggaaaatcagttaattaccaaattcacgtagggattgactatgctaaagtggttgacttgcagagcaaatggggtgcctatcgtgctgatttattgtcagctctaattactgctaaccccggtatggccactgataatgagttagcaaggaaaattctggcagataacagcctttctgattggcattgggactggtgccgcaagctattgcaatgtaacggtgatgattatcagtggttttttctgcaaataaacgacgcagttcaaggtgtttgtgttctttaccatccaaaagaaagtcgatttgataataataaaattttctacgtagattatattgcaacagcatactggaatcgtcctcgtcctaactttacccctgaatatagtggagtaggcaaagagcttatccaacatacctgtctcttatacacatctccgagcccacgagactcctga

SEQ ID NO: 268455 - DNA, 441 bp, Klebsiella pneumoniae
atgaaaaaacaaaattacccaacactgacaaactatcttgccaaaactaaaaagaacgcagatctctatagattatataacccacaattttctgtattcggaaaaccagtaagtgaggagcaggatttttacttttgttacttctccagacatatgattactgagaggaatatcttaaccctcttttcaattcatacatttctctcttacaacgtaagcaaaaaagagacaattaaatcatttgtacattttctcaaaaaatcaaaccatgacaccttcaacaatgcattccagtttcgcgggtgcaatatcatttatcaaaataagaagagagaatttatggagatctcatggttttctttctcacggatctatgacgatatcgtaaaaatcaaagagtatagtgctaacaatgaaatttataacaaattcgtagcttaa

SEQ ID NO: 268456 - DNA, 951 bp, Klebsiella pneumoniae
atgaccaatcaaattataaatatattaatccaaagtgagacaagagaggaagttatgaattgcataaattcaggaataaatattaatgcttttgattattgtggtagaaatgcccttttctattgcgaccaattagacgccgccaaagcactgattgaagcaggcatagaactaaaccatatagacaattatggcaataacgcactgttttgtaacactaacccaaccgttctggaattattaatccattcaggcattcatattcagcacaagaataatcaaggccaatcttgcctccaccaacaacgctataatataaaatgtgcagaaattcttattaatgcaggtgctgatatccacagtattgataatgaaggccagactgtactctacaacctctattccacagatagttttgactactggataaaaaaaggctgcaatattaatcatactgaccataatggtaaatcagtactcgatttgtctatggacaatggaaactggcattaccgatccaacgtcagtgctcttatccggcatatagaaaaaattgatagcacacctgttttaatcaggcatatcaactatcactctttagatcttattaaattacttaaacataatggtgttaatttcctgcttgcagagcattgtacagttgaactatatgttaaagacatgaaatcaatctttaacatactcaaacaacatatcgaaatcaagcacactcagttttataattgtcgcaatgagcatattggtatctacaccggcatagagagagtgaaatggtttattcgaaatggtatcagaatggacgacgatatactcagacagcgttccgactccgataagattttttcttatatcgcaggaagagagaaaaaagacctgttaaaagaaatgaagccagaactcccccgtgcacctgtgcgaaaaagactctaa

SEQ ID NO: 268457 - DNA, 819 bp, Klebsiella pneumoniae
atgcagcgagtccactctacgcaccgtaaacactttgcaaagcatgagttgactgctcaatgcatcatgaaggttatatggtctatggtcctttcccaccttaatggaaagcgtcaatctcaagagcgtagagaaccacttgagctttatagaatttacttctatgactgtcctcctctcgacattcaaacacgcctacccctcccagagccaggcaataagacgcccggacgtaagaacttcaagctcgaaaaaacatacatcctgagaaccgagctacatgaagagttaagaaaaactcggaaaacagccctaaggctcggaaatcttgttgataataagcgttggcagttgactacgctttcccttgacgctttgatgaaagggactaaacaatgggatcaactaacaaatgatgatttttactatgacatcaagcaaaaacaggttgacatcaaactagggatggatatcacgaccttagcttatgaaaaacttgttgatgtgattgtccttgttgccggtgactcagacttcgtacctgccgccaaacacgctaggattaaaggtattgatttcattcttgatccactaagacagaacgttaccccatcactgtcagaacatattgatggtgtccagtcatacagcttgatatctggccttgccgatgctttacatgctgaaccggaaccagcccctgactggtgggaagaccgaaaaaaaggcaagcccagaggaaagagggatagtggtaagcgcgagtatggaagcactcaagctgacgctgcaaagaagcatcaaagaaataagcgttaa

SEQ ID NO: 268458 - DNA, 1089 bp, Klebsiella pneumoniae
atgagtaaatatattccatttttaaaagcaaaaagcaacgaaactcaagccctcgaagagctttacaaaaaagatgctacaatcttcacacaaatcactccattcttcgatataccaagagaatcaaataatcaaacaatggaaaatgtcttgaataaagctcattctttcaaaaagagattggataataaagctttatttaaaaatatggaattttacatagataactatgacttagatgatgaagtattaattgatggagtggagcaatacgaatatatactatctctttttcgtgattatttatatattcctgtgatcggtatcaaccgattagagaaacacaataaaagtgtttacgatagcctatcaattaacggagggaaattagccataaggttagttgctgaagatattgagagctataaaataacaaaaatgcatcttttgaagatgatggtaatcattagaaatctgaaagtagaagaattgcacttaattatagatctacgatacattcagccaactgacataaaacgactaactgacatggctgaatactttattctaaatgtaaacaaagactttcactttgataagtgtattatatcagcctcttcgataccggccaatatttcctcattacttgaaacctatcaaagaaaatcgttcacgagagcggagtggaaaatttgggacacattagttaacgaaaagaaaattggtaatattatatacggggattatggaatcgttagccctgattattctgatatagatttagatccgaagctatttagaaaagtttccgcaccaaaagtattttatacgtataagaataatatgttttgtgttagaggtggatctttccagaatgatgagagaggaaatggtcaatattatgatattgccacaataatccatgaccaaaaattcttcagggcaactacattctcgtatggggaacaatatgtttatgatagaagtagttattcgcctaaaaaaccagataaagcaggtaatccctcatcttggattaaagccatgttgacttcacacattaagtttgttttacactgcatcccttaa

SEQ ID NO: 268459 - DNA, 267 bp, Klebsiella pneumoniae
atgcgtaaagcccgattcactgaacaccagatcatcgccgttctgaagtccgttgaagccggacgtaccgtcaaggatgtgtgccgtgaggccgctatttcggaagccagctattacaactggaaagcgaaatatggcgggatggaagcggccgatattaaaaaaatcaaagaccttgaggatgagaatcgacgtttgaaacagatgtttgccgacctgagtcttgagtgccgggcacttaaagacgttattgaaaaaaagctttaa

SEQ ID NO: 268460 - DNA, 669 bp, Klebsiella pneumoniae
gtgaaaaatattctgataattgatgatgagaagcagatctgccgcctgctgagcacgtcccttcaatgcgatgaatttaaggtttacgaggccgaatctttagcccgtgggctgagcacagccgcctcaaggcaacccgacctcgtgattcttgacctgggcctgccggacggcgatggcgtggattttatccgcgagtttcgccagtggagtaacaagccgattatcgttttatcggcgcgttcaggcgaagaggacaaaatagaagcgctggacgccggagccgatgacttcctctgcaagccgtttggcattggcgaacttcaggccagggtgcgagtggctctgcggcgaaatgaaagtgaaaaagaagccgtaatttcattttccgatatcgtcattaacctgcatgcccatacggtgacgcgcgccggggaacacgttcacctgaccaaaaccgaattccggctgctggctttgctggtcagcaatcccggcaaggtgctgacgcaatctcagatactgaaacaggtatgggggccttccgctgacaacagccagtatttacgcatttacatgggacatctgcggcagaagctggaggatattcccgctcaaccaaagcatctgttaaccgaaaacggggttggctaccggtttattcagtga

SEQ ID NO: 268461 - DNA, 2703 bp, Klebsiella pneumoniae
atgaccgaagaacctctgcgtcccgatcccgatgctctgctggcgcaaaccgataacgaagtccggggtaagctaaaaatttactttggggcctgcgcgggcgtcggaaaaacctgggccatgctacaggaggcccggcgtttacgggcgcaggggttggatgtccttattggagtggtggaaacccatggacgccaggaaacagcggcgctgctggaggggctcaatgtgctccctcgccgcgcaaccggaaagagtcaccatcaggagtttgatcttgatgcggccctggcacggcgtccggcggtgatattgatggatgagctggcccactccaatgcccgtgggtcacgccatcctaaacgctggcaggacattgacgaactgctggatgcgggcattgatgtcctgacgacggtcaatgttcagcatcttgaaagcctgaacgacgtggtcagcggcgtcacggggatccgggtgcgtgaaaccgtacccgacccgttctttgacacggcctcggaagtggtactggtcgaccttccccctgacgatctgcgtcagcgtcttaaagaaggcaaagtctacatcggcgaccgggctgaacgcgccatcgaaaactttttccgcaaaggtaatctttacgcgctgcgtgaactggccctgcgtcgtaccgccgatcgcgtggatgatcaaatcagagcgtggcgcgatgccagcggacgcgatgaaaaagtgtggcacacgcgggatgctattttgctctacatcagtgagggttccggcagtgagaaactggtgcgcattgccgcgaggcttgcggcaaaactgggatgcgaatggcatgccattgcggtagaaacccctaccctttaccgacagcgagagacgcaacgccgcagtatcctgcgcacgcttcaactggcgcaaaatatgggggcggtcacggccaccctttccgacccggatgaagccaaagcggcgcttcgctacgcccgcgaacataacctggggaaaattgtggtgggccgctccctgcagcggcgctggttcttctctgaacgcctctccagtcggtttgccaatcgcttaagcgcacttggccctgatctggatctggtggtcattgcgctcgatgacgccccggaacccagcgtcaacagaagtgcagagctgcgcggcaccacggaaaaatggcgtcagcgactctacggctgcctcgcggcggcggcactctgtgcgggaattacgttaaccacgaaactgctgtttccaggcttctccccgaccaaccaggtgatgatctatttactcggcgtggtcctgattgccattgggttcgggcgactgccctccgtggtggcggcggtgctgaacattatcgcctttgatctgttttttgtggcacccatctggctgtttgccgtttcagatgcccagtacattgtcaccttcgcggtgatgctggcggtgggcgttatcaccggtaacctgaccgcgggcgtgcgctaccaggcgaaagtcgcccgccatcgtgagcagcgggcacgctatctgtatgagcttgccgggggcctcagcaaagcgctggagccttccgatatcacgcaaatttgccagcgcgtcgtcggcgcagcgctctttgctcgctgcgaagtctggctgccagacagcaaaggcgagcttgtcccaccggcggaaaaaacgctaagcgtggccccggacagtgccatcgcgaaatggagctttgaaaaagagcaggccgccggcgtcggcaccgacacgctgccgggcgtgccctacaaaattctgccgttagcgtcggcctcccgcacgcggggcctgctcattattgagccacaaaacgcccgtaacctgataatccccgaacaacagcggctgctcgataccttctgcatgctgatttctggctcgctggaaaggctggagctaacccgcaaagagcaaatgtcgcggctggccattgagcgggaagagctgcgtaactcgctgctggccgccttatcccatgacttacgtacaccgctgacggtgctgtttggtcaggcggagatcctgacgctggatttgtccgcggacggctcgaagtatgctcaccaggccagtgagatccgcatgcaaacgctcagcaccattcgccttgtcaacaacatccttgatatggcccgcattgaagattccggttttcgtttgcgtaccgactggatctcgctcgaagagattgtgggcagcgccatgaaatccctggaggcgcttttaccctccaatgaggttcagctccagctgcctcaggaactcatattgctgcaggctgatggccccttgctggagcgcgttttcgtgaacctgctggagaatgccatcaaatatgcctccggtgaaaaaggcgagataggtattcgcgcgcaggcgttatccggacagataaaagtggaggtctgggataacggccctggtctgccgccgggcaaggaaaagcagctctttgacaagttcactcgtggcaccactgagtcagctattcctggcgtcggcatgggcctggcaatttgccgcaccattgttgaaatgcaccggggggaaattcatgctcacaaccggcccgaagggggcgcctgcttcaccttcaccctgccgctgcctgctgcccctgtactgaccgaaaccgtggaagaaaatccgtga

SEQ ID NO: 268462 - DNA, 576 bp, Klebsiella pneumoniae
atgactattttgcgtcctgcaatctccctgtttgttgtgttaacactgctggttggggtcgggtatccgctcttaaccaccgggcttgcgcagtggtggttcccaagtgcttcaaagggcagcctgattgtgcacaacggcgaagtgcgcggttcagccctgattggccagaacttcacgcgcccggactacttccagggcagaccgtccgcaacaggcgataagccttacaacggcctggcctcttcaggcagtaaccaggccggcagtaacccggctctggatgaggccgtcaagcagcgcgtagccgacctgcgcaaagccaaccctgatgccagcgccacggttccagtggacctggtcaccgcatcaggcagcggcctcgatccacagatctcgcctgccgccgcgatgtggcaagcgccgcgcgtagccaaagcccgtaaccttccggaagctgaagtgaaacgcctaatcgacgaaaatacagataaaccgctgctttactttatcggtgagcccgtcgtcaacgtcctgcagctcaacatggctctggatagcctgcagaaaaaataa

SEQ ID NO: 268463 - DNA, 2043 bp, Klebsiella pneumoniae
atgtcacataaacttccgtcacagcaacaatcaggcatcatgcgcagagcgctgattgattcgtttaaaaaactggatccgagggtgcagttccgcaacccggtcatgttcgtcgtctatctgggcagtattctgaccacgctgattgcgctgggcgtggtgtcttcaggcggggcttcactctttacggccattgtgagcgtatggttgtggtttaccgttctgtttgccaactttgcagaagcccttgccgaaggacgcagcaaagctcaagccgaaagcctgaaagggatcaaacgcaccagttgggcgcgaaaactgaccagcgcgtcgaaggatgccccgcagcaaaaagtgcctgcggacagcattcgcaaaggcgactttgtgctggttgaagcgggcgacattatcccctgcgacggcgaagtactggctgggggcgcgtcggttgatgagagcgccatcaccggtgaatctgcgccggtgattcgtgaggccggtggcgacttcgcgtccgtcacgggcgggacgcgtattctgtctgactggctggtcattaagtgtagcgtcaacccaggcgaaaccttcctcgatcgcatgattgcgatggttgaaggtgccaaacgccgtaaaacgccaaacgaaatcgcgctgaccattctgctcatttcgttgaccatcgtcttcctgctggcaaccgcgacgctgtatcccttctcggcctggggcggcaccccagtttcggtgacggtgctcatggcgctgcttgtgtgcctgatccccaccaccatcggggcgctgttgtctgccatcgggattgccgggatgagccgtatgctcggtgccaacgtgattgccaccagcggacgtgcagttgaagccgccggtgacgtggacgtgctgatgctggacaaaaccgggaccattacgctcggtaaccgtcaggcaacccagttcttaccagccagtggaatcaaagaagaagatcttgccaatgcagcacagctggcttctcttgccgatgaaaccccggaagggcgcagcatcgtggtgctggctaaacagcgctttaacctgagagagcgcgatcttcagaccctggaagcgacgttcattccgttctccgcccagacccgcatgagcggcgtgaatatcgggcagaaaatgctgcgcaaaggggcggcagatgccattcgccgtcacgttgaaagcaacggcggtaaattcccggctgacgtcgaagacctcgtcacctctgtggcaaaaaccgggggcacaccgctggtggttgccgaaggtaatgccgtcatgggtgtggtggcgctgaaggatatcgtcaaaggcggtatcaaagagcgctttgccgaactgcgcaaaatgggcatcaaaacggtcatggtcaccggggataacccactgacggcggccgccattgctgcggaagccggtgtggatgatttcctctctgaggccacaccggaagcgaagctcgcgctgattcgtcagtatcaggccgaaggccgcatggtggcgatgaccggtgacggcaccaacgacgccccggcactggctcaggcggacgtggcggttgccatgaactccggtactcaggcggcaaaagaagcgggcaacatggtggacctcgattcgaaccccaccaagctgctggaagtggtccacattggtaagcagatgctgatgacgcgcggatcgctcaccaccttcagtatcgccaacgacgtggcgaaatacttcgccattatcccggcggcgttcgcggtcacctatccgcagctcaatatgctgaacgtgatggggctgcactcgccaacgtcagccattctgtccgccgttatttttaacgcgttgatcatcgtgctgctgatccctctggccctgaaaggcatcagctatcgcccgatgtcggcagcggcgctgctgcgccgaaatctgtggatctatggcgtgggtgggctcgtggtgccgttcattggtatcaagctgattgacatcattctgaccgtgatgggactgggttaa

SEQ ID NO: 268464 - DNA, 1686 bp, Klebsiella pneumoniae
atggctgccgaagcgtttttactgttggcttgctacatggccgttttgctggttctggcaaaaccgttaggtgattacatgactggcctggtgcaggatcgcgccttaccgggcacccgggggtttgaaaacctcatttaccgcgtttgcggcgcttccagcgatgaaatgaactggcgtcagtatctgtttgccattctttttgtgaacggaaccgggattgtttttctctttttagtgctctttttccagggggcgctgccgcttaatccgcaaaatttacccggcctctcctggcatctggcgctcaacacagctatcagctttgtaaccaataccaactggcaggcctacgccggtgaatcgtcgatcagctacttcagtgaaatggtcggactggcggtacagaacttcttatccgcagccaccgggatggccatcgtctttgccctgatgcgcggctttgcccgtcacaccacggacaagctcggtaacgcctggcgcgatctgacccgcatcaccttattcgtgctgctgccgctgtcgttgattatggcgctgttcctggtcagccagggtgtgattcaaaacttcagtccttatgtcacgctgacgactctggaaggcgtgcagcagatgctgccaatggggcctgttgcctcgcaggaagcgattaaaacgctgggcaccaacggcggcgggttgttcaacgtcaactccgcacacccgtttgaaaacccgacatccttaaccaacttcattcagatgttgtccatcttcatcatcccggcagcgctgtgctttacctttgggaacgtggttcgcgatcgccgtcagggacacaccctgctgtgggcgatgtcgataatcttcctggtagcggcagccgttgtgatgtgggcggaactgagcggtaacccgcacttcaccgctcttggtgcggactctgccatcaatatggaagggaaagagagccgttttgggatcctcaactccagcctgtttgcggttatcaccaccgcagcgtcctgtggtgcggttaacgccatgcatgactcctttactgcgctcggtggcatgatcccaatgtggttgatgcagcttggggaagtggtgttcggcggcgtcggggcaggcctgtacggcatgctgatgaacgtgctgctggcggtgtttattgcgggtctgatgatcggtcgtacaccggaatatctcggcaagaaaattggcgtgcaggaaatgaaaatggccgccatttatattcttatcaccccgtctctggtgctgctgggcacggcgttgatgatgatgaccgaagccggtcgtgccgggatatttaaccctggcccgcatggattcagtgaagtgctctacgcggtttcctccgcggccaacaacaacggcagtgcttttggtggtgtgtcagccaataccccgttctggaacctgttactgggtagcgcaatgctcttcgggcgtttcctgccgttcatcccgctgatgatgattgccgggtcacttgccgaaagaaaaattcagcccgcaagcccgggcacgctgccaacacaaggtccgctgtttgtgtctctgattatcggcgtagtcctgctggtcggcgctctgacctttattccggcgctggcactgggtccagtaattgaacatttacagatgcttgggcattaa

SEQ ID NO: 268465 - DNA, 327 bp, Klebsiella pneumoniae
atgaacatcagattggtcggcaagctgtcagcatgggcggtgttgctcatgtcattcaacgtcttcgcggtctcacctgccccccgtttcagtgatgaaaccttgtcgatgcagcagcagaaggccatcgggcaggtcgccgcccaatacctctcctcacaccccgatgtcttgctgagcgtgctggaaaaactctgcaccgaggaaagaatgaaaatgcagtgcggaaaaaacattaacaatgccgccattagtcattaccccgacagtccggtcgggcatcaggatgacggcgtttgccacgcctgcctgctagccaaaaattag

SEQ ID NO: 268466 - DNA, 1410 bp, Klebsiella pneumoniae
atgatgaaacatcctctgctccagaatctgcgtgcatttcttgcctctactcagtttgaagcggtttccgctaacgctgcgggtaaagcgttattacaagactcaaccgattcacatcaggcattttgtcaggaaattaaaacctatcttctgcgctacccccgaacaaaacatgtcgatgtttatctgaatgatattaatggcacgttcagagggaagagaattaacgttggcgatttaccgtcgatagcaaaaggatgttatttcccgcagtcggtctattccatggactggaaggggaaaatcattggcaatgacgcaagccaggttgtgctggatgaacccgacaggctttgtttgccggtgaaagggacattgcgcccctcggcgtatgaaccggaagaaaacgcccaacttttgctgaccatgcgtggcagtgacggcgggccctgtgggctggaaccgcgtgtgatccttgaaaatgtgctgcgccgttttcaccaccatggattgtatccggtcatcgcgccggagattgagttctatttgacgcaagagcatccccggaatattcagggacagggctgttatcaaatggcggtgccatccagctatgcgcctttcatcgaaaaactcgaagagatggcggcagcacaaaacctctctctgacaggcattgtcagcgaagccgaaccgggccagtttgagcttaacctccggcactctcatcaggtggtggacgtgtgtgaaaacgtccttgccatgcgtcggttaaccagcgtggtagcgagtgagttcggctataaagcgaattttatggccaaacccttctcgcatctggcgggcaacggcctgcattttcatatcagcctgaatgatattcacggcgacaacgtgttcgcttcaccggcaaacgagctcagtgaaatgacccggttgtgtctggcgggtctgctgcacctgatgccagcgtccgtggcgattctggcaccgaccgtgaatgcctaccgcagaatgcgcaaaaacctgaatgagccgctgttcagttcctgggggtacaacaagcgctcggcggcattgcgcattccgtgttcaaccgaagataaccgccgtatcgaatatcgactcgcgggcgcagatgccaatccctatttagtgatggcggcagtcctgaccggcatgctgtatggcctcgaaaaagttgacagtgacgccgtggagcgcattttcaacaccccccccgcgttgcccttattccagcagcaggccatcacggcctatcaggattgtcactacctgatggagagcctgggacgggatttttcgcagcagtgggtgctcagcaagctggaggcactgacccagttcgaaaccatcgttacggcggaagagtcggcgatgtctttttga

SEQ ID NO: 268467 - DNA, 1434 bp, Klebsiella pneumoniae
atgtctcgtttaatgctcgttacaaaccattgttatgcggaaaaaaatacgccccttgacccgcttgatgaggcgattaataacaacattgagatacatggcggcgtgcgctttggctggaatggaaaattaaatcagggaaaacgtccgcgacatcatcaggcggtcacaaccggtgaagcggaatatcacgcatgggatatgtcgccaaatgaatatgaaaactactaccacggctacgtccatcagacgttatggcccgtctttcataaccgccccgaccttgccgtttatcgccgggagtacttcacgacctacaaggcctacaacgcggaagtggccgacgaagtggccaaagaattgtgcccggacgatcttatctgggtgcacgattatcaccatctggccgtgggccggatgttaaaagaaaccggttttatcaatcagtgtgggttctttttgcatcagccgttcccgccgggagatgtgttccgttccttgccggaacacgaatggctgctgcaatccatgttgcattacgacctgattggcttccagtcggcgtctgatgccaataactttatttcctacatcacccgcttctatcgtaccgaacgtctgggcgggagcgtcatgaaggtgaatggccacatcctgagcgtcggtgttttcccctgtgggatagccaccgcccctctgctgaactggaaaaagaatacccacaaaaccgatgccgtgattcaggaataccatcgtcgaatcatcatcagcaacgacgtcatcaacgatatcagcggtatttattatcgcctggatgcgatgcgttctttcctgaatacctacccgcagtttgttcgcgatgtgagtttgttgcagatctccgaccctgctcatgagtatccgcgctcgtcgccagatctgcgtgaaaaactcgagggattttgcgggcaaattaacgggcagtatggcgattttacctggtatcccgtgaactatattcacaatggattgtgctctcgtgatgtgatgttcgcgctttatgccagagcggaagtggcgatgttcacatcgctgtgtgaaggcatgaacctcggggcaaaagagttcattcttgcccagaatccggaagatcctggcgtgcttattctttcgattttctccggggcgtcagagcagctcagcgatgctatcgtgatcaatccctatgacgccgcagaaacggctgaggcgttgcattccgcgctgatgatgccgcttcatgagcgtaaacgtcgccaccataatctgctgcaaaaagtcacccgccaggacaatcactggtggcggcatgcgtttcaggcggcgcttgaggaaaatgaattgccttcaggcatgtctcagggatggcggagcgcggccagttacacggtcttcgccccgaagcaattgtattga

SEQ ID NO: 268468 - DNA, 2697 bp, Klebsiella pneumoniae
atgtcccagccagtgggtgatctggtcgttaaaattgacggcgatagcgcaaaatttgatgaggaagttgctcatctgaataagcagctgagcgggttaggtagagccgcgaacgacagtacagcccaggtcaccgcagctttcacgcggcaggagcgtgctgcaaaacgtgccggtatttcaatcggccaatacaataatgcaatgcgcatgttgcctgcgcagcttactgatgtcgcaactcagttagctggtgggcagagcccatggctaattttgctccagcaaggcggtcaggttaaagactcatttggtggcctgatcccaacatttcgaggattacttggagctgtaagtccgttggccgttggggttgcagctttgaccgccgcaggtgccggaattggatatatcttctatcagggaacgtcaaccctttccgattttagtaagacgttgacgctatcaggtaacacggctggtctgactaccgacagaatgctggcactggcaaaatcgggacagcaagcaggactcacctttgatcaaaccactgattctctgactgcattaattaattctggcgtgggggcgggtgcgcgttttgatgaactaagccagtcagttgcaaaattttctacggcatctggtatccccattgaaaaggttgcggaagcgttcgggaaactgaccaatgacccgacgtccggcctgattgcgatggcgcaacaatttcataatgtgacagccgagcagattgattacgttgctcagttacaacgttcaggagatgaagccgccgcacttcaggcggctaatgatgcggcgacgaagggatttaacacccagactcagagcctgatcgataacatggggacgattgagcggtctgctgattcgttgaaacgcgcgtttaaatccatgtgggatgctgctctggatttggggcggcctgacaccgcaggggagatggtaagcaaggcgcaatcagcttttaagcaggctgatgacatctggaatctcaggaaaaatgatcgttatgtaaacgatgaagccagagcccgtttctggaatgacagggagtcggcccgactggctcttgatatggcgcagcagcaagcaggtattgccaaagccagcgcagcagcggccgaaaaggaagcggaggcagaatctgaaaaacagaaatatgccgctcaagcacaagccaattatgctaaatcgcagactgcgcttgaaaagtataccgccaggcagaatgaattaaataaagctctgaaagaagggcatatcctacaggctgattacgccatcaatatggccgcagccaagaaagaatatgaggccaccttaaaaaaaacgccgaaaccaaaaggcgttaaagtttctgctggtgatcgttcttctgatcagactgatgccgaaaccctgcagttgatgacgcagttaaagttgctgcaacagcatacggggcttaacgataccatcagtcagcaacgtaaaaatttgtggtctttacagtcaaaattcgcggttatagaagaggcgtcgaaaacacgcgcgctgagtaaagatgaacaatctttactcgccagcaaggataaggttctggcgcaggctgaggttaatgcgaaacttggcgatcagatcgttgctcaggaacgtctgaataagcttcaggataactcgttaaaatatgttactcagatgcaggaaaagactgctgcactgacagatagtgctgggttaagtgacaaggacgcacaacgtaatagcgagagagcgcaattaaggcagggatggaaaaatcagggtggaagcctggaagatgaagggtatcagaaagagctttccgcacttgagggttattacgctgcacaggatgaaatgcgtaataactggttggccggcgttcagtcgtcatgggaaaactatgctgacatggccaccaattacaatcagatcgctgcggatacaaccaatactgcgctcggaggagtaacaagcaatctccagcaggggttatatgatcttgcaactcagtctgaagatgctggcgatgccctgagtaacatggttgaaggttttggtaaaacagtcatccagaccctggcacagcttgctgcacaatggctggtatatcagggggtgcagttgcttgtggggaaaactacacaagcctctgctattgctcctatggtagcgaatgcgcaggccacctccctgcaggcccaactggcagcatatgcttctactgccgccataccaattgttggtcctgctctggctcctgctgctttggctgcagcggctggcgtcacagcccctcttgttgctgcaatttctgcatccgcccttgctggcatggcgcacgacggcattgataaaattccggaaacgggcacctggcttttgaaaaaaggggagcgggttacgacggcaggaacatcggcaaaactagattccacactggagcaggtgcggaaacagcgctcccttgccggaaacccgttgcatgttgagttcaataacacttacaccgggaaaccggacgatgcaacgatccaaatgtgggatcagcggcagcgtgcatctgaaaaaaggcttaagcaatattttacttcccaagttattaatccaactgagaattatggtcgctcacttaaatcagtttatccggggaggcgtaagaaataa

SEQ ID NO: 268469 - DNA, 441 bp, Klebsiella pneumoniae; identical to SEQ ID NO: 226506

SEQ ID NO: 268470 - DNA, 258 bp, Klebsiella pneumoniae
atggatgagaaagaagtgaatttttcactcagctatgagctgctgacgcaaaagacagaagaagaaatcaggaaatgcgaccttcgccaggacggcccgtactacgtccaggaactgaacagggcctcagacattctccggttctggtttatcctcgcaatgagcggatatccgggcgtgccggatatggagcgcattgacgctgacaggctgcgccttgaggggctgatccgtggtctcagggagactatggcgtga

SEQ ID NO: 268471 - DNA, 1341 bp, Klebsiella pneumoniae
atgacgatgccatttttacagaatatccccccgtttatcttcttcaccggcaaaggcggcgtggggaaaacctctctggcctgcgcgacggcggtatggctggctgaccagggccggagaacgcttctggtcagtaccgatccggcctccaatgtcggtcaggtcttcagccagactgtgggccaccggatcactggtatccgcaccgtggaaaaccttgcggcaatggaagttgacccgatggctgccgcgcaggcttaccgcgatcgcgtgctcgatcctgttcgtgaactgatgcctgccgatgtcatcagcaacattgaagaacagctttccggttcatgtaccacggagatcgcggcgtttgatgaatttaccgcgctgctgaccagtcatgaactgcgcgaaaaatatgatcatatcgtctttgatactgcaccaaccggacacaccatccgtatgcttgagctgccgggcgcctggagcgggtacctcgatgcacatcctgatgctgcggcgaacctcggccctctggtggggctggagaaacaacaggaccagtacgctgacgcagtgaaagccctctctgatacggcactcacgcgactggttctggttgcccgcgcacaggcgtcgaccctgaaagaggtctcccatacccacgaggagctgtcggctatcggtctgcagcatcagcaccttgccatcaatggcgtgctgcctccctttgccggtgaacaggatccgctggcgcacagtattctggcgcgggaggaacgggccttacgggccatgcctgaaaacctcgcgcatcttccccggtcgatgctgtatctgaagccttttaatctggttggtctggaagccctgagggcgctgtttacagagagcacacttgttctgccggatccgggagccacgctcacgacggtcgatttaccggagcttgcctccctggtggaggacctcagccgagcgggaaaagggctggtcatgacgatgggaaaagggggcgtggggaaaaccacggtggcggctgcggtcgcggtctcgctggccagacgcggtcataaagtccacctgaccacctccgatccggcagccacctgtcttacaccctggatggctcgctgccaggccttcaggtcagccgtatcgatccaaaagcagagactgagcgctatcgtcgctttgtgctggaaaatcagggaaaaggtctggatgaagagggactggcggtactggaggaagatctccgttccccctgcaccgaagagattgccgtgtttcaggcattctcccggatcatcaaagaggccaacgaccattttgtcattatag

SEQ ID NO: 268472 - DNA, 252 bp, Klebsiella pneumoniae
ttgttccataagatttttcatgaagccacttcctttgccattctgagcaagagctttaccaaagtgtcgggcttctacataggcttgtcggaagtcctcacttgttctcaaggctttaccctcaaacaaaatattaaattgatgtacttcctttgccaactcccgatcaggatgaacatctacacctatacggggcaaaagaccggcgttttcaagagttactcgtttgcgcaaaacgatgtggcgaattaa

SEQ ID NO: 268473 - DNA, 1065 bp, Klebsiella pneumoniae
atgaaagggataacgacatggatagtgctgggcagcctgctgctgtcaggctgcgaccagaaaagcatccacaaggacgcgccgatgaacccgctgaccgatattaatgcccgcctggcgtttacctgtaaacaccagattattcctgaggcgtctgcggatacagatgttctgtttaaatatgcccgctggctgcagaaaaataacctgattaatcgggataaaatggtggatgcggaaattgcgcgactgtatcgcatcgcggcggaaaacgggcattacaaagccagtattaatctgcagaacggtgcgctgcgcgggcgcttttcgctgagcagccatgaacgtctgcgcctgagtcagcaactgattgatgcgaaggtggccgccggctactactttattgccatctatctggagcacggtgcggcaggactggcgcaggacccggagatggcgctgcgttactatcgtaaggcggcagatgaagggaatcctcaggcgcaggcttttttaggcgaaaaactatttccggccaaaagagctcctcaggtagccatgcagatgtttcgatgcgctgccctacaaggtgagggaaaagcggctaattcgttagggaatatgcttgcaatttacaaaaaatatccggaggcagttgaggttttccaactgggcgttgcagcaggagattcaacctcagccggtttcctgatgcacggattttccggacctgaaccaacggacaggttgttctatctggcactggagaaagacccggagcgtgcccgtcgttatgagcagataggcgctgtgctggcgaaatactcatggacccatcctgtcgtcccggaaatcaacgatatcgtgccgctgcccccggcgccgctgccggaatgggacggtaagctgaagtggctggaggaatgggaggccaatatcccgccaccggaacctagtgcggcactgatagagaaactggcgaaagcgaagcagctgaatccggcgacgggcaggccgctgccgacgtcaccggactttgagaaggacagcgtggcggccccgtga

SEQ ID NO: 268474 - DNA, 282 bp, Klebsiella pneumoniae
atgaagcactgtaaaatcatcctgttagtaggccttctggccagttccgcttcggcattagcggagaagatcggcgtctcaatggcctacttcgatcaaaactttctcactattatccgccagtccattgagaaagaagctcaagcccgccacgtcgacgtacagtttgaagacgcccgcggcgacaccggacgccaggccgatcaggtgcagagctcatcgcctccggcgtggacgcgatcatcgtcgacccggtggactccgccagcaccccgcagctga

SEQ ID NO: 268475 - DNA, 684 bp, Klebsiella pneumoniae
gtggacgcgatcatcgtcgacccggtggactccgccagcaccccgcagctgacgaagatggcgcagcaggccaaaatgccgctggtgtatgtgaaccggacgccgggggataaaacgttaccgcccggcgtggtgtttgtcggttcggacgagcgggagtctggcacattgcagatggaggcgctggcgaagctggcaaactacaaaggcaacgtcgccatcatgatcggcaatctcaccgacgccggcgcgctgcagcgcaccaaagatgtggagcaggtggtggccaagtatccggcaatgaaagtggtgcagaaacagccggccaactattcccgcagcgagggaatggatctgatgcagaactggacgggcaacggagaagcgattgatattgtggcggcgaacaacgatgagatggcgattggcgcggcgatggcgctggagaaaagccagaagaagctgctgatcggcgggatcgacgccaccccggacgggctgaaagccctggccagcgataagattcaggtgacggttttccaggacgccgtcggccagggcaaaacggccttagcggtagcgctgaagctgattaaaggagaaaaggtcgagtctcatgtctggatcccgtttgagttagtgaccaaagaaaacatgcagacctatgtggaaaagagtcattaa

SEQ ID NO: 268476 - DNA, 846 bp, Klebsiella pneumoniae
atgtcgaacggattagctatcaatataccaacgtcatttaatcgtgtattaactgatctgagttttatccctgacgttcagcctgatgcgctggcgtatacaggattctacgggtctgatgcagcgagcagcattattaatgatactactggcggattgtcttccaaaatcctgctggtagaggtgcgcaacggagagcgtgttgcgtatggaaaagggtatttttctgttacaggtaccggctcggacacgtctggcggtacaggtgtacgcgctcaagtgaacttaactgaccttgaccgtgttggtttcccatcctctatcgtcactgcattccgcaatattgaaaaagtacgagaaactgtcactccgattcgtcgattatacccaattgcatcgttttattacaactcgacagtcacggaagggtccccgtttctcactatcgcggcaggaatcgcagatgacggcacgcattacatagcagcatattcaggatccatcgcgcccatcgcgtctgatgcagccgctcgcctctgttatgttgatgttgactggtcagctactgatagccttatcacagcgggtatttcacgcgcggcgaacggaacggttaatcttgcagtgatagttgatggcgtggtgaaaactgcaacatatgcattcccggtacaggaagatgtggctgtaagtagtgcatatgtcctattcggctcgcagaacaagcgcactttagactcaggtgagtttatgatggggcagtactggtacaataagacgctgacactgtcagaacttcaacagcaaatcaacatcacgcatctgaaggcctccgcacgtatttaa

SEQ ID NO: 268477 - DNA, 192 bp, Klebsiella pneumoniae
atggcaaatgaattgtcagatattcgaatcaggattgaggatgaggtttatagtcacaggattgattttccgaaactttcaacgaaaagtatcgatgctaaatatctatgtaataaaagcattgaagctaaaatcatcacatataccaatgagtcaaatgggaaaaaggaggtggtaaaaaatgaacagtaa

SEQ ID NO: 268478 - DNA, 540 bp, Klebsiella pneumoniae; identical to SEQ ID NO: 193898

SEQ ID NO: 268479 - DNA, 375 bp, Klebsiella pneumoniae
atggcgtcccgcctcaatctgctgcagcttggcgatgaagaggcgcactatctcggggttaatgtgcaggcgctgcagcgctggctgctgctgtgcagtgcggtgctggtggccgccgcggtggccatcagcggagtcatcggctttatcggcctggtggtgccgcacctgatgcgcctgtggctgggaccggaccatcgcggactgatccccggctcgctgctggccggcgcgatcctgcttctgctggccgacaccctggcccgcaccgtggcggcgccggcggagataccggtcggtctgctcaccagcctgctgggcgccccctggtttctgtggctggtctttcgtcgggagaactccagacatggttaa

SEQ ID NO: 268480 - DNA, 237 bp, Klebsiella pneumoniae
atgaggaagagaataagggcaggaggacgctgcccttggaaaagtggcaatcaggacattctattcgtacacaatatcaatattggccgtggcattaatattgccggcagtgacatcctgttaggaatcgctcttgagatcggcaataaagttaaatgcaatatcaccgttttcgtcggcttgcgaaaccgccgttttgctctgcttgtcaaaggtcagctgagtgccttccgttga

SEQ ID NO: 268481 - DNA, 213 bp, Klebsiella pneumoniae
atgggcggcatgtttttatgggcgaagtttaaatatgcgatggataccacgcaatggcttcagaaaacaatacgcaacggcgtggtgttcgtgcctggtgaatttttctactgcgaagaacctgatcattgcactctgcgaatgtcatatgtcagcaccacggaagagaatctgatagaagcggttaagcgcctgaaaatttcgcttaattaa

SEQ ID NO: 268482 - DNA, 231 bp, Klebsiella pneumoniae
atgaagcagggcggcgtgctggtcccgcgtaaacatcacctggtccgcacggcctacgagcttaacgacgagccatctacctatggcgatcacggcatccgtatttatggcatctggtccccgattgttgaggggcggatttgcacgcacgcgatgaagtggaaaatggtccgtaaggccgttgacgttcaggaggcgacagccgaccagagcgctgccggacctccatga

SEQ ID NO: 268483 - DNA, 2376 bp, Klebsiella pneumoniae
atgcaagatacaagaaaggtcatcaaagtgtttattgcatctcctggagatcttgtgagcgaaagaacaattgctcgtgagataggagaagagtttaattcattatgggctgagtcgacaggttatcaaatagaaattgtgggatgggaggaaacaattggtaaaatagggaggccacaggaggtaattaatagggatttatcacgctgcgaattatttattggaatgctatggaagcgttgggggacggcacctgatacttgtggaaagtttacttcaggttttgaagaggaattttctatatcattagaacgttataaaaaagaaaagatacctcagataagtatgttttttaaagaacttgataaggatttgcttagagatcccggtcctgatctccaaaaggtaataaaatttcaagaagggctcataaacggaaaggagatattatatgaaacatttatagatagtaaggattttgagagaaaaatacgcaggcggatctcggattatgtaaggaatctaacagtaatagatcgtgaaactaatcatccggaaaatagcaatgaatcaaatagtgtggatggcaatttcaaaagcgaaaatgacagccataattttttttcttcgagtacttcttctttcataaaagagtttatcagtaatttacagtgtgcaggtttagatgctgtttcgtctgagcgaattgcacttttcagattaatagctaatataataaactcccctttaaatgatgataatgttcttggtgttcatgactctaacttattatataaatgtgccaattcatttaccttggggcaagcagaagtcagtgggctgattttatctggaatagataattatgattctcataacacaccattatggaaatggattaatgaaagtaaagttagtatagaaaactataccttgcttactaaggatgagcgtaaaagaaaagctatagatataatgcgattcattgcacatgatattaagaaaaatagagaaatttatctgaatgactggttaattgatgagtccaatgaaaatgttaaagtctctgctttaaaatatattggagatgtcggcactttaaatgatattcctttaattataaaagaatatgagcgaaatgaggttagaactagttcttcagcaattgaagctataatatcaataagtttcaggcacggagtgataaaagggtttgatgcaatacttgagtatcaacctagtagtataagtagtaaaatgcttgatgctttaaaagagaaagaagtacttcttgaaagtgaaaggttatttgaagggctgaacgtcaaaaacaaggaggtaagggagttttgtatatcttcgttgatccgacgcagtgcgataaatgaaagtcaacttgaagagctattaaagcatgatgattatgatgttagatatattgtaattaatacactctcatctattaattataagttatatagagaaaaggcacgtgatgtattaacaaaaaacactggagaagataaagattctatatataaaaaatatgttaaacacaacctcttcagagaaagtaatgagaagctatttgatttgggtaaaacaccctatatatttgatgcgaatcatattatagccttggcaaaaaaagataataagaatataccgagggtgagagaaattgtttccgataatgcagaggtttttatttctgagttacttaacaatataccagaaaaaaatagggctgagattgtaaaattctttaatgaacacggaggttttgttaaagataatatcacatttgactgtgctgaacttatttgtgagaagattaaaaaagaggacttaaatttaattcgacgatatttgatgtctaaagggggggcacttagtaatgttataatgaacttttttaaaaagtatggagattttgatgatgtgtataatttatgtaatgcaaggatgaaggagagcgggacgctacttggtgctcaaagtatcgggcaatataataacaaaatacttgctgatactgttttgtttctctcaaaaggtaaggaaagtgagttgttagagattaacatgccagacatgctgaaaataaatattgtatctcaaatgaatccaaatggtttcaaagaaatccctcaccataagatattcgcgcttttaaataaagaaaatgctcttttgcgtgaaagagtttgtcttaaagttgttgaatcaatgacaaaagatcaaattagcatgatattgtctgattattcaaaacagattacatactattataatgttattcattggcttgattttggagttaattttaataaagcaatatcacgtaaggcaataaaaaaatatttatatgcataa

SEQ ID NO: 268484 - DNA, 882 bp, Klebsiella pneumoniae
atgatatatcaccgtgaaggtgatattatggatatttatgcaagtcatcctgaatgcaagcaagaaatacacaaacataattatcgctcgattcactatgttgtgccagcaacaaatattgaatctgttcaggtgtattgtgaaatacagacaagaactatttttgaggagggctggagcgaaatagaccatcaggtaagataccctgattactccgatgatgaaaacctaatgagctatttaaccatatttaataggttagcgggaagtgctgacgaaatgggcagctatgtgaatgaactcgtagagttaatcaaaaaaaataataaactagagagtgagcgggatttaaaagatcaagcgtttgactttgagaaagaaaggcttgaggctgaaattaaaagtctatctgccaatcaaagcaatttcgcagaaatgaagagcgcatatgataaactcatagaagttcagaatgaggaaatgaaaagtttaaaagaagaactaaaatctagatcagacgaaaaaataaaactgaataggcaaaaatcccctgtatcaaagattattagtcaaactgatacggttaaaacaaatgatagatatgagggaaccataaagatacaggtattaagaactaatgacttcgcatctttcgctggccatttcactccagcattagaatcaataccaaatgtaagtgttacaccagttgaaacaacagcaaagaatacaaagatatctgatttgagagttaacactggagtgggtaacacaagagattttaacgcccatgtttttaatgacaaattaaaatatatcgaggagggcgaatatttattttctttcgtggcaaatctaaacgaattaacctcaccgacttag

SEQ ID NO: 268485 - DNA, 417 bp, Klebsiella pneumoniae
atggaaataatagatcaggattcgatttttttacaggaatggggccttgattcagcattggttgaaaaaagtggtttatcagtagacactttaaggtctatagtacaagactacaaaagcaatcagctaacattgcttgatgaggctgagtatatcgcaaaaaaagtccaacgttgtgattctgtacattctgttcgttggcgtatcaaagatacttcccatcttttaaataaaatcatcagaaaactaacggaagatgaaccgtctgaaaagtacaaagaaataaactcaggtaactacaaatctataattactgatcttatcggtgtcagagcaatttatcttttcaaaagtgactggaaagacgttcacgagcatattttatcaagtggacaactaaaaaggacgaatcagtaa

SEQ ID NO: 268486 - DNA, 2118 bp, Klebsiella pneumoniae
ttgcctgcggttcggtatccgaatcggagtcggagtcactgtcggaatccgaatcgctgtcggagtcggagtcggagtccgaatcactgtcggagtccgaatcgctgtcagaatccgaatcgctgtcgctgtcggagtccgagtcgctgtcggagtccgaatcggagtcgctgtccgaatccgagtcggagtcggagtcggagtcgctgtccgaatccgaatcactgtcggagtccgaatcgctgtccgagtcagagtcgctgtcggaatccgagtcgctgtcggagtcggaatcgctgtcagagtccgaatcactgtcagaatccgaatcgctgtccgagtcagagtcgctgtcagagtcagagtctgagtcgctgtcggaatccgaatcgctgtcagagtcggagtcgctgtcagaatccgaatcactgtcagcatccgaatcgctgtcggagtcagagtcgctgtccgaatcggagtcgctgtccgaatcggagtcactgtccgagtcagagtcgctgtcggaatcggagtcgctgtccgaatccgagtcggagtcggagtcgctgtcggagtccgaatcactgtcggaatcggaatcgctgtcggagtccgaatcactgtcagaatccgaatcgctgtcagagtccgaatcactgtcagagtccgaatcactgtcggaatccgaatcgctgtcggaatccgaatcgctgtccgaatcggaatcgctgtcggagtccgaatcactgtcggaatcagagtcggagtcagaatcggagtcgctgtccgaatccgagtcggagtcggagtcgctgtccgaatccgaatcactgtcggagtccgaatcgctgtcagagtcggaatcactgtcagaatccgagtcactgtccgagtcagaatcgctgtcagaatcggagtcgctgtcagagtccgaatcactgtcggagtcggaatcgctgtcagaatccgagtcgctgtcagaatccgaatcgctgtcggaatccgaatcgctgtcggagtcagagtcactgtcagagtccgagtcgctgtccgagtcagagtcgctgtcggaatcagagtcgctgtcagaatccgagtcgctgtcagaatccgagtcgctgtcggaatccgaatcgctgtcagagtcggaatcactgtcggaatccgaatcactgtcggaatccgaatcgctgtccgaatcggagtcagagtcagagtcgctgtcggagtcgctgtccgaatccgagtcgctgtcggagtcggaatcgctgtcagaatccgagtcactgtcagaatccgaatcgctgtcggaatccgaatcactgtcggaatccgaatcgctgtcagaatccgaatcactgtcagaatccgagtcgctgtcggagtcggagtcgctgtcagaatcggagtcggagtcagagtcgctgtcggagtcagagtcgctgtccgaatcggagtcactgtcagaatccgaatcgctgtcagcatccgagtcactgtcagcatccgagtcgctgtcagaatccgagtcactgtcagaatccgagtcgctgtcagagtcggaatcactgtcagagtccgagtcgctgtccgagtccgaatcgctgtcagagtcggagtcgctgtcggagtcggaatcgctgtcagaatccgagtcgctgtcggagtccgaatcactgtcggagtccgaatcgctgtcagagtcagagtcggaatcgctgtccgagtccgaatcactgtcagagtcggaatcactgtcagagtcggagtcgctgtcggagtccgagtcgctgtcggagtccgagtcgctgtcggagtccgagtcgctgtcagagtcggaatcgctgtcagaatccgagtcgctgtccgagtctgtatcagaatcggcatcggcatcactttcgctgccgccagggtcggtatcgctgtctgagtcagaatccgaatcactatccgcatcagaatcagtatcatcgttcggagaatgcgacgaatgatctttatcggaagatcctgcaatcatcgcccctataccaagcaaagccgccccggccattacccatggagcaatgctgccaccagaactgcctgcagctaataatcctgagatatcactga

SEQ ID NO: 268487 - DNA, 204 bp, Klebsiella pneumoniae
atgatcctgggcatgtaccagaataagattaaccggtactttgccacagccctcatccataccaataagcatggtttgtacatcatgcgcgcgttttgcggcatctgcggcgtcctgcatcagcctatcaacgtcctgccacactccttttctggcggcttgcagcgcctgcaggctttgttgaataaatcgaacttttgctga

SEQ ID NO: 268488 - DNA, 165 bp, Klebsiella pneumoniae
atgaatactgatgcatcactgaagcgcttgcaaataagagtgcccccggcaatgcgtgagcctctgaaagagcattgtaagcagatagataaaagcccaagcctgattcttctctctcttcttaaaaactatttagagattgtcggagcttatgataatgaatga

SEQ ID NO: 268489 - DNA, 123 bp, Klebsiella pneumoniae
atgcacttaaagtttccccaaatcctgttcgatacaatggcaaaagaagctcacaacaaaggaaccagtgtagctgctttgattgtaaatctcctgatgcaacattataaactaaccaaataa

SEQ ID NO: 268490 - DNA, 324 bp, Klebsiella pneumoniae
atggagaaggccaagggcgacgcaggggcaagcccccgcaccccctacgcaacaatctatcctcatggctggaggccattcgtctatcttgagcaaaagcatccatcttttctgcgtaatatgtattatgtgtgcagctatgctgcgtctataggagttaagttaacaggagactctgcaatcaattcaatgataaaaataagaaaaggtattccctattatcctaaggctgcctataggctctctgagagcgttttagagggggtctttattggtactaatttcgccagtcattttgtatataaacttctccgtagcatctaa

SEQ ID NO: 268491 - DNA, 1923 bp, Klebsiella pneumoniae
atgcgtaaggtgaagattggtgagctaatcaattcgcttgtgaacgaggttgaggcaatcgacgcctcagatcgcccacaaggcgaaaaaacaaagaaaattaaagccgcagctataaaatataagaatgcattatttaatgataaaagaaagtttcgcggaaaaagcttagaaaaaaggatttcggctaatactttcaatgcctatatgagccgggcaaggaaaagatttgatgataaattacatcataactttgaaaaaaacgtaataaaattatccgagaagtatcccttatacaatgaggaattatcctcatggctttctatgcctgcggcatcaattcgacaaaatatgtcagctctgcaagccaagctaaaagaaataatgccattagcagaagatttatcaaatataaaaatcggtgcgaaaaacagcgatgcaaaattagccaaacttgccaataaatatccagaatggcaatttgctattagtgatttaagcagtgatgattggaagggtaagcgagattatctttataaactcttccagcaaggctcttcgcttctggaagatttaaacaatctgaaagtaaaccatgaggtcctctatcacttgcagcttagctctgcagagcgaacctccatccagcagcgctgggccaacatactcagcgagaaaaagcgcaacgtggttgtgattgactatccgcgctatatgcaggctatctacgatataatcaataaacctatatcttcgtttgatttaaccacccgtcgtggtatggcccctctagcgttcgcgcttgcggcgctatctggtcgacgaatgattgaaatcatgcttcagggtgaattttccgtcgcaggtaaatatacagtaacattcttaggacaagctaaaaaacgctcagaagataaaggtgtatcaagaaaaatatatactctttgcgacgctgatttatttgtcagtctggttaaccaacttcgctcctgccctgctgctgcggattttgatgaagtggttaaagggtatggggaaaatgatacccgctctgaaaatggtcgtattaacgctattctagcgacagcgtttaatccgtgggtaaaaactttcttaggcgatgaccgccgcgtttataaagatagccgcgctatttacgcccgcattgcctatgaaatgtttttccgcgttgatccacggtggaagaatgtcgatgaggacgttttcttcatggagatcctcggtcatgacgatgaaaacacccagctgcactataagcagtttaaattggcaaacttctccagaacctggcgcccacatgttggcgaggaaaatacccggctggcagcgctacaaaagctggatagcatgatgccagatttcgccaggggcgacgcaggggttcgtattcatgagaccgtgaagcagctggtggagcaggacccatcaataaaaattaccaacagcaccctgcgaccgtttaatttcagtaccaggctgatacctcgctatctggaatttgctgcggatgccttgggtcagttcgtcggagaaaatggccaatggcagctgaaggatgaggctccagcgataatcctgcctgatgaggaagttcttgaaccaatggttgacgccgatctcgatgacgaaacccaaaacgatgaaacgctggacgacgatgagatcgaggtagatgaaagtgaagccgtagagccggaggaaccggatgaaccggaagacgacgaagaggctgagaagacagagaagcatcctgcgaagccaaactttaaagcgccgagggataatggtgatggcaccttcaaggtggagtttgagttcgatggccgtcattatgcatggtccggtgccgccggcaatcggatagaggcaatgcaattcgcctggcatgcctacttcgaataa

SEQ ID NO: 268492 - DNA, 1134 bp, Klebsiella pneumoniae
atgcctgaagaaacattgactgtcgtaggtggtggtaataacagctgtaatgttagctggggtggtggcaatggtaacaacggtggtgctggctattctggtaaatacggtggtactagctatgaaggtgcaactagtatgttgaagttgaatgaccgtgttttaattcagctttatctttgcaatccgcttaacccagattatattggagcaccttggggcagtgataaagatgctgaatcaattatcagagctaacagagataaaccaggaaaattcaaggctaatattcagaactggaaaacaagcggtacaggttctttaggtagccctgtggttgggaaatcttatagctcaggtgatgtagatacttattcggttagcttcggaaaagaaaaatacaacgtcctgtataaccgtaaaaaagactcttttactacagcttatgtcgatggcggcgcaaataaacctgagcatagcatgaaggatcaggctattgccgttgttaaactttaccttctcaacgaaagtcaggcatctgtaatcgatactacatcgggaattattactgactctggtaaaactcttagcgggaaattaggtgataaatacaacactctggcgagagaagctgctgacaatataaaaaacttccagggtaagaaactccgcagttttaatgatgctatggcatctattaatgaactggctaacaatccaaagatgaagttaagtcaggcggataaaacagtcgtttctaatgccctcaaacaaatggatttgtcagcactagctgaccgattcaaagggttagagaaagcctttacttggggtgatcgacttcttaaagccgagaaaatcagagacggtgttgttactggtgttaccacaggggactggcaaaagctggcgtttgaggttgaagctatgtacctcagtggtgttgctggcgccgtagcgttagggattactactgccatgattagcacagtcgcagtcgctttgtcacttccatctgtagctgtctctgcgcttactgttgtggccgtcattggcatctctattctcacatcttatatcgatgctgataaggccaaagcactgaataatgcagtgcttggcttatttaaataa

SEQ ID NO: 268493 - DNA, 525 bp, Klebsiella pneumoniae
atggaagggaaggggctgttcaaatattcattaatttcattgctattagggataaccccaataataataatattttttattcatttcagcaatgaaagctcacacatcatttcatacctttttgatattgcaaatggatatcaaagggatttttcagaacaatatttagccgtgagcactatagcttctgcatatactaaaaccgcaccaattttcgtcatattaatgtatataatttgctggaacaagtttgatataaaaaccatcaaactcgatttgaagcgatggcttaaacttctgcctggtgtactccttttaacggcaggagcatactatttaacatatgtaggtgtggaaaatatgtctgatagtatgtatcgcattaaaagaattattgctggcaatgagtactttctattaatttactacattcttttatttctgactaattatttttttatttggttgcttttgatttatttatatcttttaaaaggtctgcctttttttcaaaagcggagataa

SEQ ID NO: 268494 - DNA, 297 bp, Klebsiella pneumoniae; identical to SEQ ID NO: 235373

SEQ ID NO: 268495 - DNA, 4005 bp, Klebsiella pneumoniae
atgaccttacaagaattctatgcggctcgcttcggtagcgatccgtattcattgcttgaagcagcgcgggatgagctgtcagagctggccacaatggctggcattaactgggcagcatgtgctgataacattcagttgaacccgcgcggcggggaagaacgttattcaaaatataacggtggcgcccccgaggctctggaaaagagcctcaaagggcgtgtggaaatctactcccgcaaggaacaacacaaaagcggcatcagctacccattcgtcaactttgtccagaaagggcatgacgaaggttcctggagcggcttctccttcctgttcgccgaataccgccgtgaacaacaaagaaatcatgcgaccgtggtcgcacaacctgatgaagaactggcgcgtattgaacgccaggcagaagcccgcaagcgccgcgccgaacagaaacggataaatgaacttaaaaacaatcagttagagcaagaacggttgctcggatggttggcgttccacagtgcatgggaacatgcgccagctgaggacgggtcgtggccttacgcagtgaaaaaaggcattcgtgacgtattcagcgcttgcgatattcgtcgcgtgaccagtcacgacaacgcaaaatggagccgtggaccgactacatacatggcgattccgctggcccacctggacggacgcaaagatggacaaattgtcggctggcagcgtatcgaccagcgcggcggtaaattccagaccagcgcgatcaccagtggtgatttcgtcggggcgtgctttgttatcggcaacctgaacggtgcgcaaaatattgcagtggtggaaggtttcgccaccggcgcgtccgtatggctggctacccgtaaggacccgaaaaaaagctttgatgctgtcgtggtcgctgtggccgcaaacaacatgatccatgttgttgaacagctggtgaacatgtacccggcagcaaaaattacctgcgccctggataacgaccgcaagtcatcggctgaaggtaaaggcaacaccggcttacgtaccggcttcgacattctcgcaaaatttagcggcatcaaatgcgtttatcccacctttgaagacgatccccagctggagtgcagcgacttcaacgacctgcacagattacgtggactccgcgagacctgtcgccagctattcgccaaagggaaccgcctgagtaacagcaccgatttgctgtctctgacgctaaacaagctgaaaacggctaaacgtgacaaccgccggacgtttgctaaagaactgctgaacgcggtggatattggcatgctgacctgcccggtaccgaatagcccggcggatctgtttaacatgttctgcatcgtgctgcgtgatatgggactggaaagcgtctatcgcgccacggttaaagaccacatcgcacgccgcctgaaccgcaaatgccgtactgcccaggctccccgttcctttagcgagcggatcaccgacccgaacaagcgtccccagcacatcacgtataaacgctttgaaacatccgtgatgacggatgaaattctgcaatacgtgcagcagctgcagggcatcgttattgttcgcgccggtatgggatcgggtaagtcgacaggcctgctgcgcccattgatgcataacgctgatcgcggcgtttccgttgcgcaccgcgtaagcctcatcggtggcctgtgggaaatgatgacagagcagaaagggaccaaggccgatattctgcattaccaggaccccggctatcaggaaatggcgccatacgcgaataagctgaccatttgcatcaactccatagtcaaaggctgctggcagccgctgatgcgccagcatgactatttcggctttgatgaggcaacgcagggacttcgcgccatcctttctggccgcgcaatggagaacccggtcgccgttttcaatacgctgatcgacgcgctggccagaactgaattgcaccccatcatggtagacgcagatgctaacgatctgctggtcgacctggcagaactggcgatgaagcgccgcgaagaaatgggcctgccggcatggttacagattcacgtcatcgagctgccggtcgacgttcgcaaccgtgaaacgggcgaacccatccgcgtcttctacaccgaaaaagaccgcatcatgaccgaggttatgaaagcggtagaactcggtgaaaaaatcatgctggcgaccgatagctcaactttcgcagaagacgttaccgccacgctgcgccagcgttacccggagaaaaaattcctctgcgtaaaccagaagagcaagccggaacccgaggttgaagaattcaccaataaaccgaagaagatggtgaagaagtacgacggcctgatttacagcccgtcgatatcctccggcgtctccatcgagcaaaagcatttcgaccgccatttcggcatgttctgcggtgaagtggtccccagcgatgctatccagatgctgcgccgcgaccgcacagccaaagagttcatcatcggctttgacaaggttcgcgcacgacgcgaaaccgatccgcaaaaaattgagcgtgcgtttgtccaggcattgctggccactgccggcatgaacggcgaactaaccgacattgttttcgacggcgaccgcatttctatgggtgtggccaacaccgattttacccggatgaaaatcaaggcagcagcgattgaggcctccgcgcgtaatgactacgccagcaatatgatctgcataatgcacagcgacggctacaaggttgcccccctggcatccgacgagctggcgaactgcgtcggcaaggagctgcgcaaggaagcccgcgaaattgtctgggaacaaacgctggatctccacctgaatatcgaaacgccgaacgaatctgaacgggaagccattctgaagaaacgcgccctgaccctggaagagcaggcgaagctggtccgctgggacatcgagcatgagctgaaactgccggtcaacgaggacaacctgaaattctacttcgatggcgcccgcgataaggttcgccgttatgaaaccatgctgctcgatgagatcaccgcgcggcgtttcgaccgcgaggaatccgcgatcaacttcacctacgctttcaggcaggcgggccaatggcaatactttaccgccaccgcgatgacccgcgagcaggctgatgaagcattccaggcgaaacaccctggcatcaccgagtacaaagtcaaatcgacacccgcggtcgaggtcggtatgcgcggcttctacggcctcaaatctacggtgctacgccagtacttcattgactgcggcatcgacccggaaaccatgaccggagaagccacccaggcgcgcctggcatacgccagggataaactcatgaccgccgaacggcgagacctgttaaacaacgtcctgcgcattggtggctttatgacgcccaaaggcaagccgaaggtccccgaggcactgtttaaaaccatctgcgagtcgctcggcctgaaaaccgacaagcgccgcgccagggacggagacaagcgcccgaccatacggtttgtggatcagcagtcggcggcgttcatgatggaaattctggagaaccgtaaagacgacggcctgtctctgcagttgcgtaaagccgagaaagccaccaccgaagtggatcacggtttagatctcaatatatatatggatcataaaacgcgatccacaaacgggcaggatttggacgcccctcattcagtaataactgaggcgctggccgaactgccggtgccggtgccggaggcctgggcgatgaccgcgctgtctgatgatgagctggccacaatgacctcctggtcgccagccagcatagcgatgaccttcgcgtccctgtacctcacagagttcatggaccgcctctccagcaacgaactgcgccggctgcgtgaatacatcaccggcacggttacgggcggctacgacgcgcaggaggcgttctatggctaa

SEQ ID NO: 268496 - DNA, 288 bp, Klebsiella pneumoniae; identical to SEQ ID NO: 180596

SEQ ID NO: 268497 - DNA, 312 bp, Klebsiella pneumoniae; identical to SEQ ID NO: 206991

SEQ ID NO: 268498 - DNA, 1062 bp, Klebsiella pneumoniae; identical to SEQ ID NO: 242897

SEQ ID NO: 268499 - DNA, 1260 bp, Klebsiella pneumoniae
atgtttatcccccaaatgttcagagggcgccagcaatcggggaatggcttctgggaagccatgctgggcggggttcgttcaagccagagcaaaactggcattataatcacgccggaaaccgctcttggactttcagcggtccgggcctgtgttaccctcctggcggagtccgtcgcgcagctgccgtgcgaactttaccggcgggataataatggcgggcgccagcgtgcgacggatcacccggtttatgacctgattcactcccagcctaacaggaaagacacctcattcgagtatttcgagcagcagcagggattgctggggctggagggaaattgctactcgatcatcgaacgggacgggaaaggctacccgaaagagctgatccccattaacccgaaaaaggtcattgtgctgaaagggccggacggtatgccgtattaccaactcccggaagtcggtgaaattctgccgatgcgcatgatgcaccatgtgaaggtcttttctctggatggctatataggcagttcccccattcagacgaacgccgatgttctggggctgaatctggcggttgaggagcatgcggccgcgacattccggcgcgggacaacgatgagcggggtgatagagcgtccgaaagaggctgcgaccattaaaagccaggatgctattgatcgcctgctggcgaaatggaccgagcgccattccggtattcacaatatgttctctgtggcattgctgcaggagggcatgagctacaaacaactatcgcaggataacgaaaaggcgcagctgctacagtcgcggcagtggggcgtggaagaggtctgccggctctataaaatcccgccacatatggtgcagatgctggcgaaagcgaccaacaacaacatcgagcaccagggcctgcagttcgtgatgtatacgctgctggcctggctgaaacgccatgagggtgcgctgcagcgcgatctgcttctgcccagcgaacgccgcgatttgtacatcgagttcaacgtttccgggctgctgcgaggcgaccagaagtcacgctatgaatcgtatgcgctgggccgccagtggggatggctatccactaacgatatccggcgtatggagaatctgccgccaattgctggcggggacaaatacctgacgccgctcaatatggtcgacagcgcgaagatccttcctagcgataagtcgccgacagcaaaacagctggccgaaatcgaaacccttctggccagagcctga

SEQ ID NO: 268500 - DNA, 921 bp, Klebsiella pneumoniae
atgacaacgaaattaattaacctgccgcacctggcagatatggtctttggcgtgccgcattacgtgacgcggcaaacaatggactccgtgaaagcggtgctcatcccccgtattcaggggatcaccgaagatgccgtcattcagatggcgttgaatccgggtaaatcacctgctgctgagcaggtccagcccaccggcggggtggccgtgatccccgttcacggcattcttgttccacgccgggggcagattacggcgatgtgctccgagctgaccagctacgagcggatccgcgggcagctgcaggcggcgttaaacgacccctcaatcagcgaaatcgttctggatattaactccggcggcggcgcagcggtggggtgcaaggagctggccgattacatttatcagtctcgcgacacgaaacccatcacggcgattgtgaactacagcgcgtattccgccgcgtatttcatcgcatcggcctgcagcaaaatcatcgtcagccagaccagtggcgtggggtcgattggtgtgatcatggagcacctcgatacgtcgaagatggaagaaaaaatggggctgacgttcaccaccatttaccggggagataacaaaaataacggcacccaacatgaaccactgagtgaagagtcgctgggtatgttccagggcatgatcgacgaaatgtacgagacgtttacggggtcggtggccgaatatcgcggcctgaagcagcaggccgtcattgatacgcaggcggggctgtattttggccctggcgctgtgtctgccggcctggcggatgaagtctctgacccccaggcggcgatcaatgctatcgcggcaaagtatcagcaaccccgtcaaaaaacctccattcagatgcaggcagccgcgatggacctgcaaaccaaaatgtaa

SEQ ID NO: 268501 - DNA, 966 bp, Klebsiella pneumoniae
gtgaaacagcgctctattttaaaaaatgcccccaacatcgacagcattatgagcaagacgcaccaggcgcccgcatcacagcctgtgtcaccgatggtgggtgatttgcaacgccagcttagttcattatcgggaaacagtattatgctgcctgtgtgtggacgtaacgttaactttaagctggaaactatcccagcggataaagttgaaatggcgacgatggtttggctcggtaatgaacgtgatcaagacctgctcaacgaaacgtccttagccgatctcgttccgtcattcctcacttcggggcagcagaacccggcgttcgctcgcaaaactgcaggcatcatagaggttgctgatggttctcggcgccgaaaaacagccatcattacaggttgcgattatcgcgtattagtcggtgatctcgatgacgaacaaatgcagtggctctctcaaatcggcaacgattatcgaccaacaagcgcatatgagcgggggaaaaaatatcagcgccgcctgaaagattttgacggcagcgtaaaagctttagctgaagcagaaggggtggaccgcaatatcataacccgctgcatcaacacagctggcctgcctaaagatatcatcgccatttttcaacatcctggtgagctatcagcccgtgcggggcatgacttgttcaagatatatcagggaaacgagaaagctatgctcgatgcggcgcagcagctgctacgcatgaagaagcagggtgaaaagttcgaacctatgcggatcatccaggcattacaggattttattaagaccaatgcaaaagatacacaaaagaccgaaaaagcatatggtgaaggggttgttgcgaaatataacggtaactacgttaccttaaaatttgataaccggaagataccatccagcttaatgaaaaaaattgaggcgttgcttgagtcagagttagaaaaaaaataa

SEQ ID NO: 268502 - DNA, 1500 bp, Klebsiella pneumoniae
atggcgatgtatgaagtcggcaccgtcacgggtgcagcgtcgcaggcacgggtgacaggtgcgacaacaaaatggtcacaggtggcgctggggatactgcccgggtcgattctggtggtctaccgcagcggtagtgctgacctgtatgcgatcaaatccgtggacagcgacacgcaactgacgctgaccaggaatatcaccaccgcattttccggtgccagttacggcattattaccgctgaaaccgccagcacctcgtcgtttgctaaccagctggccagcgcgtttgcattctggcgtagtgtagtagagggctggtcgatggccctgaccggcagcggcaatattaccctgactgacccgatcacaggaaagcaggtgaccgtgccggcgatagccgggatggcgaaagcatcggatcttaacgcgctggcaaaactcaccggaggaaacaaactcgacggctcgcaggttataaccagcgataatgccggttttattctcggtaagaattcagatctggctctgctcaaaaaacaggggcaaggcgggacaattgccgttggctcgggaacaccgtttagggttcagcgttcaagagcgaccactgtatcaccggcagacacctttgatgacattctcgttattgatgccaacaaccgaacgacactacctggcgcgctgactgccggcggcgacatcgacaacacgacgaaggggttgctgtatacccaggcgattgagctgtcatttagcacgccatacatcgactttcattttaactacagcaccgacgacttcaccgggcggattatggccactgccgccgatcaaattagtgtacaaggtagtcattggcgagttgacagggatcttcgtgttggtggtatggcagatattgcagggtgggcgcaatgcggagtcgacctctcggccaacaggacagactttggttcccctgctattggttcgttggtttcaggcggacgtattcgatccagaatgctgggacgcggcggtaacggtgacacctacggagcgtggggtggtttctaccttgaagaatacgttgggtacaaccaccgggtggtactgtatatggacggttttgacagaaaagatgcctggctcttttacaccggtgggacaatctccacccctaaaggcgatgttatgaccactggctcagacgtgcggctgaaaaaggattttacggaatcccaggaaggggcctccaggcgtattaacgcgctgggggtatgtgagttcaacatgaaaggcgaaacacgccgtaggcgtggatttattgctcaacaagctgaaaaagttgacccgatttacacctttcaaagcggcgatgtagaagttgatggcgagaagatcaatatcctcaacgtagatcagacagcaattgtcgcagacctggttacggtggcgcagggtttactggttaaaaatcaggaactggaaaggcgtatatctgtactggaggggatctga

SEQ ID NO: 268503 - DNA, 288 bp, Klebsiella pneumoniae
atggctgcgaaaaataaagcagtggagccggaagaaacggtcgtacaggacaaccatgcgactgagaccgcacaggataaccatgcgaccgtggtcgcacaggcagaacgtaaatccgttgtgttcctcggtccgcatagccgttattcccgtggtgatatcgcgtggtttgaaggagcgcacgccgaagagctggttaagcgccgtatcgcggtatggccgaaggatgccgaacgcgcgctgaaaccgaagccgggagacagcgattttgatactgacattggatga

SEQ ID NO: 268504 - DNA, 138 bp, Klebsiella pneumoniae
atgatgatggtgatgctcatcgatggcgccatcgccgcccagcaggccgagtccgccgaatgccgggagatcccgccagggatgaccgcctggagcgcggccaaagcgcttatttactcagaaggcggtacgctgtga

SEQ ID NO: 268505 - DNA, 549 bp, Klebsiella pneumoniae
atgaaatttactaccctcaataatggcgttcagatgcctatactcggatttggcgtctatcagatgcaggacttgaaagaatgtcaggaagccgttcttggtgctcttcagacgggttatcgtcttattgatactgctgctgcttatgagaatgaaaccgccgttggcgcggccattcagcaaagcgggatcgcgcgagatgaattgtttatcactaccaaattatgggtacaggacgcgggttatgaaaaagcccgcagcgcgttcctgcgagcacttgatcgtcttaagctggattatctggatttataccttatccatcagccttactctgatgtacacggtgcatggcgcgccatggaagagttatatgatgaaggcctgatcaaggctatcggcgtgagtaattttgctccggaccgattgaccgatttggcaacgtttaatcgtattacgccagctgtcaatcagattgaaatgcaccctttcttgcagcagggacaaaacgttgagttcatgcagagtatgaacgtgcaggggctttgttga

SEQ ID NO: 268506 - DNA, 453 bp, Klebsiella pneumoniae
atgagaaagacatgcataaacataaatggaaatagaattcaagatgttacaccagactcattttccttctctgatgaggatttcggtgcttgcgccgcctataacactgttaaagcatctgattattacaacgttgtaacattagtccacaatggagctgctatcgggtactgctcttacaagtttggtggctccaatgaggattcagagaatatatttattacgatgaatattgattccgtttttatcacccaagcttaccgtggcaatggatactctaattttttagcgtcctatgtagcatttgactttgttaactacgtcaaagatatgactatcggcaataaaccttatgattatcgcggtcttagccatttcatcagcgatgacggaataaacttttatgagcgcgtgctacagatagcttatggggaaagaccgctccacttttaa

SEQ ID NO: 268507 - DNA, 195 bp, Klebsiella pneumoniae
atgaaacgatcacctgaatacgcccagggtgcattggccgccctgcgtgaggcaaaggccgtcagcattaaaaacgcggcagcggtaggaactcttgaaggtgtagccatcggtcgtctgatgatccagatggcaatactgaccttcgatccactcatcgccaaatacaccgtgatggaggcgaaccgtgattaa

SEQ ID NO: 268508 - DNA, 393 bp, Klebsiella pneumoniae
atgaaactagacgattttccacccttcactgatcgtgaacttacccctaccgaacatgaacatacgaaaattttgcagcaaattacaccggaactatttacgtcattcctgacagaaaagaatgtaagacagccctgcctttcatgcgggcgtcagcagttatttgttccccatacgacgatccataaaatagatcccgatttgccagagcatactgatgctgatgattggacatacgtcacccccaccttcaagcaagacgacatgatcagcctgtatgatgctcggtatgaagtgacatgttctcactgcggttttacctccatctatgcagcttactatgtggcaaaatgggctaaggaaaagggtcacattactgcggggatgttctaa

SEQ ID NO: 268509 - DNA, 1002 bp, Klebsiella pneumoniae
atgcaatcaaactccgataagtgtattttttgtgatgtttcctttgataaaggtagtttggagcatgtattccctagtgcgctaggtggaaggattacgacaacacatgcgacatgcgaaaattgtaataatgtattttcagaggctagctcagatgcggttgagatcgctctggctgataactttctttatatcagaaatgctttaaacgtttggtctggaagaggaaacccaccaccaacaataaaggaagccggtcagtttgatgatggaattatgtatgatctcgcgccaaatctgacacctatagtatctcggtcaagaatcccctcaaaagaagaaactcataataaaacagtctttgatttcgttgctcaggatataaatgatgctaatagaattgttggtgttcttaagcaacgtggcgttaatatagaaaatgttaatgcaaaatatgttacaactaaggctccagttataaaagcttcaattcagtttgaagggaataaaatttttcgtgccatagcaaaaatagcagtcgtttcttatgttgttttgtatggtaatttaagagccagaacagatatttatcagacccttagagaatcgattctaaaaggggttcctgacattacaaggtattgcggctgggattatacaaatgacttcccagccattaaaagtttaaacccacacaaaagaactccagatgccattcaatgtggatttgaacattcagtatttatcacgaacattaatcaccaattagttgcttatataaagctctttggtaaatttaatttctctattattttaggaaatcattcgaatataacacctaaatgcttgtgtttgaaccctacctcaggtaaatcttcaaggtttcacatcgcatttactccaccaataagttacatacctaaacatattaactcattcaaaattgagcataaactagtttgggaaaaggtacaactagggaaggtgcgaacaagttcctga

SEQ ID NO: 268510 - DNA, 366 bp, Klebsiella pneumoniae
ttggcatatgcacgtcaaaatgtagtatttgaggaaacaatagaaattggatttaacagcagaacaaaaaaagtcaaaatccccaaaaagttaaaacctctaaaaataatcaaactctacgaagaatcttcaccactgacacctgacgaacaatcaataattaactctatgaatggtgtcaaatggaaaccccgtcagaggtataccggattcaagttcaatagagaaccgctcaaatttgaatgtttatttgataatataaatgagtatgagggctggcttgagtttaaccgattggaaaatgaacagtaccagggatatgatgtcgattttatggacgttgggaacaacggcatctctgattaa

SEQ ID NO: 268511 - DNA, 417 bp, Klebsiella pneumoniae
atgaacaaaaacgaaccaccatttctggcaattgattaccgcatcctggcattagatattaaaacagacgtcaacgaaaaaaccatcgatagcagcaccattcttaaactcaaactagtctattcctatctcctggggttctccaaaacttgcagcgaggtttatccagaacaggcaaaaataggtaaaacattgggtatcggttctcggcaggttgttgggagattaatttcgttacttgagtctctgggatggatttcaaaaacatcgagaactggaacatccaatctatacaaggtgaaaaccgtcgagcaaattttagaaggtattccgcgcgaggttgtagaagaggaaaagaaatatcctgaatcaatcccagatatagtattaattgaagatgatggtttaccgtggtaa

SEQ ID NO: 268512 - DNA, 3708 bp, Klebsiella pneumoniae
atggcgactatttccgaacaacctgtatgggaagatgatgtttacctgattgcccgtggcgaccgggtggagggcgggcgggatggcgtcgcaaaccgccaggcgtctcagttgtctaaccggacggcgtttctgcgtgagcagataaagagcctgattgatgacggggtgatgttttcccgcgattaccggaaagaaatcatcacgctcacccgccacggtcaggcgattatcaaggatgattttctctactatctcagggacagcgccccgctgccgtatgtgacgaccggcaccacggatgcatcatgggcggtggactccccgtttttcacctcagtcagcgacccgaacctgcgtaaaaatctgggctctgagggtggttcgcagctgattttcggcctcggcaatatcattggcaccacctcgcaaattctctcttccactgatacgcctgacgcttaccagtctaacggcttctatgcgcagaacgacggcggtgagggcgtatggcgatttaccgggaaaacagccccggccagggcggggacgcacgtaataacccagggcaaggtttataacgcgaaggggaatgagtatgcgctggaaatatgccggggctctatcatcgttctggcaaacggcgcgaaggcgtacacctatgatgagtgtacagaccagacaacggatgattttgtgtgcctgggacaggccagcaacggcattctttcccgtctgacgcttggggtgtccacaggaaataacgtagcgacctatgatggcggcgctcgtctggacctcatttatccaaccaatatgtaccgcatcggtaaagagcctattaagggctattccggggtcaattatcgctttggctcctcttatctcatggtttatgccggtaagtcttacacttatgctgtgaccgggaagcgcctcgacggctggcggcatggtgtaccggagattgaggaaaaatggcgggcggttaacaaacaggagtactgggggtcgctgagtcttcagaactgtcatatatacggcggcacatgggacggcgaccacaccatccgaaaaatgccggaacagtgctctgccggagtggcgattctggcgctgaacccggaaggctttttcacccacggtgtcaccatcaaaagcacctttaactgggcgcaggttgaaatgcccgcgatgctggagccgacaaaattcaatcgtgacggccacgcctttgataacaacgagctggattatgagtacatcaccagcgcgattgcggcatcgggagcgacccgccgtgccggcaactttaaccgtgtcgtacacgatggcagtaagtttgaaggcgggcgtcgcggtacgtaccgtaacgcctgtgactggacctcgctctataatactgaagtgactatgcgccaggcgtggcgcagtgcgaataacgtttccgggacgctgccggagtatatcgcggtgatgaccggtaccgggctgcacgtttctggcggatactgggggcctgcggccgcaaaagactacaacgcgaaaaatggcgtggtgtacggtaccgcccagaaccatgtgttcactggcgtgtataacgagtggacgtacaacttttacactgtctcccgctggggctttatcggtaaagccagccgcctgctgggcctgcattttgactgcgtcagcatgtacaaagacaacttcaccgaatacagcaacgtgcgctttgaagggggctgtttcccgtcggtcgatgatggcggcaatgctaaatatcatgatgatttctggcattacgacacccccaacggcgtatccacctttatctggggcaacccggtgcgtgacctcggggctttccggcatacaggctttgatttcaggtacggcacgaacaatatgtatatccctgccggaaccgactgggattcaattcgtaaccgcccctacgcaaaagagatgttcaacccgaacgggttacagttaaatgccgggccagcgatggcaccctggcagcagccgtccatcaagtcggaaatctgcatctggataaaggaccataccgggaatttcaacccgagaaatatttacgcatgggtgaccgccgccagccaggacggcccgaacgcggatgaagcgttgtacaagtcgtttgcagagccgtttattgatttcggtaacggctacaggatgctgaaaatcaccaacaagcggctaacggcatgggacgggctttacacctacgcgcgaaacaccggtatttattttgatgttccggcagacggcagcacgcccatcacgattaaagcgattgaggcctatacgggcggggtgccgatgttcccgaccggctgcggcaactacatcccggaggcaaacggtaattcagtattaagcccggccaccaaccctgtggggctggatagctccctgggtggggggctgtttttccccggtgatattatcggcccgtggtcgcatgtgcggcgtacgcaaagtggttacatcatctccccgacgctgacccctggatatacgctcgatcggaaaatggtgacgggcggctgcacgctggaagctgcgtttaaggtggcattcagtgcgaccgttgaaacagttaacagcaacggcaccactatcatcaccgtgccagcggcattcctgccatatatcgccgtgggaataccgctgtatatcaccggtggttcatcaaccagcgtgaccgggcaggtgcagctgattaaacgtctgctgaacagcgacggcacatcatcgccgcgttatctggtgcagggtaccgtcggagctgtgggtgacacgctgaccatcgatcaggcgaaagtcccggcgtacacgttctacaatgaccgcaatttcaatgcggttaccgcgaactcagtgaccgttaacggggtatcggttgccacagcgcaccgctccaccgtctcaatggggattggatacagcggcgcgtcgggtgttaaggcagcagaatggtatttcaacggcggcatcacgccatcgcacaggctggttgcatcatcagcatccgggatgaccctggaggcgggcggtaatttttcagtggtcggaaatacgttccccgctgccgatggcacctattcgctgggcaccccatccggtcgctggtcacaggtttttgcatcgaacagcgttatcgggacgtcagacgagacacataaaacccgcccccgggcagacaccccggcggaaaccgacgcctattatgaaatcgggcagctccccggcgtctggcagtggctggaaaaatatatggtcgaaggggatgacgcccgcctgcactccgggccgaccgtacaggcggcgattgccgtgatggataagtacggtctggactggcgggaatattccgcattctgctatgacgagtgggacgcacaggatgcgattatcgagacctgggatgacgagtgggaggtgatacccggtaccccagccgaactggatgaagccggaaacgttcttgttgaggcggtaccggaaacgcgcaccctcatcagagcggcggggagcaatgttatccaggaggcgcgagaagccgggagcgtctacgcatttcgcaaggaggaactgctcttctggatttcccgcgcgaccatcgcaaagcagcaggccctgcatgaccggctgacagcgcttgaaatgaaactggcgtcctga

SEQ ID NO: 268513 - DNA, 1068 bp, Klebsiella pneumoniae
atgaaaataataactctttataaccataagggtggcgtctcaaaaacgacaacaacttttaatctttgcaattatatctcaggcactggtaagaaagttttaatggttgatgctgatccccagtgtaatttaactgagattgctatggcaacggtgattaagcaacttgatgagcaatcagagaaagagaacttaatcaaagatttaccaggaagtaacatccttgaagttcttaaccaaagaataaaaggggattctgcttttattgatttagagaaagttgaagtatgtcaggttgctgaacatcttgatttaattagggggtcagttgatctgtcctcgatagaagatgacttagctgaagctcatgtacaaagaatgagtaaccgtacaaacctcatgagaacatacgtagctataggtgatttcttggaaaggctcgcaaccaagaatacttatgattatgtatttattgatgtgggtcctagttctggagcactaactagagcatttttcttggcatgtgatggattttttatacccgttgctcccgaccggtttaatgttcaggctatttctacccttagtcatattatagatagatggactagagaccatcaacaagcaatagaagcatataaggaattaggatttccaattcgggaaggtaatccttcatttttggggtgtatagtgcaagcattcaaaaaatattctggagttgctaaacctggctatcagatgtggatggatcgtatacctgttgaaattgatgaaaaaataaaaccgttaatcggtgatgaaaagtatctgcctcaattagatgataagtctaaagagcatacaatcattattgaaatccctgatttcaatcagttagctccactaatgcaggaagttggtaaagccgtatttaacatccaacaacaagatacagctttgattactaaaagtggggagccgtggagaggtaataactggtcaggagctttagaaaggattaacacctatcgggggctttttaaaaaagcagcggattctatttttgaatttgaaaggaggaaataa

SEQ ID NO: 268514 - DNA, 234 bp, Klebsiella pneumoniae; identical to SEQ ID NO: 202587

SEQ ID NO: 268515 - DNA, 546 bp, Klebsiella pneumoniae
atgaagaaaaatttcacaattgaaattaggcgttatctaataaatcgctttattgatattgcaatggaacaaaaactgactaagtacaactatgcacaacggttacaaagcgacaaatttgaaataatgggatgtgacccactcgataatcctgtaactcattttgaaaagcaggttgtacaagcatgctcatttaggattaagacatcacttgaactagctattacccttaaggtaataaaagacgaactacatccagtggtgttgtatggcgatcacacttggatgcacttgtacggcgtgacgcgtttcgggcgtttttatcgaaagtcacctaagttactacaatcctgtatcattgcgttaacattacaaagccagaaactaatcaaaaccactactaaatataaatggctagcaggccttgtaagcttctttatgcttgcggcaaaggtatggcaatccggagctatcgataaagcttggatcggcattagcgctgcatctggcttattttttttgtggttactatcatttttccgatag

SEQ ID NO: 268516 - DNA, 507 bp, Klebsiella pneumoniae
atgattgactctgaagaacttcggaactttttaggaagttctatgcgtttacctcagtgtgttattaacgagttttgtaaactgagtttcgcgtatgcttttgctgaacaaaagttttggaaaggaaatgctgaaaacagtaaggtttgtgattacgctgatgattttattagaaacactaatatcgatccatcaccttggtttaatgattttaaaaccagatatgtaatggagcctgagggattgcatcgtctccaaaagttggcgaatagaagaaaccatcaatctatgggagttaatgagagaagaattttatctcttctacaaatgacaaaccctacctccaaccaaaaggttgaagctatacttcgtatagtgtttcgcctacgaaataatgctttacatggaaacaagtcaccgtatcttaatgatgaggaccaagcaagagtgatgggagtggctaacagcttcctttcaaactatctgtgctctcgtgcagatgactaa

SEQ ID NO: 268517 - DNA, 645 bp, Klebsiella pneumoniae
gtgaatccatggggccctataattgctgcaatgatagcgggttttatagcttttattggaatgataattacgaaggaaaataaggtttcagaattcaggcaggcatggataaatgaatttagagaagagatttcatatttgatagaggcatataaaaaatgggcctttaacaatgctctttataaaattcatattgagagtgctcaaacaaaaattgaaagtgagtcgttggttaaagcctacagagataaagctcagtggtatgatcaaatcttgctagatgcaataaatgaaatggagagatataaggggagaataaagttaagattgaactcggatgtcagtcgaagaaaaatacctgaaaatattctcaatgatttacttgatagccttaataatacacaggatttgacacttgcggataaactagctaaagatatttattttaactcttcactaatcttgagtgccgagtggaaagtagtaaagagaggggaggagtcttatgttaaagcaaaaaaactactcatatatttggctgtttttttaagtataattgcagttgttggattttcttttcatcttgaggaggtaatgagatggataatgaataatccgctccccctaataaagaatagtaattaa

SEQ ID NO: 268518 - DNA, 2115 bp, Klebsiella pneumoniae
atgaatcttcaggatgcctcaggtgcattgcgtaaagcattattcagggtttcacgagtacttgtaagcattattcctggccgcaggctatctgtttttggctcaggttccgacatgattagcttaattttggttgtgaatcttgatcgacaaccgaaaagatggcaacgtttaattcgtgaacttaagcggttccgaactactgatggttccccgttgacctctattacgcagcgattaccggcagtggatgctagggatggccgcgcgattgcggcaacagctgacgtcgacacaatctataacattggcgatcagctttacgtccagccagactttagattagcagctcatttcaaagttgatgagcccattaaaatgacgaggcaggaaattgcggttgctaggtcgcatattgaggtatggaaggctgtagcgactgggaatgataaatatgttcttgtccttgaagatgacgtgtggtttaagttgggagctgcggtagctataacacggggttggcaagccgctattcgacgttgttccactaaaggcggtccacatttattatatctttcttatgaagatgcgggaggaacagcggaacgcgttgactgctgtgaggatcttttcagacctgtaagaggattatggtttctttctggttatgtgttgtcacgagatggtgctgaggcactgctgcgagcaatgcccgtgattggtcctgtcgatctatggatgaactatcgttttcacgaactcggagctcttgcactttcttcaccagttattcagcagcgacaggatagtggttctgataactcttattcaatacttccttacttggctcgtgcagggatcattgatgctggctcaggcttgatggctccagatttacctaacaccggcccagtactggtgtgggtttctgaaggcgaaagagaaggtctagcaatggctttagctatgctagggttacgtgtacgaatattcgacgccaatgatgaagttattcaagaacatgaccttctaaatcttttcgaaatatttgatgccctgattaatcctcgcctaacaccttgcgctttaaatattgtctattcacggatggatattaaatttatatcggaaatgaaaaccacaaagatatttaatcttgaagtcaagcgtttgccatcttcacggatattaattttattggataatgagtcagattttcaaatgtgggagccactttgcttattcctcaacttaccaaaacccgctcaaaattttccaaatagagctacgagtaaatcgaggctttttcgagctgatcgaccaattagcgtaggtcgctcagggcagaattcgacgcgaaagggttggtcattagacatctcaccttgggtgcttccaccccaatgtaactgggaaccatccctcccttctggtcgaccagcgccgcctgccgggagatgccgggttttttcggaaatggtatcggctacaccatctttctttggactcgttgagacctttcctgggaatatggcttcatttactcaaaaaggtctcgtttacaaggcggacggggctcatcttattataaacaaaaagcctatcggtagtaggccctacagttcaggggcattcgtatcggcccagtcttttgaatatgggcggttcgtagcggagataaaggcagctcgtggttcaggcttagttaccggtttctttcttcatcgagactcaccaagacaggaaattgatgtggagatatctggtgacgatcctaattctatgttagtaaatgtttatttcaaccccggtgatgatggggcgaccttaggttttggttatagaggctctcctcaccgcgtggagctcggttttgatgccacgttggaattccatcgctatacaatcgactggcgaccagggcgaattgtttggtctgtggacgaccggatcgtccacgaacgagtaagttgggatccaacaccgataccgcatctacctatgcgtctacatgctaacctttgggcccctcgttccgaagaacttgcagggcgaatcaatgatgatgctttgcctgcaacagcaaccttcaagagggtgtcagtgtgggaatga

SEQ ID NO: 268519 - DNA, 870 bp, Klebsiella pneumoniae
atgatatctaatgaagaaccgtcttacagtaaaaatatacactcatatttcattggcttcgaggaggatgaacaattacggtcctccttcatccgagagcttacaatacatcaaattgatcatccaattacattgggtctcagtgaggaaacactatcaccccttatccctaaaaaattgattcagtactggcatgaccaacacgatatacctgaagatgtgaaggtttgccttgatagttggggtcgacttcgtgatgaaggtttcgaaatcagtatatttaacgatgagacggcagccacatatattgcggatcggtttggtgcgaacgaatgcagggctttcgcactttgcaaacatcccgcaatgcgctgtgattacctacggatgtgtattttgtttttggaaggaggtctttacgtcgatgcagatgatgtattgcttggtaataaatggaaatatattttccgcgatggattactcaaggtacaaccattatgctacgacattccatctcattctatggtatcagcgtctgagatttggcgagcagaactgtcgacagataagagaattttttatgttaataatgatccaattgcagctcctgcaggtcatccaattttgcggattgcacttactcatgcgactgagaaattgcttaatcaggaccacatccctgagatccaatcgacaaccggaccagggaacttcactgctgctttggcagcacatgcgaataatttgataacacaaggagtccccttagattttgaatttttacgaaattgggaaactatcgctgaaacgcgctgggatctatcctaccgtaatgatgaacgtaactggcgtaacattcacttagcatga

SEQ ID NO: 268520 - DNA, 1608 bp, Klebsiella pneumoniae
atgagaattatctcttataaccctggtcatgacggtgctgtagcattccttgacgatggtcgtttgatcatgtctatcgaagcagaaaaagattccaataatcgatattctccggtcggtatcgcagatgtattagatgctattggtgaacttgaagatatacctgacgttatttgtgctggtggatggtggcctagagatcatcatgaatatttatatggttctaaagttaacgtcggttaccgtggcatatcaaatgatgatgtaattataagtcaaagaaagtttttaaaaaaacaagttcaatatttttcatcttctcatgaaagagcacatatactttgcgcattcggaatgtcagagtatccaaaaggcacgccatgctatgctttagtgtgggaaggggcaattggtgcgttctacgaaatagactcggaactgaatatcacacttattgctgatgttctaaatcaaccagggaatcgttatgctctgatttacggcctagccgacccttcttttcccaaggatggggtttatccgagattctctgacgcagggaaacttatggctttggcatcgttttcgagtcgaaaagtaccgaatcaagaagaaaagaaactccttaattttctcttggatggtccattcaaaccattgagtgaatatgatgatattgagcaagctccatattttaatgttgggttagaagataaggagtttaggaattttgcaggtatttacagtgacgcaatttttgatattttctatcagttcgcaaaaaataatttaaataaagaacaaccccttattattgccggtggatgtggtctgaattgtgattggaataccaagtggaaagaaacgaatctttttacagatgtcttcgttcctcctgttgctaatgattctggagtagctataggtacggctattgatgctcaatttcattttacaggcaatccgaaaattgaatgggatgtttatagtggcctaaattttgttgtggataagccattcaactctgagaaatatgatatctgtagtattgataatgagcaagttgccgacatgctggctaacgatctcattcttggatgggtgagtgggagatacgaaattgggccgcgtgctcttggcaatagatctgttcttgccgcaccgtttcaagatagtaccagagttcgtttgaacgaaattaaacaacgcgaacaatttcgtcctatagctccagtttgtcttttggaggatgctgaaaaatggttcgggtgtagccacgaaagtccatacatgctctatacacatgttgccagaacagaagcactaaaagctgtcacacatattaatggcactgcgcgtatacaaactgttacatctgtaacgaataaaagccttcacgacctacttgttgcatttaaatctcggacagggtatggcattttatgtaatacttctcttaactttaatggaaaaggctttattaacaatatcacagatcttgataaatatgtgtgcgaacatggcttagatggcttcattgttgaaggtcaagcatttcttcttatcgattccccaagatatcaggcatataaaaatttaaaatattaa

SEQ ID NO: 268521 - DNA, 591 bp, Klebsiella pneumoniae
atgtcaaatatacacaacagcaaagactatgcccaaatgttgctccgtaatgtagaacgtttaaaaaatgaaaaagaggctcagcaaaataaaagagaagaattatcaaagatatttaacactctaaatgaaattatttcagataccatctctgaaaacgggttaactgaattcattagtctcaaccgccacaaaggccaggtggaaatgtcagccatcccttatcagagcagcccgaaatttaagctggaggttgactattataaagcaagctgttcagatattgaattaaccttttttaataaggatatgtttaggggacctcaaagcaatatagaattaagtatctttgtaattcctgaaaaggccagcatttatcaatcgatagcaactggatatgcaaatggaataaaagactactcaccaagccttaatgaacaatatgcaatcaattatgataaaaaaaatcagcaatggatgctgaatatatgtgatcgtggcactaacaaattcatcagtccagatgaagtattaacaacagatagcataatgcgaattttttatagcgcatttgcatcagttttaaagtaa

SEQ ID NO: 268522 - DNA, 468 bp, Klebsiella pneumoniae
atgtctgtattcataacggttttttcaggtgttttggtttttgttatcggacaaatagttgtaaagttaataattgagccgataaatgactttaaaaaagaaaggtctaagataatctacgatctagttttctatgctaataagctagcaaatcccaaaggccctgatgatttggagatggttgaggtatgcaaagttatgaggcagcattcttccatgctacattcagcgacccacttgattccatgttatcaatatttagctttcatctttggtctacctaaaatcaaggatattaatgaagcaaccacgaaattgatatatttatcaaacggctacactggcgtccttaagaatcaagcgattttaaatgcctatgcaatgcaagaagttaaaattgctctaggcgttcctatcccacagagtgagatgctcgatccaaaaataaaaaaagagttcataaagtaa

SEQ ID NO: 268523 - DNA, 540 bp, Klebsiella pneumoniae
atgaaagatatagatggagttcatcaggttttagaagtaatgaaaccgcacatggatagtatcgagaagcatttctctgaaatgaatggtattttcattaatttaatagagcagccgcatgataatatcggtagggttctgaaatgtcatcttgtggtagagcatttcttgacaaaattcttgggggattattacaaaatagacggactcgaaaatctacagttacgttttgctcagaaaattgaacttgtccctagagcaggtgggagtgcatcatttgtcaggcctggaataattcaattgaataaaataagaaacaaatttggccatgacttgagtacgcaaattgagagacataacatctcagcaatttacgaagtgttagctatcgcaagaaaaggtattaatctcgatgatccgataaaagcgatagaagcatttacaccaattgcatgtgcttttctttctgtgccgcctccagaactacagatgatattcatggaggctttcaagacaatcgtaacccatgaccctgaataa

SEQ ID NO: 268524 - DNA, 831 bp, Klebsiella pneumoniae
atgactatgtgtgtattttggaaagacaaagctaatgttattcatatggctacagattctcgcttaaataatggtaaaaccacactagatcattgtttgaagatatctagacttaattgtgaattgtacgaggcggatagtatagttggcggtaataaaatattaaaaggaacggttaagttagctatttctttttgtggcgggtttgtcagtgcctatacaataaaagagagtcttgcagagattttgaatcagatggtatttgtccctgacacgagtaatgcatctatggatgttattgctgaagttgcatttaatgtatataaaaaaataacaactgctattttagcgtactatatggagttggatggggcgtgttctgtctatatcgctggtttctgtccattatctaaacagatggaaatgtataagctcagtgttaagatagattctatctcaaatcaagttgtttattctaaaactaagtgcttcgagcaagaaagtttcattattgacgggagtggggcaactttcttaaaaaaatcagacacattagacaatcatttcgctaaggcatatgcaaaaaacaaagagaagccattacttgatatattgtattcggtaatttctgatcctgcgtgtaattctgtcggtggttctatacagtatgcaaaatgtcagtctaatgatattacattacattcaatgtatgaatataacaatgggtctgtgaggtatatgcgtgctggcgttgatattaacgagttgattaatgatgttattcctcttggtgtaattattgaggccaatatgattgggaggtctatatga

SEQ ID NO: 268525 - DNA, 516 bp, Klebsiella pneumoniae
atgagtctacttgagttgattgaatcaaagaaggtacatatcgccagatattcttcagaaaatggaatgttaggagaacgtagcttacttgactcgcaagctttatggataaaaagacctaaagggaaagacatgaaaaatctgctagctgcgctgaagcagtatgaaggtattgaaataaaggcatccagctttgattttatttctattcctgaaaatataagcattgactttgatgacgttagctccttagccggaatattaaaatcattaacatttattgaactaaaaacctgcaatcaaaaaagagttaccaatcctgacttcaggaatttcttctttgccattactgagaatgaaatagtagcatcagaacttctcggtaataggcatatagttgtactacacaacaaaataacgggagataaattggtaacaacaatacccgaaataataaaaagggccaattccaagaactggcaattgtctataagtcttggttcgaaagaagtttag

SEQ ID NO: 268526 - DNA, 246 bp, Klebsiella pneumoniae
atgatatataaaaccaccgttaataaacttgcaatctttaactccaaacttgatacgtctcaaaaaataataagaaatcttattgttgtagttgttatttgtttttttattgattttctgaggctagacagtttgcgcaaggggttctttatgttgactttgatatactggagcttttcagtgttccatggtttggttggtatatacaaaaagtatatgaaacaacattgggtaaaggagttttaa

SEQ ID NO: 268527 - DNA, 321 bp, Klebsiella pneumoniae
atgctcaggcgggagggttggcgggatactcacaaacgcatttacccggtctacagcgagcaggggctgtccatgtgtctcaaacgttcacgccggaataaatcggcacagcgccgacagccccagcctcaggggctgtatccgaatcatgtctggggcatggactttgtctctgacgccttatttgacgggcgtcgattatgtctgctgacggtcattgatctctacacacgcgaatgtctgaggatctgtatgggccagaatctgcgctcaacggaggtcgcacaattgcgctcagacgtcccttaccacagttgctga

SEQ ID NO: 268528 - DNA, 717 bp, Klebsiella pneumoniae
atgttaaggattaatcaaataattaaaatccttagtgatatgaagccgtatgcaccttatacatacaaaagtaaaacagataaattaatcgacaaaatacatggcaaattgcttgcaattgtaattatttttattgctgttctagttttatgcatttttttatatgagtcatctagtttcgctaaaactgatgtaattaaagatgttatctatcggttatattttaccataacgtctattgggctagtaataatgatattaccgcctatcttaggagttaagcatttgatagactggaaaagagaatcatttaatgattttatttgtgaaatcacgcatgatgaagaaaatgcaaaactacttataagttattcagaaattgaacttctatatgcaattcattggttacaacttaagataaatagaatagcaatgagggttagtagtttctttggtgaaaaaacagcggtattatcagtcttgggcctttgctattcggcagtacaggcatcaattgggtttgatacattgagtaaaacatttatcggggatctttctaccacgaactcaactaatactgtcatcatgttcggattagcatttttgctaggtatatctctgggggcattgatgttaaaaaaagtagcaaatcatcagttatatctgaaagaaattgttgagttggcaataagaataaaaaaagacaccctaaattga

SEQ ID NO: 268529 - DNA, 1983 bp, Klebsiella pneumoniae
atggaaaagctaaaaatgcattcccccaatatcacgcaggacaacatcgcccgcattcgcgatctgtttcctggctgcgtcactgaagccaagggcgaagacggcagcgtgaagctggcggtggattttgaccaattgcggcaggaactggccgattcgattgtcgaggggccacaggaacgctaccacctgaactggcctggcaagcgtgaggcgctgctgacggccaatacaccgattgccaagacactacgcccctgtcgcgatgaaagcgtggacttcgatagcacgaagaatctgttcatcgaaggcgacaacctcgatgcgctgaagctgctgcaggataactacctcggcaagatcaagatgatctacatcgacccgccgtacaacacaggcaacgattttatctacgaagatgatttctcagtaacgtcgagcgatttcttgaaacgatcaaatcaagtcgatgcctctggaaatcggcttgtaatcaatgctgagtcaaacggacgatttcattctgattggctatccatgctgtacccccgactaaagcttgctaggaacttcctcagagatgacggagtgatctttgtcagtatcgatgatgtggaattccccaatcttcgcaaaattcttgatgaggtttttggtgaatccaattttctagctacgctggtatgggatagaaataggaaaaatgacgccaagtatttttccgtaggccatgaatacatggtcgtttacgcaaaaaacgagcctcttctctcgcaaaatcagatcattttccgtggtgaaaaagatggtgtcgaggatgtgcgaagtgagtttgaccgcctcaaagctatccacggaagcgactgggcagcggttcgccagggactgcttgagttctatcgatccattccagatgatgactcaagagcgccacttaaacgatttaccaaagttgatggtaaagggccgtacagagatgatggaaacatcaattggcctggcggtggcgggccgacttatgaggtaatgcatccggaaacgaagaagccatgcaagctaccaacaagcgggtggcgttatccgaatcccactcgattctgggaagaagttgcgaaggggagagtggtcttcgggccagatgagaccaccgttccgcgggtgcgaaccagcttgtttgaaaactcagatcaggtaatgacgagcgttcactatagttacgcacaaacatctgcgaacgaatttaacatccttttcgatggtcgccgagtatttgagaacccaaagcctatcagcgatctacggcgactaattgcatatgtcacgggacccgacgatttgatttgtgatttttttgcgggatcagcaactacggcgcacgccgtaatgaagctcaacgctgaggatgggggcaatcgcagacacatcatggtgcaggttgcagaggctatcaatgaaaaacatgaggcatatctcgctggattcaaaactattcctgagctcagccgagagcgcatccgccgcgcgggaaagaaggttcttgagtctgcgtgccacgagaactggaacaaagacgtcggcttccgcaccctcaaaatcgacacctccaatatggcagacgtctattacacacccgacgcgctgcatgaggccaacctcgacctgtttgttgaaaacatcaagcccgaccgcactcctgaggatctgctgtttcaggtcatgctggattggggggtcgacttatccctgcctatcaacaaaaagtctattcaaggtaaagatgtattctttgtcgatggcaatgtgcttgctgcgtgcttcgacgccagcggcggcattgacgaagcctttgtgaaggaactggccaagcatcagccgctgcgtgtggttttccgcgacgcgggttacaagaacagcgcggtcaagatcaacgttgagcagattttcaagctcgtgtcacccgccaccgaagtgaaatgtatctga

SEQ ID NO: 268530 - DNA, 177 bp, Klebsiella pneumoniae
atggcagcgcatcgcgtaccaccgcagatgatggaaataatgcccaacgatgtcgggggtgtggagaaggccagccgcgtctttgtccgcaacgagctgatgccgctgcagaaacgactactggagcttaacggctggctgagtgaagaagtccttcgttttgagccgtacacttaa

SEQ ID NO: 268531 - DNA, 2193 bp, Klebsiella pneumoniae
atgaatgacaaaaatatgctgcttggatatggggaaactctgactggttcaataacattgaatcggggtggtggtggtaaaaataaaccttatacctacactgaaaataaaccagtgatttcccagcaactgggtaaactaatttctgaaatcaatgagattccgccctcagcaatgcctgagggcaaggccgtggcaaaatttgtacttcacccaactttcctggctaaaagttattttcctgtaggcttgttggataggttttctcttggtagtatcggtagcaaagctatcaaaattaaacctagaaaggatatcaaaaagaaagggcggagagatgaatacacaacggcctgtatttatgtttccggtaagcgagaaaattttcaacaattcttggatgctctcaataaagatgcgttaacgaagggacagcagaatgactttattacactggaaagcatttcaatgcttgaagtatctgataaagtaaaatcaatcaatgatcatgaaatgatgaatattgaggtggcgctgcatactccagaaaacacctcaagtgtaatcgatacttttgaatctttcgctttgcagaatggtgctatcgttgatacagcaaggagtataaaggttaaaggtttaacctttatgccaataaaagcaagtaaagatgttgctttaaaactggctgagttttctttccttagaacgctcagagagcttccagaattaagattaagcgaacccgttatagcgcgctctgtgatgcaaacttctcatcttagtttgcctactgaaggggctatgaatccaaatttaaaggtagctatatttgacggcggcctaggagtggatgatttcagcccatgggttactgaatacacctttaatggcaactctgccacaagtgctaagttgctttctcacgggcaggatgtgacatccactgtcctgtttggcgttctgggagcgtccaccgagaaattgatggtgcctttttgcaatattgatcattatcgtgttttggaccccaacattaataattcggatgttgacctctttgatgttttgatccgaattaaaagcgttttagaacaaacacactatgattatgtgaatttgagtttaggaccaagactaccagttgatgatgatgatgttcatgtatggacttctacgcttgaggaaattctggcaactggtgaaacgctttgtactattgcagttggcaatgatggccatctccctgctcaattgaacagaattcagcctccagcagacttagttaatggattgtccgttggtgctgctacctctttatctgaagactgggatcggtgctcctacagttgcattgggccagggcgaagccctggttttgtaaagcctgatggggtcgcatttggtgggaatgaggatgaaccttttcaggtatacagtcctatgcttaatgggctagccagcactgccggaacgagtttttcagcacccttggtattgcggcaggcgatagcgttaagctcatcactgcaatataacattacgccgctgactgctaaagcgctccttatacatcatgcggaatgtaaaaaacttaatcgccaggaggttggttggggccgtttccctcatgaactgagcgaagtgatattctgtggggatgatgaggtaaaagttatctatcaaggcaagctgaagccatcccaacacatgcgagcgcttattcctgttcccgaaattccgatgaaaggccgcgtgaatttgagggcaacattttgtttctcaagtccagtggatgctgagcaccctttaaactacacaagaagtggattggaggtgactatgcgaaaaggaatttctgatagtgatggactcacgttccctcttttcaacctgaaaaatgtttatgctgatgaaaatgaacagcgtattgatgcccataaatgggagacgacattaagaagtgaacataccttcaaagagggtgaattaactaatccttgctttgacgtggcttattatgggcgtgattgcgggatgcctgttgatgtagatgagttagatgaattgccttatgtactaattgtaactttatctgctgaggaaatgcctgacttatacaaccttataaggcaaaaatatcagacattgcagcctatccaggttcagcagcaaattattttgcgtgcttaa

SEQ ID NO: 268532 - DNA, 1083 bp, Klebsiella pneumoniae
atgattaatgttacgaatgaaatgctcattgatgtcgtcagtgatgcccttgcagggaagagagaaagtcttctcatgcggctaagagttatggcaaaaaagctcaagaaagactctcctgagttgtcgaacaaactggaaaccttgcttctgcataccagcgctgctatcgctgttgagcgcgcgcagccactgatacctaaagccgctccggttgatgctgatagtaggcaaaagttgttagttgaaacttatcctgtcgttatagatgtagaacctgtttggcctagtaaaactgatgtgcaactaaatcggtttgtaatcgaatgggaaatgaaagaacgtctttataaagaggggcttcatccttccagatctcttctcatgggggggcctccgggagttggaaagacgttagctgcaaaatggctggcttgtaagcttgatatgcccctgcttacactggatcttgcgagtgtaatgagcagttatttaggcaaaacgggaaataacataaaagcggttcttaattatgcttcatcatttccatgtgtgttgctgcttgatgaatttgatgcaattgctaaaaaaagagatgatgcgacggatgtgggagaactcaagcgattagttactgtgctcttgcaagctattgatgagtggcctaatacttctatactaattgctgctacaaaccactcagaattactcgatcccgctgcgtggagacgatttgatagagtaattgattttgactatccaacaaaagacctaattcaaaagtatttaatgtctaaagatatcggtgatagtttggctgagtatatttcggctagattggataaagtatcttatgctgtaattgaaagagctatcaatcaggctaagcgcaattctattatagaaggttctcctttaagctcatctttgatagatgaactattagaaggggagtctattgatgacgttattaaaataatgttagcggaaaatgtttcacaaaggaaaatttcacgcgatcttggcatatcaagatctcaggtcagtaaatttgtgaaggcagagggcgaaggtcatgaatga

SEQ ID NO: 268533 - DNA, 690 bp, Klebsiella pneumoniae
atgttcctcggggacagcggcttgagtttctggtacgcgatatgcaaatctggcgcgattactgtaaccgagccagcattgataaccttgttacgcgctaccatgtcacctacaaaacggtgtataaagccatcaggcgtatgcgcaggctggagcataagaaataccagccatcacttttctgaggaaacaatgaaaaaatacttggcttttctactgattcttaccgcacaagcggttgctgaagattcggtgcccaaaaataccgttttgcctgaccgagatattttgttatctcgatttgataagctgggaattgttaaatcaaatgcttggcacgaaggtaaacttatcgagggaaagccagtattaaccaccagagatggcggtgatttatacatgatgaacaacaagtcattatcatctatgtcaattacagagggagataaaccgcatgaggaagcaatacatgcggcatctatttgctttaacattgcgtatgtggctacaaataccaagagtaaaaacgtcactcaagctgtaaccgatattattgaagaagctgccaatgataaaagtggctcttctggagatttaattaatggttattggtttactgttgacataaagcatatagataaattcccgatgttggtctgcgaagttagcggattcactcgatgggattga

SEQ ID NO: 268534 - DNA, 570 bp, Klebsiella pneumoniae
atgattgaagataaagaaacggaatttgcttttcatactgagcgaaaagaaaatcttgctgcccgactgagggaactagcggagagacataaaagcctgagagccgcctcgcgtgagtgggggatgtcgttctcaaccctgaataactacatcaacaggggaactgagccatctttctttgcgatggtcgatatcgccgaaaaggaaagcgtaaccattgattggcttgcatatggcaaaaatgatgaggaatttgagttcacaataacggcggaggggttacaaaaggtccgccacactccaggtcgagatacatggttgatgattttcgacaacttaagtatgggagaaaggctgactcttttgaactactgtatcaaagctggcgcccctaatttagttaaactcgccactgaagttggagctacggaaagggagtttttatctcttccagcggaagataaagctagggttatgagactttatgaacaaatgaaaaaagggtcatctgaaaatcgtgaaacgatagccaagccaagccagtccagaaccagcaagaaggccagttaa

SEQ ID NO: 268535 - DNA, 516 bp, Klebsiella pneumoniae; identical to SEQ ID NO: 204431

SEQ ID NO: 268536 - DNA, 519 bp, Klebsiella pneumoniae
  misc_feature (460)..(469): n is a, c, g, or t
atgttaaactttttgatacctgtaaaaaatcatatcgatattaagaattgggatattataaagaaaaatattcaatcaactctgatatctattaataaccaaagcgataataattggcattgctatattgtatgtaatactggctgcgatctacctgcattacctgatgaaaataagttcactatcttatctgtagatctaaataaaatgaatgtccaaaagtctgctggattacattcttattatgacgctataagagaagataaaggacagcgtttatatacagcttttaaaaaatgtaacaatgacgatttttttatggttgttgattatgatgactttattcataaagatatctccttatatgttaacaaacaccagaatgaaaatggatggtatattgataaaggttatttttactctggtggtaacgtcttaattaagacaaaaaaattcgatnnnnnnnnnnaaatgtgggacttcaaatattctgaaagtttcattggtttacgaatttaa

SEQ ID NO: 268537 - DNA, 1257 bp, Klebsiella pneumoniae
atggccatcaagtgggaagacctgcgtgatgcctcgttccggggcgtacctttctttttccgcgacgtcgagggcgctggcggccgccgcgccatcccccatgcttaccccaaaaaagaggtgggctggacggaagaccacggcgcggtgctgactcagcagcagattaacgcgatcctgctcggaagcgactacaccgtccagatgaaccgtctgctggctgcgctcaatactgccggtcccggtgaactggtgcatccgtggttcggtgcccagacggttcaggtaggccgagtcactcatcgtctctccaccgaagaaggcggcattgcctatatttcctttgaggtgtacgaggctggcgagcagctgtttccgtccggcactgaagacaccagcgccaccacgctcagcgcggcggacaaggtcaaggaagcgctggccagcggtgattattttgcagcactcgatggcgtcggcagcatggtggacaccctgctggaggacatggagggctttgtcaccagcctgccgacactaccggatgcgctcagcgagtggatggaccgcctcaaccggtttaaggacctcgccggtattgtagccgccgctccgggtgaaatgatccgcgatattactggcctcatcagcgatatgaaagacctcgtatctgagcccccgttcgccctgagggtctatgaccagctgcgcgataagtgggaaggcgaccgggcagcacagtctgcaaccaaatccctggtcgataacatcagcgtgaacaccgataccggatttgccagcagcgtcacaccggcatcgacgccggagaccacggcagcgatggagaccaacatcgtagacttccgccgcctggtcattatctccacgctggtcgctcaggctgaagcggtggccaccgcgaccttcgagaccggtcaggatgcgcagaataccggcgaccagctggcggagcgtctcggcgagaccgctgcggaagccgtcgaaagtggcctccgtgagctgtggcgctctcttcgcgaattgcggttcgcggtggtgaatgatgtgcgtatccgcagcatccagttgccggaactacgacgcgtaacgcctgcccggacagtgccggtcatgctgctggcctaccgcgagaccggcgacgcggagaaccgggatgagcttgtgacccgcaaccggctgcgctatccctcctttattacgccttcacagacgattgagatcatcagcaatgactga

SEQ ID NO: 268538 - DNA, 1821 bp, Klebsiella pneumoniae
atgtccgagttcgcccgcactaaccagcgggcaatgaatgtcgtcaaagcgacttccgccgctgctggccgcgccattgatgccgttggcaatcgttataccggcatgattgcgggttttgccagcggtgcaatgttgcgtaattttgccgatacagatcgtcggctgacccgcctgggcatttctgccgataaaacaaaggagcaaattaccagcatttacagcgatgttcaggatgtctctatcaaaacccgtattgatgataaagagcttgtcggcttcctggaaacagtcaacgcaatgaccggtgatattgagttcggtatcaaaaacctcaagtctgcggcattaactattgcaggtacaggcagtagcggtgagtcagttggggcattattcgcacagttccagaaatacggaatcaacgacgacaaaaactctacattagctatggatgtacttaaccggctaggtaaagaaggggcatatgagctgaaggatctggctgaaaaagcaggcccttctctttccctttatgctgctgcgggtggtcgtggtgtccaggggatcaaggatgtaggtgtgctgcttgagtcagctatggatgctacaggcaaccgagatacagcagcgacattagtcgaaaactttattcgagagattcaaaatccgaaaatagccaaagcattaaggcaaaaaggtgtcagcactagggatgctagcggaaaattgaagtccgccccagagcttctgcttgctttggcgcagggttcaatgcgtggcgcggcaaagcgaagagctgccggagataaagacgcttcagcacttggtgaattgcaatcagtagggttcacacagaccagtctcgatcttatctctggtgcatcaagtcagaaaggacaggaaaacttacgacgatacaatgccgttatagctgatggtgcatccatccagaaagacgcaacctatgtggcacaggattttacatctgccctgcaaagccttaatacgacttggctcaagttcgctaatggcaatctggctgagccagtgcaggagctggcagacgctattaactcagtggaccagaagaccgtccagaactggctggaaaccggcaagaatattgctatcgcagtcggtggtgttatcgccgctcgtaaagccttccagctaggtaaaggcgcatgggacctgttcggcggcggaaaatctaaagggatccctaaaggcgtttcagacgtgttcggctcaggcgtcatgccagtctatgtggtcaatatgggcgctggcggcatgggtaataccggaggcgtttctggaggccccggaggtaaacctgccggaggcggcgctggttctggctggctgggtaaggcattcaggggagttggtaaagtcgcagccccggttattggtggtctggcgctgtatgatgagcttcgcacccagtatggtttatatgaccatatcgatgagctgaaccagcagatttcaggcaataataatgcctctcctgaggaacgtgactttgcccggcagagtagtcgcaaccgccaatttatggctgataaatggcaatcactgacaaactggtttaactctatcggcaatgatccacaaatttctgacccacgtccgtgggcgtcgatgcagtcacaaaatcagtctggctacccattcctgcagcaacctgagctgaaaggcagtatcgaggtctctgttaaagatgatcgggttcaggtgaccagcgtcaaggtcaacgcccccggcgtcaccatgagtgcgggtaccggattacgcagtacggagcaagactaa

SEQ ID NO: 268539 - DNA, 1092 bp, Klebsiella pneumoniae
atgactgaagagttaaccctgaacgttgacggcaaggtctggggcggatggacggacatgacaatcaaccgctctctcgacaatatcgccggagagtttgatctgaccgtcaccgcccgctggtctgctgcggctcctcgctccattaagccaggccagtcctgcacggtttccatcggaagcgaccgcgtcatgaccggctacattgacgacttcattcccagctatgactcagagaatgtctccctgcgcgtcatggggcgcgacaaaaccggcgatctggtggacagctcggtggtcgataagtccggccagtggaaaggtctgaagcttgagcagcttgcggccaccatctgcaaaccctacggcatcgaggtagtcaacgagaccgacaccggagacgcctttggcagcatcaccctcgaacagggtgaaaccggctttgaactgctcgaccgtctggccaaacagcgcggcgttctggtgacctcagatgcttacgggcgactggttatcacccgagcatccacccaacgggccggagtggcactcactctcggcgacaatattctggctgcccgtggccgtttcagctggcgcgagcgtgccagccagtacatcgtcaaaggttccgccagtgcgggcggtgcgacgtgggacgaccagccggtgaaaatggtcggcggtcgccagacagtggtcagcgatccggagatcacccgttatcgtccgaagattctggttaacgaagacagcctgacggtcggcggtgccagtgctcgtggtgaatggcataaggcggcaatgatgggagaagccaacaccaccgaaatcaccgtggcgggctggcgtgagaatggtatcagcggcccgctgtggcagtcgaaccggctggtaaaagtaaccgacgccatccagcagctcgacgtcacctggctgattaagacagtttcctttatggaaggcgatcaggggcgtctgaccgtgttgacactggtgccgcctgagtcgctggatatgcccgaacagaaagctaaaagtaagggtaaaaaagcgaagtcaaaaacttctgtgggggtcacgtgggactga

SEQ ID NO: 268540 - DNA, 231 bp, Klebsiella pneumoniae
atgaagaaacatattaagcccgcccgcgcgggactgcaggtgcgtaaagccgatggccagcgcctgaatcccgaaggggaagagctgcctgtaagtgcgtggtggcggcgtcgcgaagccgaaggtgatgttgttatcgccggtattaaggcggaatccgtaactgaaccggcggaagccgtaaccgaactggcagaagtccgccagacccgaaccgtaaaggagaagtga

SEQ ID NO: 268541 - DNA, 354 bp, Klebsiella pneumoniae
atgagcattctgggtatggcggccatccgtattaatggtcgcgaaatcaaaaccgagggtaaatccgtcctcaatccgggcggtaaaacacgcacccagcacatgggcgggggcaaggtgtggggcaactccggcaagatggcggggccctcgatccagatgaccatcgcggcggcggaggatatggacgttatcgaaatcagcggctgggaaggtgtcaccgtcatgtttgaaggtgataacggcctgacttacatgatgaccggcgcggcaaccgcagaacccgccacgctggatgaagacgcgagcaccatcagcgctaatttcatcggcgaaaaactggtgaaggtataa

SEQ ID NO: 268542 - DNA, 1482 bp, Klebsiella pneumoniae
atgtcgtcactgggtaatattcctgctgatatccgcgttccgctggtgtacatcgatattgataattctcaggcgctcgacagcgccccggcgcagtcgcgcaaaattatcgtcatcggccagcagagtgcgaccggcaccgctgccgctctgacgcaaaaccgcatcaccagcgacggcaccgcagaccagctttacggcaaaggctccatgctggccgggatgctcaaaaccctgcgtaaggctaacagctataccgaagtgtgggcgatgggcatgactgatattgctgccggtgctgcctcaaaagcagagctgaccatcaccggcccggccactgctgcgggcacgctggccctgctggttaacggtatatcagtgcaggttggcgtcagtgctgacgataacgccgacactatcgcgacagccattatcgccgccgttaacaaactgcccgatacgcaggttactgctgcgctgaaagcggattcgaccgacgtcgtcaccctgaccaccaactggaaaggcgcgaccggcaatgcgatggacgtccgtctcaactactacaccggcgagcagaaccctgcaggcgttgcggtggccatcaccgccttcaacggcggtaccggcaccccggatattgcggcggttgtcgcggcgctgggcgatgactggtacaccgatattgtgttcccgttcaacgatacgcagagcctgaacaccatccgggatgaactgctcgaacgctgggggccactcaagatgattgaggcacagctctggacggctttccggggaacccatgccgaaagcggcaccttcggggaaacccgcaatgactggctgatttcctgcatcggtaccaacatcgcacctcaaccgcactggctgtgggcggcatcttacggcggtatagcgtcatactatctggccaacgacccggcccgtccgctgcagacgctggtgctgccgggcatcctgccgccggtcaagacagtgcgctgggatatgccggagcgcaacctgctgctgcatgacggcatcgccacccattacgttgacgccagcgacaacgtctgcatcgagcgcgaaatcaccatgtaccgcgtcaaccagtatggcgacgccgatacgtcgtacctcgacgcgcagtcaccggcgacgctggggcgcatccgctatgtcatcaaaaaccggttcaccaaccgctacccgcgtcacaagctggccggggatgatgttctcgacctgcttgatccaggccagccggtgatgacgccgaagattgcccgcgccgagctgctggatatcgcactgactgagctgattccggctggtctggttgaggacttcgacgactacaaagacacgctggatgtgtatctcgacggcgacgataaaaaccgcctgaacttcatctgccacccgaacctggtcaaccaactgcgtgtgctggccggtcttatccagttcaaactttaa

SEQ ID NO: 268543 - DNA, 525 bp, Klebsiella pneumoniae
ttgaacgaacctcagcaaaacaagcctgaccgcgtcagcgtgattgaacgccatattggtcagttcagcaccccggctgaggtcaaaacctggctgtcagatcgtgatggttgcatccgtctggccgcactccgcgtgcgcaatatacgcgctcaggctggcggaaccgtcggcgatatcacctgggcggcgtatatcatggccaccgatgcatggggctatccgcgcgatacccgctgcgaggtgctggtcggaaagctggttcgccgtattgtccagcgcggagccgctaacggcatgaaggccgagcgcccggccacttccgtcagtgccgataacatctattccggcgggcttaacgagctgggcctgaccatgtgggccgtgacgtgggaacaggagttccgtctggatgatgaaatcgaccttgccaccctcccggacttcctgcgactgggggccacgctgcaggtcggcgatggcaccaccccgattgaagacgttattaacataagagagccgtaa

SEQ ID NO: 268544 - DNA, 408 bp, Klebsiella pneumoniae
gtgggccttgcgtgggtctacgaccagcgcgatgacattatcccgaccggcaccgaccgcgaggcgatgcaggcgtacctgttccgtcatcaggacccggcaaccgggacttacgtcggcaagcccggcggtattgaggtctggcccattccactgacgctcaagccggtgccgctgaccatccgcgtcatccccgacactgccgccatccgctctgcggtcaccctgagcctgcaggcactgtttcgttcggtctcgccgggcgacacgctgctgctatctgccatccgcacggccatcggctcatcgacgggcgtcgccgactacgagctggacctcaccgccaatcaggccagcgagaactatgagctgctgacgctgggggcaatcacatggcgcatcgtgtag

SEQ ID NO: 268545 - DNA, 249 bp, Klebsiella pneumoniae
gtgggttcaccactcagctacagcggcgttcaccaggatggttttgcaggcagtgtcccggtcagcacccataagcgtctcatccatcaggcgtttggccgggcgctcaagcatccggtctggcagaccgtgggctcccataaccgcatgatgaatattccgcagcgcgagtacctcgggctgtccaccgcaaacagtgatgagctgatgcatgtcatcggcgatttctggagtgaggtattaccgtga

SEQ ID NO: 268546 - DNA, 1032 bp, Klebsiella pneumoniae
atggaaaaaagcattagcacatttatgtacctatccgttttattaggttgtatattcttatttataaaatatcgactttatgttctcgatcatagaagcctgttccaacaacccttgttctgggctgcaataggcctacctttattcaccagcctttactttggttcttttgtctggatagataaaatacactcttttagtcttacaagtcacggttatgagagatttttagatatctcgaaattaccattactcatccttgcatctgcagtacctttagtttcaatagtaaacaacctacacagaaccaaacaaacagaaaaacagatctcagaggcagaaaggaaaaacagggtagatttatattacaaccacatgaaatttcatcttgatttatataaaaaaatcgaaggaaaaagaataggcagctactacccggttcaggaagctcaagctgaagcaatctaccaacattttataaaacatccacaagaactatatagaaaagcatacccacaatctacgcctgatgattctcaacaattagatattaatgagcaatttgttattgatttacacaaatgttgggtagaaatcaacgcaagactcaagcaattatccgagagtgaaaatcaaatacatcctacagaggaactttgcacaacaaagatgagaatatttgtaggagttatgattatttatgaaaaaacttgtaaactgttgtgtttaggtggatttcattataaaaagtcatttgtaataaatgatagttataataaataccaagtttattcaccattttatgattttggcactctgtacgaatcactgcaatccttagaagagataacctacgccttcttggatacttgcagaaatgaagtggtaaacttgtacttccctatagaagataaaattttgatatatggtgaagggattctagagaattggttcaagtattctcagttcttgatcactatagcttatcaacccgccaagatgtctcgcttaccccagctgagacgcgattga

SEQ ID NO: 268547 - DNA, 627 bp, Klebsiella pneumoniae
atgattacactgtggggacgtaataactcgaccaacgtgaagaaagtacgctgggtgctggaggagctggatctgccttatcagcagatcctcgccgggctggagtttggtctcaatcatgacccggaatatctggcgatgaacccgaacgggctggtgccgttgttaaaggacgatgccaccggggtagtattgtgggaatcaaatacgattattcgctaccttgcggcccagtatggcgttgaccgtctgtggcttgccgcgccggcgcagcgcgcgcaaggggaaaagtggatggattggtccaacggcaccctctcacccgcccatcgcccggtattaatgggcctggtgagaacgccaccggagcagcgcgactcggcggccatcgccgcggggatcagcgcctgcgaagcgctgttcgccatgctggatgacgaactggccaaaacgccgtggctctccggcgagcagttcggccttggcgatattgccgtcgctcccttcgtctacaatctgttgtcgatcctcgacagctggcaaccgcggccccatctgcagcgctggtatcagcagattagccaacgtcctgcctggcgcgaagtagtgcagatcccggtgacctga

SEQ ID NO: 268548 - DNA, 432 bp, Klebsiella pneumoniae
gtgatcgccggcgtgctgccggacggtaaagccgatgccattaagcgtctgcagagccaggggcacaaagtggcgatggttggcgatgggattaacgacgccccggcgctggcccaggcggatgtcgggatcgccatgggcggcggcagcgatgtcgctattgaaaccgcggcgatcaccctgatgcgccatagtcttcacggcgtggccgatgcgctggcgatttcgaaagcaacgttacgcaatatgaagcagaacctgctgggcgcgtttgtctacaactcgctgggtatcccgattgccgccgggatcctctggccgctgaccggcaccctgctcaacccggtggtcgccggcgcggcgatggcgctgtcgtcgatcaccgtggtgagtaacgccaaccgcctgctgcgctttaaaccaaaagagtaa

SEQ ID NO: 268549 - DNA, 345 bp, Klebsiella pneumoniae
gtggataatgtatttactttgggtatttcatcattatgggatgaagtgtgccatatgccggtcggcggagtatggtggctcaacgtcgaccgttatgccgatgccgtcagcctgtttaatcagacactggccgcgcaggcgaaaaacagccacgttgccgcgctggttatgggaaacaaacccaaggatatcatttcattagatcatattcacggtccggataatatcgcgctgttcaccctgccgaatcgcccgcaggcgctggaggaaatacaccgcgatttagtctgctccctcgaacctggcaattatttgtttattctgctatgcgctgaaaatgcctag

SEQ ID NO: 268550 - DNA, 804 bp, Klebsiella pneumoniae
atggagccggcggtcagcaatctggctgaagcccgggagcagatgatgtccatctccggtgacgcgcagaaggcgaccgcgaacccggccgatctccaggcgcaaattaccctgctggagcagcagctgacggacctcaaaaaatcggtgctgctgctcagcgcgccggaggggatagcgctgaccagcggggagcatctgcaggtctcagccgggcataacctgattgccacggccggaaagaatgcggatgtcagcgtggtgaaaaatctgttcatcggggtgggcagtgccctgagcgtgtttgtgcgaaagcttgggatcaggctgatagccaaccagggaccggtacagatgcaggcgcagaatgacctgatggcgctgcttgcccggaaggaaatcagcattgtcagcacggaagacagtatcgaaattattgcgaaaaaacgggtcacgataaacggcgggggaagttatatcacgctcaatgccagtggcattgaatcagcgacggcaggtgagtacagaacaagggccgggtattacgtcaggcgggaaaaagcgcagcataagcctgacattgcacctttagctaatgcgataaatgacgacagccataatattcgctacctgtgtacagatgataatgggatgccgatgctgaatacaccttacagggcctttctggctgatggctcggtattagagggtgtcagtgatggcgaggggtatacgaagttgtttacttctgcacaggtacaggatgttctgctgcatatgataccggaggccatcaatgcctaa

SEQ ID NO: 268551 - DNA, 264 bp, Klebsiella pneumoniae
atgaaagatcatacccaaactcgcctggaatttacatggctattcctggcaacccctaaacatctccctcacgtcgcacctgtcgtgctgcgtactaacgccgcaactgaagaagaggctcgcgcagagttctccggctggaatatggttttcgctgcaaaaatccgttctcagatgcggtgtcatataacgtttttcaacgatgaaaaccgtactggcctgacacttgaggttgaggctgtagagggggtgttccatgcttaa

SEQ ID NO: 268552 - DNA, 315 bp, Klebsiella pneumoniae
atgcaccagcttctgctgcccgtcggcgcaggcgtacacttccgccagggcgcgcagtaccgagttggagccaaacaccagatccacgcgggtggcgctgtacttcgcttcgccggttttacggtcgctgccggtaaacagctccgcgttatcatcggccgctttccagacggtagccatatcaagcagattaacgaagaagtcattgctgagcacgccgacgcggtcggtaaacaccccgtgtttgctgccgtcgtagttcgcgcccagtacgcgcaagccaccgaccagcacggtcatttccggggcggttag

SEQ ID NO: 268553 - DNA, 195 bp, Klebsiella pneumoniae
atgattgcttacttacgcgttgttctagcggtggtgattgtcgccagcgtttatgggctgttcgttccgatcctcatttcgatgaaggacacggtagccgtcgcatccggcgttgcactggcgtttctgaccccgccatgcatctacgccatttgtaagggtcttgtacttaccgtaacgaaggataagaaatga

SEQ ID NO: 268554 - DNA, 552 bp, Klebsiella pneumoniae; identical to SEQ ID NO: 147401

SEQ ID NO: 268555 - DNA, 855 bp, Klebsiella pneumoniae
atgagagctgccaccgctacgaagccaaaaaaaattgatgcctaccgtaaggagccatcagtaaataaaaagtatttgccctattcttatcacctcaatgattacgtgatttcgatggaaaacggcgatctgatggcttttttcaagctggatggccgcacacatgactgcgcatcagatcgggaactggtcacctggcataaagaccttaatacgctggtcaagagcttcggaacagaccatgtagagctgtggacgcatgaatatcaccatgaggctaaagagtacccggatggtgagtatgaccattttttccctgcttatgttgatcaatataaccgtaagctgcacggtgattccaagcagctgattaatgacctttatctgaccgttatttacaaacaggtaggggataaaacacagaagtttctggcgaaatttgaaaagccgactcgtgacgaaattcagcaaatgcagaatgaggcgcttgaaggtctggaagatatttctgaacaaatcctggaagcaatgaagccgtatggcattcagcagttgggtatctattatcgtgacaaacgcggtgttgaaattcctgcgcctgataaaaaagaacgtgaagaacttgctgaagtcgatgaatcagacatttttgacgaagccattgttatcgaacgcaacgagcctgaaccttcgcaggctcacgcttattcaaaagcgctggagttcctttatttcctcgcaaatatggaatgggccatcgtgcctgtttgccgtgatcgtatccgtgagtacatcatggacaaccgccctgttagctccctgtggggggatgttgtccggcactgttgcaaatag

SEQ ID NO: 268556 - DNA, 981 bp, Klebsiella pneumoniae
atggaaaaaaatcagaaagaaaaatatgaggaaaaactaaagggccatgtctcgaagtgggaacttaaaaattttcgtgtttgctatgatgaacaaataatattcctttgtggagcaaaggttgctcccttggaagatactcagacctcaatgagaggtatgttttataaatactgtaaagaaaatgactcaaggttatttaataaattacttctcgcggaagcattcaaaaattatttaaaagatagtcattatccagatcttatttcgtttgaaaaagatattgccaatatatcatcattaattgttatatttttagaaagcagtggttctattgctgaattaggacttttttgtaatctggtggatatcaataagaaactcttggttattgtccccgaacatgaagtcaaaggcagtaagaaagaatcatttatatatctaggcccattatcatatctaagagaaaaaattaataaacaatcttatcgtgtttaccctggccccacagaaggtgaggattataatgagcatctagagctcatacttggtgatgtcaatggaatggcaccttctgaaggaaaggattataaatttgacgcaaataacacggggcatttagcttttttactcactcatataatatcgatcgctatgccaatacgattgaaagaaattatgatgtgcattaaagaaatagggatgaatgaaacccttcaaagtgatgttgagagaatgcttttccttcttgaaacctttttccatattgaagtttatgagtatggcggcacgaaatattattataccaaaagttcaaaaggaagtgttcggatgggtaaaaataaagctggtgtgactgttgacgaaattggtataaaaacagatttactatttttcattaatgatgaaactagaagtgatgataaaagaagaaggcttgcattaagagggattaaggagatgattcatgaacataattga

SEQ ID NO: 268557 - DNA, 927 bp, Klebsiella pneumoniae
atgaacataattgagataatttctaaaaaaaccatgttggcatcttctaatgtgatcacatttatacatacggccccttatcgctacaaaaaatattatttaccaaagaataatggcggttcacgtgaaattgcgcaaccctcgcgtgagcttaaaattatgcaacgattaatcttggagctattactgccatatttgccagtgcatgaaaatgcttttgcgtatgtagaagggaaaagtataaaacgcaatgctttaatgcatcgcaataatgaatatttccttaaaatggatttttctgactttttcaatagcattaagcctatagatttgcgcaatgtattgcttagaaatgggtatgaaactatccctcataacttaaatttgattgataatcttttcttttataaaaaaacaaaaaaaagcggtctgtcattgagtgttggtgcacctagttcgccattaatatcaaatgcagtattgtatgatttcgatgtaagagtttcggaattgtgcaaaaaagaagatattacatatacaaggtatgcagatgacctgactttttcatgtaatgaaaaaggtaagttactggtctttcagaaggaaatcgccaagattttacgtaaaatacaatctcctaaacttaaattaaatgataaaaaaaccatctatgcttccagagccgtcagtcgtagggtgacgggcatagtcattaataataatggtaagttgtccctcgggcgtcataaaaaaagaatgattagtagtttagttcatagtttcactttaggtaaattaatctctgacgatattcataagttaaaaggatatctagcatacgctaaacatattgagagtggcttcattgtttcaatgagagataaatatggagcggatgtaatcgactccatattaaaatataattaa

SEQ ID NO: 268558 - DNA, 1023 bp, Klebsiella pneumoniae
atgtcatctggtaactacgacttgataaaccttgctgaagctcgtgaaaagcgcgagatcgcccgcaagcaagttgctaagggcattgacccggttggggaacgtaaggcgcaaaaactggcacagcagctttcaacagaaaactcattcgaagccatatgccgagaatggcacgccaacaaagctgaccgctggacagtggcctatcgcgaagaaatcattaagacatttgagcaagatgtgttcctgtttactggcaaacgctccatcagtgaaatcagactattagacttgcttggattgttacgatgtatagagaaacgtggagcactggagaagaccagaaaagtgcgacaaagatgcggagaggtctatcgctatgcaatcataactggccgtgctgaatacaaccctgcgcctgatttagccattgctctggccattccgaggctgaagcaccatcctattctatccgccgaagagttgccttatttcgttagagaccttgatgcctataccggcagcatcatcacgaaaaatgctacaaatatagtcatgctaaccggtgtaagaactcaaaaaatgcgctttactacatgggatgaagttgaccttgagaaaggaatatggaaaataccagctgaaaagatgaaaatgcgtagaccacacattgttcctttgtctactcaggtagttttccactttgaacagatcaaacctattaccggccattacccatacatttttattggtaggaataatcgtagcaagccgatctcaaaagaaagtgtgtcacaagtaattgggttacttggttacaaaggacgtgctacaggtcacggatttagacatacaatgtcgacaatattgcatgagcaagggtttgattgtgcttggattgaaatgcaattggcacatattgatagaaataatattcatggaatgtatcatcatgcgcaatacattgaaaaaagatgcttcaatggtatgcatcctacgtatatgcacaatacatttaagtaa

SEQ ID NO: 268559 - DNA, 318 bp, Klebsiella pneumoniae
atgagcaaatttaaagcattaacagtagagcgcgaccaatacggttactggactcatccgctatacgatgaattttgtgatggtcgggagtttatttcatctgaggagttcaatgcctggctgaataaaaacggactcgcctggaaagtggtttaccgtgatgaggatgacgtagacccaactgtcgatggttacgacatctcccaatggcagccagaaccgcctgctggagaaggctggtttgttggctcaattcacgacactgaagatggggcggtatgcatctggttgcgtcattctgaaggcggggcagcatga

SEQ ID NO: 268560 - DNA, 1065 bp, Klebsiella pneumoniae
atgataactctttcattgttcaacaacaaaggtggtgttggaaaaaccactttgacttggaaccttagtgtatcccttgcggctaaaggaaataacgttctactaattgactttgatccgcaatgcaatctttctatagcaactctgggcgatcaaaattttgctgattgtttaactccagttatcggatacccttttgggaaaactataagggcatttgggcagccttatatacaacaaaatagaacacctgaagtaaatgcctcttaccccaaggccaggatgcataatggcaacttacacattgttcctggtgatttttggttgaataatttatcagatactctaagtgttggtactgatttgattgcaggtacaagtatctacagatttttgatgccttatctgatttcaatagaagccgaaaaaaaatatggtattaagtatgattatgttttgcttgatttaccaccttcatttaataccttggtaaggtctgctctctattgctctgattattttttggtaccttgtacagcggatatgttttctgcctattgcatagggttgattggtgagatgcttccttcctttgctatcgattggcaacaaggtttaagtcgttatttctcaggtggctatgtcgatcctctattgattagtaaggggcagccaaagtttgcaggttggatttttaatggttttgatactagaaaaaaagccggggcatcaattgccactgaggttggtgctgatctagcacacagacaaaaaattagtgatgctgtcataaataatctaattcctaatcttaacagaatatcatattatcaagccgtacccggttttgttacacatgagcctgtagctaagatagaagatcttaacgttatggctccagatagtataattcaaaatgtaccgttaaagtacctagatcaggttaaacctacaagagatgtattagttagaggaacttgggctcctaatcaattagatctaatgcataggatggatcatgagcatgatattcttgctgattacgtgttaactaattgtatttaa

SEQ ID NO: 268561 - DNA, 2022 bp, Klebsiella pneumoniae
ttggttggaaaatgcccgaacatttccacactcaggactatcgagccctcgtatagcgggcagtcaatcatcctcgaaaaatgcgacgccgacggggtgctgctcaatgtccagctgtatcacgacccctatgatattttctctcccgatgatggcttttctgtatttgtcacaccaggcggcgcacgctggaaacctgacctgacgcacggctataacgttgcacttgcagggttgaaacgagacctgtccaacctggcagactgttttgaccgggtacgtgactccattattaaccggattaaagctaatggccgggttaataatattctgtgcaaaatcatgatccccagtgttggctttgttaccaattacaaaattgatcaccctctggtttatcccagcatcattacactgacggcgctgggtaatgtttatattgaaccgaaagaggggatgcattttcagccggttgtatgtggggataattcccaatttaccagcaagctgaccaaggcgatgtttcaggcagaggcgggatggcagggagcaaaaagcaaatatcttaaccaggcgtcggcacgggtgatactggattgcgtgggtggtgtgctcactattcgcggccctggctacgctcttgagtatacggctgatgatggcgaccctattttcgatgctgatggaaatcctaccctcgatacaaccgggctctccatcgggaatatggctccctgcaatctggattgccgtgacgtcgtcgtgcaaaacgtctctgtcattggttttaacaaacccttcgtctggggaacgtacaacacgtttatctgtggtctgcgtaatgtttatttttcccgcgtctatgatggagtaacgatccccgatggtatcagcaactccggcgagcgcatgtggtatgacaatgtcacgttcgcgaatgtggccaggcatgcttttgtcggaaaatcggcgggcgagcatacgctgtataactgtagcgtagactttgtcgggaaagacctgttttacaacgggtcgaacagcgcatgccgatttgtattccagtcaggccatattgaaggtgtgcagcgctatattgcgtcaaaagaagcgccgacgagctattcgaaagccagcgtctatatttctgagtcggtgaagtatgaccctcgccggggcgctaacgattatcgcggtattacgcagatgttcagcgcaccggttaacccggataagccggaatacgggattggcctgttcattgatttcaacgctcacatcagcgcatttgacggtgtggcaccgaacgctgaatacccctgttatgcagggtcgccggtcaataccggattcgatttgaggatgaaacagcagcgagcgccgggctcgcggtatctgaatacctacgggccaggctcgaaactccttcatgccaccatacagcccgctgaggttgacgttggtaatccggttacctctgctgacccactgagtaccggctcactgttcgctgccattaaaacaggtggcgctgttgcggaatacggcgctgcatccgatcagaacgacagcatccgtacaatcaaaatcaccctgagcgcagccacggataccgtgcaactgtttctgtgtaaccgctgccgcgtggtatctggacgtaatccgttatgggcttcgtgttcggtgaatgtggaagggatgacagggcaggccaatctgacaccgataatggcaaactatcttgggagcgaggttgaggtaaacacaaacgtcataccgacgaaataccaggtaaaacccaaactggcggcaatcacgcagggctacccgacggatatgattgctatgaaggcaaaagccaaccggacagagaaattccaggcaatgccatcctctaccgtactcggctactggcagggtgctgacttctttgtgccgggatttctcatcacaggcggtgtcggcgtgctgatactgaaagcgccgtcttactggactgaaaccgaaaacggaggctactga

SEQ ID NO: 268562 - DNA, 624 bp, Klebsiella pneumoniae
atgcgcatccatcacgccaccctgccgctggccggctatacgctgcagcagatcgatttcgacccggcgactttccagcctgaagatctgttgtggctgccctaccacgccagcctgagcggctggggccgcaagcggcaggcggagcacctggccgggcgcatcgccgcggtgtacgccctgcgcgaggtcggggaaaaacagcctcccgccatcggcgatcggcgccagccgctgtggcccgcgccctggttcggcagcatcagccactgcggccagcgcgcgctggcggtagtgactgaccggccggtgggcgtcgatatcgagcgccagtttacgccaccgctggcggcggagctggagagcagcattatcaacgaggtggaaaaaaaggtgctgttacacagcggcctgcccttcccgctggcgctgacgctggcgttttcggcgaaagagagtgggtttaaggccagccatcccgacgtacaggcgggcgtcggttttaacgattttacgctggctgcaataaaggaaggaaatctgcgtcttcggctctccaccgtggagtatcggctgcaatggattcaggccggggaatacatcatcacgctctgcgcgccgtaa

SEQ ID NO: 268563 - DNA, 288 bp, Klebsiella pneumoniae
atggatgaagatgatcgtaaagacctgcaattgtggtttggtctgtcatacgcagccttctgtgtaatgcctcgcgtgttcatggaggctatgccacaagaatggcaagagaagatggctcagttgctctttgagtatgacgatactatcaaaacaaacgtttgcggagtccatagttgctttgttacgcccagggacaaaaacaagcgctttatgaagatgcctgacgatattcttaattatcgccacccccggcgtgagttcattgaatcctttctgaaaaagtag

SEQ ID NO: 268564 - DNA, 261 bp, Klebsiella pneumoniae
atgttcaatcggaataccagcctgctggctggaatgagtgatgatcaggcgcgagcagcattagctaaagcccaggctgcttacgttgacttagcctccgggagccacggtgtttcattttcctatacacagggagacggaacacgctccgtgtcctaccagcaaaccacactgtccgaactattgggactgattcagcttctacaggcgtatctgggtattgtcgtgaggccacgtaagccagtgaggtttcgattctga

SEQ ID NO: 268565 - DNA, 279 bp, Klebsiella pneumoniae
atggcagaattagaacgtacgaaaatcattgttcttacaacgcctcttgaagatgcggcacagaaaacgcgatatgagcaacttgagcttaaagcgccgacactgagtcaggtcgaaaagttttacgaaaaacaggaatcatcctccgcaattgctgcgatgcgcttgctaatcggtcttgtgaccgatacccgggaaagtgtattgcagccaatggattatgtcgatttctgcaaatgtaaggagtacctgctcagttttttgaactggaagccctga

SEQ ID NO: 268566 - DNA, 249 bp, Klebsiella pneumoniae
atgaaaaatgaagatgttgaggaactcattgagaaagttaacaatgattttgatgagctttcagaaaaggtagaaaatgccttatccgatgacgaaattgaaaaacttcccgccacccatataaaacaaatagcagaaaacatacgcagcgcacttgattatatggctgttgatatattagcagagacaggcattatatataaaaaaaagatttattacccttatggccctaccctgcaaaagctttaa

SEQ ID NO: 268567 - DNA, 2709 bp, Klebsiella pneumoniae
atggtcgagaacgacacttcatcggttgagtatcagctatcaaccagcactggcccttttagcatccctttctacttcattgaaaacgggcatattgtcgcggaactgtatacacagaacggtgacgactttaacaaaactacgctgacaattgacgttgattattatctgaacggtgccggcgataaggatggcggtcagctgactttgctctccgcacacagtggcgctacgctactgatttatcgtgatcccgatgcgacccagttaaccagttatctggctaccggtaagtttcctgcgacaagccatgaacgcgcgcttgataagctgacgatgcttatccaaaaatttggttggtggtgggactctttggccctgaaaaagccaaatattttcgcaaattactacgatgcgctaaacaatcgtattcgtaacctgcgtgacccgtcacaggcacaggatgcagccacgaagaattatgttgatgcgcagattgttgataacaccaatgcatggaaatccgcggacgtagttcttgataataaaattaatagtaattttctgcgtacgcttagggttcctgagagcagtatctctgtattacctactgttattggaagaaagaaaaagttatttgcgtggaatgactccggcgatccgatagccgtcctcccggagtctggttctgcggcagacgtccttattgatcttgcttcaagtgacggattcagcctcattgggcaggcgacctattcgcagattcggagtttcaccggatcgggtaactcaatcatgtgctgcggttgcgaaacgcttctggatggcggtcagggcatattcgatcaggtccccggcggggcggtgatgaccactccagacgatggttgtgtgtttattcgcgattctattgggcgattatggaagcgccggtatgagggaaatgaaatcctgatggcatgggctggggctaaaagcctgaagcagactgcagtcccgcaggatcctgcttttagaaagtgccttcaggctgccgcctctttgtctgagtcagggtatcctcagtccattattcgggggctggataacgccacaacatacctggctgaaaagcaccatattcgctgcggtaacttcccggagtatatggcttggaaactcccgccagacggcggcggccggcggttcggaattaaagggacttgggctcagggactcggagcaggctggtttgttgtacaggccaaccatcctctatttgatttcactatcgataacaccggcattgattttaatctggatgcctataccgatgaagaaataaaagtcctggtcgaagaccactatattttgcgtctggaggcgatggttaatgccccggaatttaatgttcatgcgggcaaccacccagggactgtactttacagcctcggtaaatctgattattcagcggtaaccgcacagtggcctgatttgactacagtgcttccgtctatccagaacgtgggcaaagcggcgtttaatattaagcactgcggcagggatttcctgctgaagaactgcggtgcgggtatggggcatttccactccgtctggacacaggataactctcagccgggatatatttattcctgttacgacctgacgttgacctatgaggactacgtcccccatacagaagaacgcggggggcttattttcgaagcgtgcgggaccctgtctcttgaaaatatcctgaccggtgcgggaggcgtcgggcatttatgcatctgggactgtcgaaatgtgaccatcaacaagcacatctcgatatgcggcgcacctacctacgcgcagtcgaacccgaatctgtatgccgtggaaatctgtaactctgagctggctgtctatggtgtgcatgcccagggctctggcaagtttatgcgtatcggctttaactcacgcgtgacgttctaccacacgacggcgtgggacattgcgcagatgattctgggtaccaatgacctgagtctgctgaagtatcgtggtcagcgagctgcggtccttaacgaccccattaaggtcttccttgaatctggtttcgtccagtcagccaacactgcgaacaaaggctggccatgccagccccttatcgtctttgatgagactatcggtagtgatttccagctgctgtttaatctggaggccaacaacaaccattccggttatgacactcaggaagaggcgctgcttgcactgattgatatccggtctaccagtgctaacggtgaggttgttctgggtgagcaatccaagctggaaggtaatacgactaactatgtagtacgcctggcgaataagaaccagctcaaggacgtatttacccgtaaaactaacttcgtccgtatccgttacaccgatgataactcccagtcgtcatttgctttgcgttatgcaagtcacccgcttcagggctccgttgttgggcggaatgcgtcgtactcatacccgtacaaacgccctggcctgtacagcgtcaaaatcaccattccatcaggcggtggttctttctctgtcacgaaaaacggcttcaccatttatgagcaggaccaggtgggtattcatcgcatcctggttgacctgcgattccaggaaacggttcagatcactattaacggtggcgaaaccgtcaccatgacaaacgccgaatggcgatattatgtggggtag

SEQ ID NO: 268568 - DNA, 300 bp, Klebsiella pneumoniae
atgtcagatatagattatatttcatacattatttttggccttattgtatgggctcttctgagctttatgggtaagcatgacagaatacgacataagtttgagttctcagttaaatggctgtttgcattcttatggccgctgacactttttcttgcttcgttcgtatactatcggcaaaacagtactatggtagctggtattttgtttattgtaggtagcgtcctctgcatccctgcttatgtggttgccagtgagaatccacaccaagcgtggaagaaaataacttcattttttaaatag

SEQ ID NO: 268569 - DNA, 1809 bp, Klebsiella pneumoniae
atgagttattttggacttgatcaatccaaccagcttaaaatgctagactctgctgcgaacaaccctataggtgtaagcagtgataatggctttttcacgaatatgtttggggccgctggctctggtatttattctggattggttgctaaacctgatcagttactatgggcgggggtggacacagtagtttcaccagtagcaaaatttgtaaatgaaaatcttgatgtcaatgatacatctgaagaatatattaaagaacaaagatccttagctgcagctcaagttaagagattgacaccagacgcagcaactacaggaacagcagggcagatactttacggcctgtttgatatgggggggcaggcggtagtcggtactgctctcgctgggcctgctggtggtgcggctgcagtaacggggttacaaggattctctgaatatgagcgtcttcgtgctgaaggggtagatctgtcaaccgctcaggatgttgcgctaattcacggggtaacagctggtgctggtacgttgatcccaatgagccttgggttgcgcgctggtggtgtgctggcggaaggcgttggcgcgcagattaccagaactggtgaaaatgcgttactcaatgccggtgctaccgtggcgcgcgctgcgcctgatgttgcgtatgctgctggtactaaccttgcttttggtatggcgctacgcggaatgacggcagaaaccctgcgcaatgctggctacggtgacatggctggtcagtacgatgtttttgaccgccagtcgatggcgattgatgcggtacttggcgttgcgtttggtggtcttggtcgctttattaattcacgcggggagaatgttcgcgcgccagagtttacaccgtcggatgttgatgctgcgctggcagctaattcagcacaccatgcagaaattgatatagctcccggagtaccgattaatgttctttcacgggatgcgcatgcccgggcattacagcaagcaatgcgcaatatcagcgaaggtaatcccgtcgatgtggccaacattgtcgactcagcagcattcagcgagatacccgggcgccgcagcctgattgcgcagtctctggatgaggtactttttaatgcggaggaaggaacctcagcccgtttggcagatacacgctggctggaagaacaggccgcacagttgctacctcgcggcgaacgtcaggtttatctgtctgaaatggctaacagtcagcgcattattgataatcttactgagcagcgcaatcaactcctctctcaggaaacttcaggtagtggaaaagcgctagcacgtgctagatccgataagcaggatagattgcgggaccttaaccagcgaattacagaggcgcaggggcgtcttgagttttcgcgtaatactgtggcaccccatgagcctggcgggcaattctatgaagcgcgggccgaactttcccgcagacgtcaggcggaaagcgttcttaatgcgcaggcgctctcatactataaaaccgccgaagtgcgtagcactgatgaacctgcgcaacttgataccgctaccgctgtcagggatattgaccgacagcggacacacagcgaaagtgaaacaggtgacattgatgtgaaagcagctgaggaatctctgaccacctccccggatatgataataaccacactggatgatgaaggtaatcctcagtcccgtcctgctcgcgaattgcttgacgaggcgaatcgtgaaaatgaacaggcttttcaggattcgagtctttttgatgtcgcagttgcatgtttcttgaggggataa

SEQ ID NO: 268570 - DNA, 2532 bp, Klebsiella pneumoniae
atgccaagacttcctttttatgaccgtcaggtaacaactcaggggcttggcgccaatcctgtcaatcttccaacaacctcagctgatcagcagtttttaaatgcaggtgcggaaatggcggccagagctaccgaagatattacccgaacagcgaatgataccgctatgcagggggcttcacttaatctggacaacctaaaatacaatctggataaagccgttcaagaaaaacaaggcttggacgccaggacggcggcagatgattcgttaaaacaatttgataaggcttccagcgaattagaccagacaataccagcaagccgtagggaagactggtcattattaaaggccactacgcgcctgcaactgcaatcatcaactgatagtcatgcacttaatgagtatcgccgatatcaacaagggcagtttgaagggaggatgaatattgccgagctggatgcaggaaaatattgggacaatcctggggcattaaaaatctcagaagccaagaccttagatgcaatcgatacctatgcggatatcagcgggtggtctcctgagcaaacggctgcgatgaaacaagaaatgcagcaaaaaatggctaaaaacgccaccctttccaacatagcctcccgcactcagagcatgatgaatgccgatggaacgctaaactcctatgatgggacgattgatgctgatcagttgacgactgcgatgatatggcaagaaagcaagggacgtcagcttgatgcgaatggccaacctctcacctcaaaaaaaggggcagtaggcattgcccaaataatgagggggaccgggccggaggcggcggaggcggctggtcttccgtgggatgaagagcgctggagaaatgatccagcatacaactttgcattaggaaaagcgtatctcaataagcagctaaaaacttttggtgggaatcatgttctggcgttggcagcgtataatgccggcgcaggtatggtgaatgactggattaacggaaccaacaccaccggcaaaaataaaagcctactaaaaattggagacccccgtacaggggcgattaccaatgaagatttcgtacgagccattccctttggagagacacaaaattacgtcgctaaaataatggactcggtgccgtccgtaccaaaaacagcaacgatggcagccattaccgataccccatattttcaccagttatcaccgcaggatcagtccagcgcattatcaggtatggctgagatactgaataagcagcggcaggctagccgggttgttcttgatggtgtatttaacgacgccagcgccgcactgcgtaacggtcagcaacctccggttatgccaacgcgaaaccagcttatttcgacttatggactggttcatggcggccagctgtacacgcaattacagaacgatgaggcatttggtaataacgtcaagctggtgaaaaatatccctccagcgcaacagcaacaattattaaatgaggcaaaaccagagccgggaccaaattatgccgaacggcttaaaaattacgatcagcttcaatctgctatcagtaccgtaaatagcgcaaggaatgctgatcctgttgcgtttggcatgagagagggggttatatcgcagctagacatttcttctcccgaaaatttttctcaagggataaagcaaagaatgctacaggcaagccaacttcctttgaattatgggacacctctgagaatttttaataatcaagaggcctctgctttaggtaaaatgttacgtgatgctcctgcgtctcaatctcttacatatcttgattctatgtatcaatatttaggtggaacccctgcttatcaggcagcactgcaacaaattagtggttatgctccatcagctgcagtggcgggtataattatcgggaaaagtggtagtgtagttgcaaattcaggatggttttctgatacaaaagtaactccccttgatgcggcaaaaacaattattgagggtgctaacgccagaaaaggaatgagctccagcgtcaatggtgtggtgaaccagacaaagggtatcactatgccgaaagattctgagctgcgtccagattttgattcattcgttggtgttgcttttgctggtgattcgaatggtgccgctcaagcttatgaagtggcgaaagattattattccggaattgcagcaaggaatggaaatctatctggagaatatgataagaaattgtgggagcaggccataaatattgctactggcggaatccatgattacaacggtcaaggacagataatgcttccttggggtatgtctgcaagtcagtttgatgacgcagttaatattgcctggaaagatcaagtattagatgccggagtaaaagcccctcccgggcaatatggattacaaaaccatggagatggtcaatatcttgttaagcttggtactggctatcttatgaaaaacgatggaacaccagtaatcctaaatgttcagcaaccacgagttaggtttgttggggggatcccacaatga

SEQ ID NO: 268571 - DNA, 228 bp, Klebsiella pneumoniae
atgaatatcaccgagctggctcatagactgaaagaggctgcagagaaatcaattgcagaagaagggctagcatggtttagcgaagacctgctttctgatgacggcggtatcgctttgcatgctggggacgctaagtttattgcattggcaagccatgagaacgccattgatctggtagaggcgccggagaaggcgcagcagatggaagcctattggaaaactctatga

SEQ ID NO: 268572 - DNA, 495 bp, Klebsiella pneumoniae
atgctgtggggatttggccagaccggcgcccggctgggggaagtgctggccggtcgacgcatcaccccgctcgcgctgacgcgttttaccgcgctcgccatgccgctctgttttctccttggtgtcagcagcacggcgtatgccgggtgcgcagccgggtttgtgctcggctatggcgcgataaatgggctggtgacgattgtgaaagcgacgctgccgctggcgctgtttagcgcagaaagctacgccagccgcacgggtctcctgctgatccccgggcaactgatggcggcggccgccccctttacctatgcatggctgaaccatcggctgggtatcgtgggtggaatgtggatttccaccgggttaacgctgatcgttgccggactggcgctggcgatggcgcgatcggtgggtaaaacagagccggacaagcgtccagccctctgcccgggtgcaaaacgtgggccggctgaacatctgccggaaccataa

SEQ ID NO: 268573 - DNA, 192 bp, Klebsiella pneumoniae
atgtcggagcatcccggcctgattctgaaagctctttataatcgttgtcccgccgtttcgcgctgcctcgccctgtcagccgcagcccgaaacgggacgggtcactcaggcgcgcagtttaacgtcgatcgcgtcctgggtgcgcgcattgcgctgggtttcgtgctgatgctgacgaccggaaacatctag

SEQ ID NO: 268574 - DNA, 5892 bp, Klebsiella pneumoniae
atgggtataaaagcgcaggtgagtatcgcgcacaagctggggttcacatcacaccagaatgcagttccgctgttacgtgagctcatcttgcataatgagtccgaagagacatttcaggatctgacgctgcatctgcggaccgcgccagccgtgctcgaagataaaaaatggaatatcgaccgcctgcttcccggtacttcactggatatcagggatcgggatgtcaaacttaatgccaaatggctcgccgaactgaccgaaagcgtactctgcgaagtcaccataagtttgtgccagggtgaggaagaaatcttcattactcattattcgcttgaggcacttgcgaaaaatgaatggggcggcagcgcaatgattgaattgctcccttcatttatcattcctaatgatccggcggtagatcgtgtactcaaggcagcctctgatgtccttcgccgtgcaggcaagaatgacgctcttgatggttatgaaagcaagtcgagaactcgtgtctgggaaattacctcagctctctggactgctgtctgcaacctcaatatcagttatgcccttcccccagccagctttgaacggaatggccagaaaattcgcacaccaggcatcattctggaaggaaaagtcgcgacctgtctggatacaaccttattatttgcttcagcactggaacagattggtttgaattcactgctaatgctcagtgaaggtcatgcgtttgctggcgtctggttacaaccacaggaattttcgcagctagtgacagaagacgtctctgcggtgcgcaaacgtgtcgacctaaaagaaatggtcgtatttgagacaactctcgcgaccagagctcacccgccttcatttactcaggcatctgatgaagcgttaaagtatcttaacgaggatgtttttcacgcagccattgattcgcgtcgcgcgcggatgcagaaaattcggccactggctctgggtgtcactcgccttgaagaacagcctgatgctgaggaggttatttctcatgggtttgaggacgcaccctctctccctgatgttgacattgatattgaaacagctggcgaaaaagaagctgggggccggcttgtacaatggcaacgaaaacttctggacttaaccacccgtaaccgcctgttacacctgcctgaaagcgctaaaggcattcgtttgatctgtgcgaatccgggccatcttgaagataagctagctgaaggcaaacgcattcgcattgtcccgctccctgatctagagagtggaggccgcgatgccgaactttatcagcagctcacaaacgagaacctgcgggaagaatacgcccagattgcgctggaacgcggtgaagtcgtctccgcaatggaaaaataccgcctcgagtcatccctaatcgacctctatcgaaaatcgaaaagtgatttggaggaaggtggtgccaacactcttttcctcgctgtgggcttccttaaatggaaaaaatccgctgatgatcccaaaagttactcagctccactgatactactgccgattcagcttgaccgtaaaagtgtactttcgggcgtgaccatgcgtttgctggaagaagagccccgcttcaaccttactctgcttgaactgctacataatgactttgctctgacaattaacggcctcgatggcgatctgcccaccgatgaaagtggtgttgatgtggatggcatctggaatatggtacggcgtgctgtgcgcgacatacccggtttcgaagtcacccgtgatgtcgtgattggcacattctcttttgccaaatatctgatgtggaaagatctaatcgatcgggcacctcagttgatgcaaagtgcgctggtaaagtatctcatcgaacgcggccaggacaatgccgttctggataagagcggagaagtcatcaacgttgaggaactcgatgacaacgtcaatacgcaggatcttttcctaccgctgcctgcagattcctcgcaaatcgccgccgttgtagcctctgcaaaagggagggattttgttctggatggcccccccggtaccggtaagtcgcaaaccatagccaatatgatcgcgcataaccttgcgctgggaaggcgcgtactttttgttgctgagaagaaagcggcactggatgtggtctatcgcaggcttgaggctcagggactcggtgaattttgtctggaactgcactcgagcaaaacgtccaagatggattttctgaaacagctagagcgggcatgggatgcgcgtgatctactgaccacctcggagtggaaggaagaagcggccaaggtgcagcacctgcgagacaaactcaatgaggttgtccgtttgctccatctgcgctggccaaatggcttaacgctccatcaggcaatgggcacggttatcagggatgcaagtagcgccacgccgcactttagctggcctgcatcgactttgcattcttcttcagagatgactcagttcagagagatagtaaaacgtctggagctgaaccgtgatacctggaaacagcacggcgatcattttgacctcattacgcaggctgactggaccaatgggtggcagtcttctctcattgctgcagcaaattcattgcctgcaatcatcgatcaccttgaaaacgccaccgaggaattactgaaggcgacgggagttactctggactctactgagcccgagagactgtcgcaactaacttcattctgtgaattattgacggaagcttacggcattgatctgaatttcatgttcgcaccggatgccacaagccgtatagagtcagcgaataaagccgttcacctcctgaaagagattgaagtgacaaaggctaatctgtcagttacctaccctggtaacagctggcagtacgttaatgctccgcagatcagaaacgcacttgacgtcgctgacaaaaaattctggttctttgcgaccagtgcccgcaagaaagtcattggtgaagttatccgacaatactcgctaacgtcagctcccgacttatccgttgatctccccattgctgaaactctgcagacattgctgcaacgtctgaccgagcttaactctgtcactttatccctgccgggatgggctgggctggataccaacgttgcacagttgcagaccaccctggaacttgcagaatctatccgcaattcgcttggtggttttgcttcttcgccacagcagttggtcgagatccgcactgctgtaaaaaatctgattattgatgccaatgaccttctcggttcgcagggtgttatctccgccctgactcggaaactgcgcacagcaatcgccaatttcaatgatgcacaggttagcttctgcaatctgataaaaccagctgaggacaaaccatcgctcccggcactgcgtgactgcgcactcaatatcctgcaacatcagtctgctcttaaagcctggagtgactggagccgtgtacgtgaggaagcgatttcacatggcctgcagccagtgatcaacgcgctgatccatgttaactcaggagaaataagcgctgcagagatttttgaaactgcctattgccgctggtttgcatcgtggatgatcgattcagagccgctgctgcacaattttgtgccggctgagcacatgagtgatattgaggcttaccgtgctcaaaccgatcgtctggccaaactgacagtacgctatatccgtgctcgtttatgtggcgtcattcctgcaaaaaatgaggtcagcaagcagagtggttttgcactgcttaaacatgaactacagaaatcccgtcgtcataaaccggtacgccagatggcagccgaaatgggcgatgccatggccaaacttgccccctgcatgctgatgagtccgctttcagtcgcccagttcctgccctccgaccaagccttgtttgatctggtgattttcgatgaggcatcgcagattgccccgtgggatgctatcggcaccatggcgcgtggcaaacaggtggtaatcgccggtgatccccgccagatgccgccaaccagcttctttaatcgtgcagctaatgacacggacgatgatactgaagaagatatggaaagcattctggatgagtgtcttgctgccggcctgtataaccacagcctgagctggcattaccggagccgtcatgaaagcctgattaccttctccaaccatcgctactatgacagcaacctgattacgttccccgcttccgaaacaaagcaaagtgctgtccagtggtgcaaggttacaggcgtctactctaaagggaaaggacgtcataatcaggtcgaggcagaagcgatcgtcgctgaaacggtgaagcgactgactgataaagagttcgttgcatcaggcagatcgataggcattatcacgctgaatactgaacagcaaaagctagtcagcgatctgctggaccgtgccagacagcatcaccctgaaattgaacccttcttccagtctgaactggaagaacctgttgtggttaaaaacctcgaaacggttcagggggatgaacgcgatttgatcataattagcatcgggtacggcccgactgagccgggcgcaaatacaatgtcgatgaattttggcccgcttaatcgcgagggaggctggcgccggctgaatgttgccgtcacacgtgcgcgacaggaaatgatggtcttcagctcgttcgatccttccttcatcgaccttaatcggaccagcgcccgcgcggttgctgacctcaaacactttattgagtttgcccagcgcggccctgaagctctttctcaggcagtacgtgggtctgtaggcggttatgactcaccgtttgaagaggcagtagcaaatggtctgaggagaaaaggctggcatgttgtcccgcaaattggcgtatcccgtttccgtattgatttggggatcgttcatccggataagcctggcgactatcttgtcggtgttgaatgtgacggtgccacttaccatagcgcagcaacagcacgcgatcgcgataaagtccgcagcgctatcctacagggcctgggctggaaattactgcgcctctggtcaactgaatggtggattgataaagaaggtgcactcgacaggctggatacagcaataaatcgcctgctggaggaatccagagcagcggaagccgcactgattgctgaagcagaaaaacaaaagcagattacgccagtcatcggtcacgtaaccaatgatgccagtgaagacatactggtatctgaaattacacctgtcgctaatgatgaagaaatatccacgtcagtaaaccctatcatcacgcctcccgccgaagtaagcgaagatgatggtggcactgagttgaagtatgcatctacagcttctcagaataacaacaagccagcgcatgccggtaagtatgtcgttaacgatcttcaggaatggcacgacaggacagatgcagaacaattctatatcgctgaatatgatgagacacttaaaaccctcattgaagcggtggtaacaagtgaatcacccgttctggatacaacgcttgtgcaccgcatcgcacgtatacacggcttcactcgcgctggcagactgatacgtgaacgcgtaatggaaattgtggatcaacactatcaccttgcagccgatcactcaggtgaaaacttcgtctggctgtccgctgagcaacgtgctgactggaatgcgtttcgtttgcctgccacggataacgacattcgccaggttgacgcgatccctagtgaggaattacgcgcactggcgctgagtattaaaggtgacaataagatacaggaaatgacccgctcgcttggaattaagcgcctgaccagtcaggcaaaaaaaaggattgaatcaatacttaatgttgtttga

SEQ ID NO: 268575 - DNA, 312 bp, Klebsiella pneumoniae
atggcgatgaccgaactgctcgacccgccgcagtatgaaaaactggtggcgggctgtcggcggattgggctttccgatcgcgacgtgcattactatgccgaacatatcacggtcgatatcggccatgcggacggttggttgaacaatgtgattgtgccgattggcaaaaaacatccggcggcgatggaggaggtctactttggcgccgcgctgcgcctgcaaacctgcaacgattactatgatggcctgctggcggcgctgcagtcgctggacggcagcgcatcatctcacagcgtaccgccttctgagtag

SEQ ID NO: 268576 - DNA, 288 bp, Klebsiella pneumoniae
atgaccaacggccggttgtttgccaggacgcggttggctttccctctgcaccaaagccatgcaatgccccacttttactccccatttttgggaggcgatgccccggttggcggtaaatcgctgatggaacggctatttggctcctggcatggtgcttgcaagaacatcggcagaaagcagcgcaacagacaattcagatcacacaatagctggctagggttccggttcaccgcggtgaacgtctggtccgagagctggcgacctcggcgaggttacacggcgggataa

SEQ ID NO: 268577 - DNA, 837 bp, Klebsiella pneumoniae
atgaaaaacaaacttatattgcaagatggattgggccttagtcctaatggaacacaaatttcttttacatggggagatataaaaggattacgcagcaaaatactttactgggatagtattataaatcttgattcaggtattgtgcaggcagatgaacgcccaggtataggtaaattaaaatcatgtggcctctatgaggatgcatatataaaaattgaaggtcctggtgatctaaactccttaattaccatcgccacaagaaaaaaaataaaagaacttcttgctgacaaaaccatcaactactctatgagtgaactgtctgaaaaaatatttattgattctggtgatgcagtacaaactggaggttctttgctacatttaatgaatagcctaccggtaatatccgacactataccaatagatgaaatccttgaattcaggtttcaacggcaagatatgcatagaaatttaattaataaaataaacgaattagaaattaacgtgagtgattctgaaaaccctggagcatcattaaaaaaagcgatccatgaaattgatgtatcatgctctgaattaattcaggtatataaagaaagtaaatttcaatgggtaaatggaagtattgacatcaacttcaaccttaacaatataattgaaattgctaccaaaacatttgccggagcatcattactcctaactgaatctcaagcagccattgcaggaatggccgcaggggctgcttcaatttttaaatttgaaagctcttataaaataaataaaatagacaagagaaacccatttaattacgccgttgatgtcacgaaaagattctcataa

SEQ ID NO: 268578 - DNA, 729 bp, Klebsiella pneumoniae
atgagttttgatccatttggcgatttcgataccgcaggctaccttcaaaatgcccttcagctcaaggagcctgaagaggtcaaacgagtagaacatcttgcttttgaagcaagcattgaaatcgcattcaactacttagctcaaacagaaattatagattaccaggctgtacttaaagtccatgaaatacttttctccgatttttatccctgggcaggaaaagaccgtaacgaactagtcccccatcttgccgttttcaaaggttctcaggataacccccgtcacacggtcttcgagcgacctgactctatccgtatggctgtcgaatacgcccttcatttggccaataacaagcaacgtttccgggaaaggcctggagaagtcatggggttattagcctttgcacatcctttcctcgatggtaatgggcgtactattttgcttgtgtttatggaactcgcctttcgagccggttttgccattgactggtcacagacaagtaagaatgactatttgagggcactcagcgacgaaatcggagaaccatctaaaaggcaccttgatcattacctggaaccattcgttgtgagcatcacaaaccgggatgcctggccagctattattggggggattaaagggctggatggtttagataaagagaacatatcttatgaaagcctggacgatcctgaagtacaaaagatttatatgacttaccgttcagaataa

SEQ ID NO: 268579 - DNA, 1209 bp, Klebsiella pneumoniae
atggtaccggagattcggtttaaagggtatagtggggagtggaaaaataaaaaaattggggacattttagctgaaataaagcgccccattgaattaatggataacacatcataccaactggtgacagtaaagcgccgcaacgaaggtgtagtacccagagcggttctaaaagggaaaaacatactagttaaaaactatttcattgttagggccggtgattatctaatttctaagcggcaagttgtgcatggtgcaaatggaattgtaccagacaatcttgatggcgcagttgtatccaatgaatatctcgttataaccgatagtgatgatataacagctaagtactggactgtttcatcaataagacctgaaatgcataagctttttttcgttagctcttatggtgttgatatagaaaagttggtgtttgacgttgctgattggaaaaatagaacaatcgtcattccaaaaatcactgaacaaaaaagtataactgactatttttcaaagttggataatctaatcaaccagcatcatcaaatgcataacaagctcagtaaaattaaagaagccatgctagaaaagatgtttcctagaaaaggtgaggccatacctgaaattcgttttaaagggtatagtggggagtggtcaaataatcccattgctgagatttgtgatgcaacttttggtggaggaacaccttcgactaatgagaagtgcttttggcaaggtgatattccttggattcaatcatctgacctcagagacggctgtgttagctcagttaccgcaaaaaaatatattactaaagcagcgataaataagtcagctgctaagttagtttctggtaattcgatagctatcgttacaagagtaggcgtaggaaagctttcgttaatgaaaaatgagtacgctactagccaagattttttatccttgagtgatttgaaagttgatgcacaattttcggcttacgctatatggaaactcttacaaactgaaaaagatcaagttcaaggaacgtcaatcaaaggaatcacaaaggaagaattgctatcaaaaacaatcactttcccaaaatcaaagcttgagcaagcccaaatcggcaactacttccaaaagctcgatgaactactcaatctacaccagcaacaaattaccaagctcaataacatcaagcaggcttgcttgagcaaaatgtttgtatag

SEQ ID NO: 268580 - DNA, 411 bp, Klebsiella pneumoniae
atgcttacctggtttatggatcccatccactggtttggtgagggaggcattttcccccttctggcgcagcacatcagctatagcgctgtcgctctggcgatcgcctttatcatcgcgtttcccgtcggctgctacaccggccataccggcaaaggggaaggcctgctcatcggtaccaccaacgccctgcgctccctgccctcatttgggctgattattctgctggtgattttactttccggcgagtttgagtccgatatggcctttattctgccctgtattctggtgctggtggcgctggcgctcccgccgattgcgctgggtgtgcatgcgggtattcgcgcgctcgatccctatgtccttgatgccgctcgcggcatggggatgacgcggctgcagatcctgctatag

SEQ ID NO: 268581 - DNA, 288 bp, Klebsiella pneumoniae; identical to SEQ ID NO: 182627

SEQ ID NO: 268582 - DNA, 237 bp, Klebsiella pneumoniae; identical to SEQ ID NO: 77389

SEQ ID NO: 268583 - DNA, 366 bp, Klebsiella pneumoniae; identical to SEQ ID NO: 25794

SEQ ID NO: 268584 - DNA, 426 bp, Klebsiella pneumoniae; identical to SEQ ID NO: 25795

SEQ ID NO: 268585 - DNA, 276 bp, Klebsiella pneumoniae; identical to SEQ ID NO: 25796

SEQ ID NO: 268586 - DNA, 366 bp, Klebsiella pneumoniae; identical to SEQ ID NO: 122249

SEQ ID NO: 268587 - DNA, 456 bp, Klebsiella pneumoniae; identical to SEQ ID NO: 25798

SEQ ID NO: 268588 - DNA, 159 bp, Klebsiella pneumoniae
atgacctataaattgctggatattatccggaccatcaacgtcctgactcgtcaggcacatcagttgtggttatatggtcagatatcacaacaggttcatgaccgaattatcctgcaactcctgagctcactgcgggttgcgatgggctttgttgaataa

SEQ ID NO: 268589 - DNA, 774 bp, Klebsiella pneumoniae
atgggggttaacgtttatgcaagtgtccctgtatcagagtggttaactaaaaatgttggtaaaaataaacggcgcaaaaatgaatcagatgcacttcttgctatagaaaacccagcagatcttgcagttgaagctatacggagtttacggacaagtcttcattttgcaatgatggaggccaaaaataatgtattaatgatttctggagcaagtcctaatgctggtaagacattcattagtacaaatttagcggcaatcattgcatctactggtaaaaaaatattatttatagatgcagatctccgaaaaggctatgtccataaaatgttagggtttagtgaaagtgctggtttatccaacatcctttcaggtcagaaaaaaattgaagatgttgttactactgttaaaaatgcaggttttgattatataagtcgtggtaatatcccacctaatccggccgaactactgatgcatccaagatttgaaaatcttctaacttgggctacaaataattatgagttggttattattgacacaccaccaatccttgctgttacagatgctgcaataataggaaagtatgctggaacaacattactggttgcaagatttgagtcaaatactgtaaaagaaatttcggtcagtatcaaacgatttgaacaaagtggtattgcaattaaaggatgtattttgaatggtgttgtgagaaaagcaagtagctattatagttatggctataatcactatggctattcatatactgataagaaataa

SEQ ID NO: 268590 - DNA, 264 bp, Klebsiella pneumoniae
atgggccttaaaggtaattttattgtcagtacggtaaagggggattcagtattcacctacgccaaaattcaaaacttcggcggcaactccgatttaatcaacttgagtgttttttttacaggcaacagcgatgacgaactggcgccgggagcgatgaagaactacaccttcactacggatatggcatcggcatcgagtctccttgaacaggggtatgcatatctcaaaacgctgccggtattttcaggtgcagaagatgcctga

SEQ ID NO: 268591 - DNA, 354 bp, Klebsiella pneumoniae
atgaattttaagttccggggcgttaaccatcgactccaggcgcaaaatgtaattattctgtaccagaaccgctatttctgtatctgtataattatctacgttgaaattgataccagtattatctacactgaaattaaagtcagggttattcgcctgaacaacaaaaaaaccagccccttctgcgactgcaaaaagaccgtgaataccaaaccggcagccacctccatcaggcgggagcttccacgccatcgactctggaaagttcccgcagcgtatatgatgaagttctgcaatatatgtcacgccgaaatctatacccacaataacagactgcgggtagccagatgcagatag

SEQ ID NO: 268592 - DNA, 225 bp, Klebsiella pneumoniae
atggcgccggaggtgtcctgcccggcggcgctgcgcttgccgggcctggggtatatgggacttacgggaggatcccgtaggccggataaggcgaagccgccatccggcacaaaggcgagtatggcaccggtggtgccctccccggcggcgctgcgcttgccgggcctggggtatatgggcctgcggggtgccggatataatgttattggtatgcaactctattaa

SEQ ID NO: 268593 - DNA, 408 bp, Klebsiella pneumoniae; identical to SEQ ID NO: 267600

SEQ ID NO: 268594 - DNA, 894 bp, Klebsiella pneumoniae
atgagaaaattaatcgtagttgcttctgttgctgccagtttactgctcgggtgtgaccagaagagtactgacaagcgtgaaaccctgtctgaagcgcttgttgctaagtcactctctaacatggttcccgttcagggcggcgagtttttaatgggtgattttggaccattagtcggtcaaaaactacctttcagcataaaccaggatgataaggtattacataaagttgtattaagtgatttttcgatatcaaagtttaaagttaccaacgatgattataataaatatctgcaaataacaggggtaaaaaaagcacccatccatatttttttaaaaaattatccatccttgcaaaaaggagattattctgttggtgttacctggcaacaggcaaaagactattgtcagtggttaggtaaggagtctggtaacaagattgatttaccaacagaggcgcaatgggaatatgcagcaagatccagaggtcaatattttcagtttccaacaaataatggtgagtatttacctggaaaaaatgttccgggtaaagatgaattagataaatatacagatggttttggtttcccattttacccagtaggcaaatatcccccaaatcccctgggtctgtatgacatgggacttagtggctcagaatggaccaatgactggtatgcgtcagattattactctcattctccggtaaacgatccccagggacctgcgcagggtactaaaaaagtcctgcgtggatatattggcggcgacagacagtacgctttaaccatgttcaggcaatcaaaattgccagttccgaagatcgataaagacgatgactatgaaaaatatggtgttggcccgcagtatgtctttcgttgtgtcgttaataaataa

SEQ ID NO: 268595 - DNA, 894 bp, Klebsiella pneumoniae
atgagaaaattaatcgtagttgcttccgttgccgccagtttactgctcgggtgcgaccagaagagtactggcaagcgtgaaaccttgtctgaagcgcttgttgctaagtcgctttctaacatggttcccgttaagggcggcgagttcttaatgggggattttggcccattagtcggtcaaaaactacctttcagcataaaccaggatgataaggtattacataaggttgtattaagtgatttttcgatatcaaagtttaaagttaccaacgatgattataataaatatctgcagataacaggaataaaaaaacctcccattaatattctggtaaaagagtacccatccttgcaaaaaggtgattactctgttggtgtgacctggcaacaggcaaaagactattgtcagtggttaggtaaggagtctggtaaaaaatttgatttaccaacagaggcgcaatgggaatatgcagcaagatccagagggcaatacattccgtttgcaacgaataatggtgagttcctgcccggtaaaaacatccccagccaggatgagctgagtgaatatactgatggagcaggtattcctatttatccagtggggaaatatcccccaaaccccctgggtctgtatgatatgggacttagtggctcagaatggaccaatgactggtatgcgtcagattattactctcattctccggtaaacgatcctcagggacccgtaaaggggaccgaaaaagtcctccgcgggaatgttggcggtgacagacaatacgctttaaccgtgttcagacaatcagatttgccagttccaaagatcaataaagacgatgattatgaaaaatatggtgttggtccgcagtatgttttccgttgcgtcatcaataaataa

SEQ ID NO: 268596 - DNA, 882 bp, Klebsiella pneumoniae
ttgaattttgcatatagatattatcaggaatatggaacacgattagattcctcaagtttatttaacaaaaagtttgatgataactctatgtgtattttgattttgattgcagcttttaataaggccacatttggacatataaacagtttaataaagcattttgacgtaaacgattttatttctaaaaatgataggcttttagagttggaggttaccggtcctgagcaaaatggtgtattagtttgtaactcaccatcctggctcttgagggttattagtgactatatatctaataatccccaggcatataaggtggtctcaaaaatgatcatatctctcgcgtctagcgggtttgtttctgcatcaaaaaatcttataagttttgataaactaaatgaactaggttatggtaacaatgtccatgtttttataagagacatatataaggaaatagcatatgtttaccgagatgatacgcattattggcttcaaagagctaaatcagaacttatatcggcaaatacacttagtgaagttattgatggaatgggttacgcaagtaaagtaaggttagatagtgctgagctaaaaaaccaaacatattacagtgccacattggtcttagctcaactgtctgcaagggcattatctttaagtgatgaaaaaaaatatgccttaagtttctttgagaatgctttggaatccattgagaattatgaaaataactctaggcatgtaaataaaatgatgtataaaaaagatggtggcgttaaatatgcaatagactatcttaaaaaaacacctccaattgagctgcttccccgaaaggttgagctaaaagaattaattggattctatgaaagtcgcaaaggtaataaataa

SEQ ID NO: 268597 - DNA, 156 bp, Klebsiella pneumoniae
atgatcgtgcgtcccccgcaacattggtttattcgtttgtttacctggcatggatccgttctctccagtatcatctttcgactctccctcaatgttggtatgtccattattgctatcgtgttatttcaatggtatgaacagctgggaattcggtaa

SEQ ID NO: 268598 - DNA, 2739 bp, Klebsiella pneumoniae
atgcccgcattatgcgatatttgtcaggaaagaccggcaaccagccgcgtcactgttgttcagaatggtcaacgtaaaacgatagatatttgtgattatgactaccgtcagctgatgagacatcagaacatcatgaacccttttgattctttactgggaagaggggggctctcagggttctttaatggatttggcaataacacccgagggcgtgatgaggatgatatttttggtgaagtaccgcgagaatcggtagatacaacagaagcattcagtaagcagtctctggagttattgcaacgagctgcagaaaaagctcaccagctcaatcgcagcgaactggataccgaacatcttctgtatgttctcgcggacgctgacgtctgtgctgcgttgtttaaagagctgaaaatatctcccgaagacatcaaaagttacatcgaccagaatgcctatacaggtgcctctgagacaggtacttcacctggagatctttctatttccccccggcttaaaaaggcctttatgtatgccttccaggcctcccgtgaactgggtcattcttatgtcgggccggaacatttactgattggactcagtgaagtgactgatagtgtcgcgggttcattactgaagaaatacggaattacgccagagactattcgccagaaagtggtgaaaatcgtgggtaaaggagcagaggatggtcgggtggatacccctaccggtactcctaaccttgataaagtcggccgtgacctgacggaaatggcgagggccggtaagctcgatccggtcctggggcgcgcgcaggaaatcgaaaataccatagaggtcctggcacgccgtaagaaaaacaatccggtgctgattggcgaacctggcgtgggtaaaacggctatcattgaaggactggcacaacgtatcgtcaaaggggatgttccggaagtcttacgcgataagcgacttgtcgagatcaatatgaactcgatggtcgcaggagccaaatatcgtggagaattcgaagagcgggctaaacagctgattgacgaagtgacggccaagaaaggggaattaatcctctttatcgacgaactgcacaccattgttggcgcgggtcaggggggaggcgaaggtggactcgacattgccaacgtactgaaacctgcactggcacgtggtgaacttagtctgattggggcaacgaccctgaacgaatatcagaagcacatcgaaaaagatgctgctctggaaagacgttttcagcctgttctggtggaagaaccaacagtggatcagacgatcgttattctgcgcgggttacgtgacacactggaagctcaccatcaggtgactttccaggatgaagcattcgtcgctgcagcagagctgtctgatcgatatgtgacttcccgctttttaccagacaaggctattgaccttattgatcaggcagccgcacgtgttcgtattggcgcaagttcacggccagttgccattcaggagcttgaggcagaaatcgcacacctgaaacgggaaagagactacgcttccacccgtaagctttttgacgatgtgaaacgttttgaaagcgaaatttcagcgaagcaggagtccctggagcagcagacagaagcgtggaaaaacaaaacgggttcagagacgcttgaggtaaccgttgctgcagtcgcggaggtggtctcgagactgacaggtatcccggtgagtgatttgacgcaggaagaaagaaaaaaactgctaaacatggaagaacttctgcagaagagagtcgttggccaggatcaggctgttgccgctgtcagtgatgctgtccgcctttcaagagcaggtctggggcaggcacatcgtcctgttgccaccttcctgttccttggaccgaccggtgtcgggaaaacagaactggccaaagcaattgccgaagcggtatttggtgatgagcaggctattatcaggattgatatgtctgagtatatggaaaaacatacggtagcccgtctgattggtgctcctccgggttatgttggttatgatgaaggtgggcagttgaccgaaaaggttcgacgtcgtccttacagtgtgatcctgctggatgaaatcgaaaaggctcacccggatgtttataatgttctgttacaggttttcgacgatgggcgattaaccgacgggaagggccgcgtgatcgacttcagtaacacgaccattattgcaaccagtaacctcggttcggccgtcattatggaaaatgctggattacctgaagctgagcagaaaacacctaaagcactgcacgaggagttgatgcaactgctgaaaggacatttccgtccagaattcctcaaccgaattgatgaagtgattgtgttcaattccttgtcgcaggagaacatacgcctgatcgttcagattcaacttgatcgtctgatacgtacagccgcggcacaggatattaccgtaaaactggatgattcacttgttgaacacctggttgaagtcgggtatcagcctgactttggggcccgggagcttaaacgtaagatccgccaggaagtcgaaaccaaactggcaaaggagatactcagcgaccagctcaaatcaggtgatacagtcaccatcgcttatgatgacagcaacgatagtgttgtgtttaatcatgaaacaatttccgttaaaaaagataatgacagtcagaccgaaaatcaggaaaatgaaaaaacctga

SEQ ID NO: 268599 - DNA, 936 bp, Klebsiella pneumoniae
atggtcctgaccctgcagggagcggtgttggcagtacagctatcactgattgtatcatccgaagataaactgctggatatcatccttgccggggcgcggctctggatgctcacctttgctttgcttgccttctattcgtttatcgatgttggctgcgagttattcaaaaccagtgaccagttaaaaggtttaccttatcgtggcatcgaacagagcctgaagctgacaggggcggtgatttatatcatcttattgatatctctgttatttgatagatcaccacttatcctgctcagtggactgagtgcagttgctgcggtgctgttactcgtgttcaaagatccccttctgggactggttgccgggatacagctttccgctaatgatatgttgcgtcccggggactggattgaacttgatcagttgggtgcgaacggagcagtccaggatatcgggctgacgacagttaaagtccttaattttgataatacgatcacaacaatccctacctacaccctggtgtcaggtgcatttaaaaactggcgttatatgatcgagcatgatgcccgacggatccagcgtagcattaatattgatattaaaaccgttcattttttaggtgaagatgaaaaaaaggccattatcagtcaacctgaactggcacttttgcgggatggtgagctcaatgtcgggactaatgttgaattgttccagcagtataccaatgagtattttcgccaacacgatgatgtttgccagcacatgacgctgatggtcaggcaattacaaccaacagtgtatggtctgccggttgaattctatctttttacgtcgctgacggaatgggtgtcttacgagcaattccagacagaaattttttcacatatcctgagcgtggtttcattatttaaccttaaaattcatgatgtttcatga

SEQ ID NO: 268600 - DNA, 198 bp, Klebsiella pneumoniae
atgattcaagcgattaaagaccatgatttatttatgtatataaaaaacactttattacacagtgatataccggttattcgtgtgataattatttttatcctgctgcattgtatagcgcactatctcgtgctgcctttcctggacaggaaagcagaacagcttcagtcatcccggttaaaattcgttacatggtcctga

SEQ ID NO: 268601 - DNA, 852 bp, Klebsiella pneumoniae
atgacaaaagaaatgtctgtattagcgcctgttggtaacctggattcttatattcgcgcggcatatgcctgtcctatgttatcacaggaagaagaacagcaactcgcacgcaacttgcaaacacatgatgaccttgatgcagctaaacagcttatcctctcgcatctgcgttttgttatccacattgcccgacagtattccggctatggtttaccacaagctgatttgattcaggaaggaaacataggtttgatgaaggctgtacggcgtttcaatcctgacgtcggtgtccggttggtttcatttgcggtccactgggttaaatctgaaatccatgaatatgtcttacgtaactggcggattgtgaaggtagccactacgaaagcgcaaagaaaattattttttaatctgcgtaaaactaagcaacgcctgggctggtttaaccaggatgaagttgatatggtcgcccgggaactgggtgtatccgtaaaagacgtcagggaaatggagtccaggatgtcggcacaggatatggcttatgatatctatccggatgatgaaacagatacccatcacccagtttctccttctctctatttgcaggataaatcctcagactttgccggcatgattgaggaagataactgggatgcgcaagcaacggaccatctggttgcagcgatggatacactggatcccagaagtcaggacattatccgcgcgcgctggctggatgacgataataaagcgacattgcatgaactggcggaacgttacggtatatccgcagagcgcgtgagacaacttgaaaataacgcgatgaaaaaacttcgcagtgcgattgctctttaa

SEQ ID NO: 268602 - DNA, 270 bp, Klebsiella pneumoniae
atgaaaagcgcgattgaacgtcgcatggaaatcgcgaatctggttggagtgagaggtaaggtcagtgttggggatcttaccgaatattttggagtatccggagcgactatccgtactgacttacgtttcctggagtctatggggcacattgtccgctctaaggaaggtgcgaataagcggggaaattcttctcggctgactcagtcatttcatttcttcatgtttgagccgattttttctcccgtaaatgccttgaatcagcctatttag

SEQ ID NO: 268603 - DNA, 1242 bp, Klebsiella pneumoniae
atgagcgggctgagttatctggaaaaactgctggatggggctgaggttgagtggaggacactagatagtgttggccagtttctgcgaggtaagaggttcgtaaaatcagaccttatttcggaaggtgttccatgcatccactatggagaaatgtacacacattatggaatatcggcagaagaaaccaagtcattccttgacgaaggagtcgctgaaaaattacgtgtcgctaatcatggagacgtaattattgtcgctgcaggcgaaacaattgaggatattggaaacggtactgcatggcttgggaaaaatgatgtggtctttcacgatgcatgtttttcattcaaaagcgaattaaattcaaagtatgtttcttacttcctgagaacgaacttatttaaagagcaaattaaaagaggcgtttcatccggcaaaatttcatcaattaatgcaaaaggtcttggaatggctgagatcccaattccctgccccaacaacccagaaaagtcccttgccatccagtctgaaatcgtgcgggttctggataaatttaccgcccttaccgctgagcttaccgctgagcttaccgctgagcttaccatgcgtaaaaagcagtacaactactatcgcgaccagttgctttgttttggcgaggccgaagttgagtggaaaacgctagctgatgtagcaatattaagacgcggaagagtcatgtccaaagggtatctcgaacagaatgcaggagactaccccgtttatagttcccaaaccgcaagaaatgggatgattggctcaatagatacttacgactttgatggtgaatttattagttggacaacagatggtgcaaatgctggaacggttttctaccgtacagggaaattctccatcacgaatgtttgtggactaatcaaaattcatgaaaattatccaattagctataagtatctttactattggctttcaatagaagcccagaagcatgtctattcaggtatgggtaatcctaagctaatgagccatcaggtcgagaaaattactgtgcctatacccttcccggcatcaccagagaaatcaatgctcgaacaacagcgaatagtcggaattctggacaaattagaggctataacattctcattgactgaaggcttacctcgtgaaatcgagctgcgccagaaacagtacgaatactatcgtgacttgctgttcagcttcccgagaccagaaaccgccagcaactga

SEQ ID NO: 268604 - DNA, 288 bp, Klebsiella pneumoniae
atgcgcaactggctgaaacaggcggtgaagcgggctgaagctgatggcgtgcatttttcgatcgccgtgacgccgcataccttccggcacagctatatcatgcacatgctttatcaccggcagcttaggaaggtcatcctggcgctggccgggcataaggatccgcgctcgatggaagtctatacccgggtatttgcgctggacatggctgccaccctggccgttccctttaccgctgacggtcgagatgccgcggagatccttcgctccctgccaccggccggctga

SEQ ID NO: 268605 - DNA, 501 bp, Klebsiella pneumoniae
atgtcgccatccgacctgaagcatattgatattcctgaatggattgacccggctaaaggcgagccgaccctgacactgttcagcgtcgtggatgacaggagcggtgtagcgtaccaggaatatcactgcgtttatgttgaggatgcggaatcagccctgcgtttcctctatgccgcgatggctccaaaaactgaccccggctttcctatacagggcagacctaaaatgctttatctcgataatggacccgttgccaaaagccgtgtttttcaggatgtcatgctgtcgctgggtgtcgactggctaacgcatatacctgcaggaaaggatggtgaacgtgtgacagcccgctctaaaggtaaggtggatcgcccttttcgtaccgtcaaggaagcccacgaaacgctgtaccattttcataaacctgaaacggagcagcaggccaatgactggttgttgcgttacctgcttcactacaatgaacaaccgcaccgtttgtag

SEQ ID NO: 268606 - DNA, 132 bp, Klebsiella pneumoniae
atgaaattgatcctgatctggcgggagaaactgtattgctactgtgggggttgtttgataacgagctgcatgttgaatttgatggtgagcgaactggcccatattaccctgtctcaggcccgatcccactga

SEQ ID NO: 268607 - DNA, 636 bp, Klebsiella pneumoniae
atggacgctcaggactatgggaaacaggtcaacttcgcggacggcccggactgtgggaaacaggtcaactttgcagacgaccgggactgtgagaaacaggtcaacttcgcggacggcctggactatgggaaacaggtcaacttcgcggacggcccggactgtgggaaacaggtcaactttgcagacgaccgggactgtgggaaacaggtcaacttcgcggacggcccggactatgggaaacaggtcaacttcgcggacgaccgggactgtgggaaacaggtcaactccgcggacggcccggactgtgggaaacaggtcaactccgcggacggccaggactgtgggaaacaggtcaactttgcagacatccgggactgtgggaaacaggtcaactccgcagacgaccgggactgtgggaaacaggtcaactccgcggacggcccggactatgggaaacaggtcaactccgcggacggcccgagctgtgggaaacaggtcaactttgcagacgtccgggactgtgggaaacaggtcaactacgcggacagccgggattgcgggaaacaggtcaagttaggcaagcactatgggaaatacagcaattttagcatcccccatatgtcagcaacaaactaa

SEQ ID NO: 268608 - DNA, 1203 bp, Klebsiella pneumoniae
atgaacgctgtcatcacctcttcccagcgccgcgcgctgcgcgcgctgagcattgcctacttcgtacaggctaccggtgcgctgtccgttgccggcagcctgccggccatctcagctgcctggcagctgactgatgcgcagagcgcgcgcttactgagtattttcggactcacctttgcgctggcggccccgctggtgcaggtgctgtttggtcacctgcgccgtcgccggctggtgctcaccggcattgcgctgtttggcctgggcgccttcgcgtttgtgctgtcgccgggctacaacgcactgctcgcctcacgcatcctgatgggggccggcgccgggttcatcggtccggtgctggttgcgctgggttcagagctggtgcatgaacagcagcgcgggcgggccatcggcatggtactgctcggggtatcgatggcaagccttgccggaattcccattgcttcatgggttgccggcctgtggggcgcgaaagccctgtttgcgctggtcggcgtggtgagcctgctgagcgggctgaacattttgctgacggtgccggatgacagtgccgggacgcgcatccgcctgcgtgagatggccggcgtgctggccgatggcaaatacctgacggccttcctggtggtgttttttattacttccggcgtttacagcttctacgcttttatcgcgccgctcattcgcgacacttacactggcggcacgcatgcggtctccgcagcgctggccgtgctgggcgttgccggggtgctaggcaatctctgggtcacccgcgcggcgacacgctttaccgctgagaagctgctgctggccggcatgacgctgctcatcgtcgatacggcgcttatcgccgtgctgccgaaagcgctgggcgtgctgctggcggcgctggtggtctgggcgtttgccaccgatctgctctggcccagccagcagcgccggatcgtcgagctggcatcagtccgccatcgcggcattgcgctggcgctgaccagtgccttcatgtttggtggtatcggctttggctctgcggtagcttcctggatttacccggtcgcgggattttacgggttggccgcgatgtcagtgaccttcattgttcttgcgctgtgcagcctgcagctgtcagaaaagctcagaaagcctgtagcacttgctgaaccctgccagagcgaaatctga

SEQ ID NO: 268609 - DNA, 438 bp, Klebsiella pneumoniae
atgagtttgcatttagtcgagtggcttaataacagggagcaggtcactgtacttgggacccacctgagaacgatatatgacacgctgacgttcaggcccgatgacctcgcgggatatgcctctgaggttttcggttttgcccaaaacaatccgcggattatgaagctgatggcctggtattcgctcgagcagcaggccacgggcatcagcggcagaaatgagtcgctttttaagaaaatagctgcacttcagcaggcgcaggccgcaggaaaggtgagcgaagccttccccccggcgtttctgctgacaactataatggcgctgtctaccgcatggtccgccctcagtccgtttggcgtattctgcagtgacgtcccggccggtgacatcaggaaaatgctgcagcagatgattgaaataatgatccgtccggaataa

SEQ ID NO: 268610 - DNA, 1908 bp, Klebsiella pneumoniae
atggcaaaaatgaaacccgactggaataacatctcacgacttacagttaagccgactgaaggagagctattccttttaaagcagcttgatgatgctcttgataactcatatgaaatattctttaacgcatatcttgatggagaccgcccagacattgtgatcttaaagagagattacggctccatcataattgaagtgaaagattgggatttaaagcactacagcgtgacgaaagaaaacaaatggattgttgaaggtgcagcaaaacggtcacctcaagcgcaagtgtttcgttacaagcagaatatgtttaatcttcacttaccggttctgggactgaaagaactgaaaaatagatacttctttaacgttattgaaaattacgtttattttcattgttctacagacgccgagatccaaaaactttatataagtccaactgaagagctacaagttacaataaatgctctccacgagtcgcgtaaaaacaatcaaattgagcatgagcgttatgagaggcaaagagcctatctttcaaacaaaaaggcgcaactaattcgcgactatcgtatgtcatttactagagactctatagataagttaattaaaaaagtagaaaaaattaaaaaaaacattttatttacctatgacatataccaagacttcatccgcagactctctcctcccgttcacactttagagcagggccttgcaattcaatttgacgccaagcaaaaaaagttaaccgaaagtaagcaagaaaaacgaaaaataaaaggtgtcgctggttgcggtaaaaccacaataatggcccaacgtgccattaatgcctataagcgccacaacgctccagtgttaatactcacctttaacattacactgcgtcattacattaaagacaaaatatcccaaatacaaaataagggtgcaggaaaccactttgaaattatgcactaccatggttttatcaacaataagcttaacgagtatggattcgatattggcgagttattaaaacactatcgaggtaatgaaagtgaaaagttagaaaagctttacagagatagaaaaatttttgaagctgtatccattgatgaaaagtaccacactatttttatagatgagattcaagattacgaacctgactggatcaaaaacatccgagacaacttccttgtagaaaatggcgaaatggttctatttggcgaccaatcacaaaatatttatgagcgtgatgataaaaaacgtgagtcggctatcgttcaaggttttggcaactggaataagttaacaaagtcgtatcgctctaatctggatacgccattagtacagttattcaaaaaattccaagaatcattcttagtcaacaaatattctgacattgaagtgtttgaatcaacctatgttcagggaagtatgcagttcgacctgcttaagtacgaccagtatggttgtaaagttaacgcgacactgctctggcgagtcattaaagtctatataaaagagaatcaaatcaaccctaatgacttgactatcatctgttcaaaagtagagcctcttatcgaactcgaggcattgatcagaaaagaagaaaaaaccaaaatcatgtttgaagaccaagaagatctagaccaaatacaaaatttatttggtgcagagcggcacaaaaaaattgaaacaatacgtcgtcgtaaaaaatgcttctttatgcaaaactctggggttatcaaactatcaacgatacatagctataaaggcctagaatcagctacagtcttttgcattttactagaagacgacaatgaagagatggtctatacgggtattactcgagcaaaatccaatttagttatctttgactgtgatggtagtaaatatagttcgttctttcatcagaatattcaatag

SEQ ID NO: 268611 - DNA, 666 bp, Klebsiella pneumoniae
atgagaaccgacaacttaagaatgattgagagtggggaatatgttttcgatatgttattggatagtggtgaattatactatacaagtcactcttttgacacgaaggaagatgcaaatagctggatggaagagtggcaaacttgggcaaatagtgtatcgagtggaaaagtaagtagtatttattatattttacaagtacctgatacttgggccggttcttcagataaaaataatccttattcggggctttatgtgaaaataggacgttccaataatgtgctaaaaagattgtctaacttacaaacaggtacctttggtcaattaatattacacgctttggaacctggcggatcagaaaaagaaaattatctacatgaaaaatttagcaacgaaagacgtcaaggcgaatggtttatatgtactaaagaacttactaagcatatatttacaacatggtttagaaataagatgctcccaccagaacatcaaatgaaactaatgcaactcgcagaaagaattggtatttattcgcacatacatagtctaatgggggggaagcccgatttagtaaacccatcaattagtgaaccttgggaatgcgaaaaatatgttttcgttgatttggtttatagctctttagcaaagcaagttaataataaaaaataa

SEQ ID NO: 268612 - DNA, 240 bp, Klebsiella pneumoniae
atgtcatacattcgagtagagaaagatggcctgcagtatgaaggtgagtatttctgtgaagagaatatggttacagtctttggggttagaggaggacagtccagcgtggttcttaatgggatgacagaaatcgctgttgctcgtactgcgttgcgaaatcttattagagaaaatcagattgatcctctaactgatgaaaaatggtccatatttactaacggcctatttgagatattttag

SEQ ID NO: 268613 - DNA, 183 bp, Klebsiella pneumoniae
atgatgatttctaaggcgctgattgccgccctctgtctcgtctcggcccttggtgggtcggcactgacggccgtggtcgtcacgaacgccgccgcgccggaatgcgcggcggtcggcaatggccatcaggatgaccaattccgcagccgcccaaacactcgcggcccgtctgaggggttctaa

SEQ ID NO: 268614 - DNA, 270 bp, Klebsiella pneumoniae; identical to SEQ ID NO: 245331

SEQ ID NO: 268615 - DNA, 1521 bp, Klebsiella pneumoniae
atgcacaattttcctgtgccgtaccccaatgagctggtatatagcacggtagctagggcaggtatttaccatggaattaccagcccaaaacagctattggatgaggtatttcagaaccggaaggtgattgctaccttagacttgccttgtcacttgcaagcgatcgccaatcagctacaaagcactgggcgctactctgtggaagaactggtgtatcagcatacgctgttcccgatttatgcgccatttgtgactgaagatcataaaatccgggcgttgcagatgatggctgggcgttcccagggtgctgttcatctaatacttggtatggccgcctcccgtattcaatccaatgatcgttttaaatattgtcctgaatgcatgaaaaatcagcatcagcagcatggagagaatttttggcaacgtaactggttttttccaggacttgccgtttgtcctgaacatggcccgctttcaattttgaagaatggtagcggatcacaccgccaccactttaatgcattgcatccactactggctttggattatgaggtgtcggtagtgaatacggagcttattcaactggctaagtatgctgacaaattattgaacattttgccggcttgctcacctgacttttctcaatggacagctttttatcgtgacttggcttcatctttaggtttttgtagggggaaacacattagacatgaagagattcatgagcaagtgaatgcttcttttcatagttcttctttgttgcagctaaaccttgataccaaactgtccacggatacaggctggctcactggaatatttcgaaagcatcgcaaagcttttagttatcttgagcatggagttgtctggcaaagccttattgctgggcaagagcctagtgacatcattgaaagagtgagcaaaattaagctatgtaccaaggtgtattttgagaatgcaccatcattgtctttgcgtgctgatgatgaagatatcttagtgcggagacgtagttggcagaagttggtgcttcagttcggagtgctcaaggctcgcaatcttggtgctggtcaggctttatatgcttggttatatcggaatgacaaatgctggatgctagcatttaacgcagagcacaaagaacagcgcacaaatccagagctgaaagttgattggcataggcgggacttggtcaccattcggaagttgagaaaactgtatcaatgtctcgatgacatttatgatgtgccgcgaatttctgctaattatcttctaggtcaattgtctcatagcaacacaatcaagaaaaaccttgataaattaccgcttgttaagatgtttttgcaacggtatacagaatcaattactgaataccagttacgacgattaactaccacttgcgttgatctgttacgaggtggcgaaccgctgaaaaaatgggtggtgctgcgtcaggctggtttaagccaagagcgactgacggctgacgctcaaacgacactcgatgaattgcggttgttttaa

SEQ ID NO: 268616 - DNA, 1605 bp, Klebsiella pneumoniae
gtgacgaaaattaagggatttggagatgattcgttagtcgtacatatcggagattttttccgatacaacagcgtgcctgactggtctgtgactttgtggtgtcgaccaatccacgaaaaaaaatatacgaaattagcaaatttacctctgcttagtcgaggtaagctgcttaacagtacagcacctaatatacgtcgtgctgatcgagtaataacattcaaacagggttatcagtttaccgtttcttcgttatcagagtttccagaaataagtgcttctaaatctgtcaaagataaagatggtgttcagaatgcattcatttttaatgatgggaacggtcccttggttgttttgcctcagcttgaattagcgagagctatttttttgacaaactcttacctttgccgtgcttgtctgaatagtgcaaccttgcccttagagtttgatgttcagccccatccagtccggagccatgtcgatatccatgtgctaaaaaccactacttttccaaaaagcgcctttgatcaaagtggtactaagcaattgcttgcgtggatgctcacggacccatcagcaatgaagtcatatcaaagtatttaccagcactaccattcgaaacgcgagtttaaagggaaactagaaagttggcggtttagctttgatcctccgttgatgaataattggcagcttcatgtgaaaggacgttacagcagtgataatgcaagttatttgattgaggagatcattggcattgtgttcgatgttaatgtcccaagcagcgttgcatttatcaatcctgcttttgttaaaagagatcctaaagatgaatcggcgcgtgctggttccagtggtgataactggcacaataacgaagatgagtttgagatagatgatgagcagtctgcttctgaccagaacgaaaccctagtcttggaaggtgatttaacttggatcagttttaccaaaccatttgatgcatataaacaagagcagatgcaagacagcagtaagttgattatggctaaacacgcggaaaaggaggctggccgacaggtcagtaccggtgagccgcatcagggtggcactttgcctgccgctgatgttggtggcaaacaggatattaccgatagggaacgactgtttgccagtcgctttaagagctttgatcacatgctgcaagtgctagtcagcaaacaccaatgctcaattatcaaccaggagacattgccgttaccaaaagttggccggagtcagcagcatcagctggaaaatggttctcctcgcgctataagagctgtacgagttcgatacgaaaacaatgaagccctcttgctcgaagttgatacttcggatggcattaaaatgttgtcgactaaagttcttttccgctctgatcaacgggactggattgagcatttcacacagattcgcaaaggcattgttgcaaagtcgattgcctggccgaacgaattgttggactccctcttcggcgaactcagccacgttggtattaatcaccctaagcatcagggggcggaggctggcaatataccagtggagtccatagagagctgggcattgagatttttgcaatgtttcacttaa

SEQ ID NO: 268617 - DNA, 573 bp, Klebsiella pneumoniae
atgacccgctcccagctgattaaaatcatccatgtggcaaagcgtgaactgcgtatggatgaagatacttaccgccagttgctgaatacctacgctggcattgaatccacgcgagaaatgaatatcgggcaactgaaccagatcctcgatgcgatgaaaaaaatcgggtttaaggtccgaactcagaagaaagaaaagctcactgccaccgacgaccagtcgaagaaaatccgggctctgtggctggaaatggctgacgaaggttttattcgcgaccgcaccgaacgggcaatcaatgtctacgtgcatcgcataacgggcgtcagccgcctcgactggctcaatacatcggcagcaagccgtgtgattgagacactgaagcagtggcagactcgcgaacgtaaggctctggaagccctgcaggcgcaaagtgactaccggaggtcaatatgtcatcacctatggagcgtaaacggcacaggctgctttctgagcttgccgactacgtcactgagatgggtatcgatttcaatttatcccctgagcaggcagagcaactggggcggacggtag

SEQ ID NO: 268618 - DNA, 297 bp, Klebsiella pneumoniae
atgggtatcgatttcaatttatcccctgagcaggcagagcaactggggcggacggtagctgattttctggccactcactttggcggccagaatatcacctttccgcgcgattattttttcaacctgtcgatacgggatatgcagatttatgagaagtttcacggtaataactggggggagcttagcgcagaattcaatatgaccgagcgtggactaagaaaactaattgaacgggttcacaagcgggtaatggcccatcgtcagcctccgcttttcccgttcaatgatgatgagtaa

SEQ ID NO: 268619 - DNA, 621 bp, Klebsiella pneumoniae
atgtttgataagtcattgctggatctaccgtggccgacactggtaacacttgcagcgggttacattggctacttcgttgcgaatgttggagttaaggatcagcataaagccgtggatattactttttccgcactggtttttggccttttttctgctggtatttatcatgcatccgtatgggggggtattaatgcatacatggctgcatttccagcggttatggcggcttttgtcgcgggttcatgctggcgaaaatacgggcgcaagtggatgtacagtttactgagaaagtacgacatctcctggtccgacgacaccagctcagcatggcaagccatgtttggtcatacgcaatatcgcgtcacagagatttttgtataccttaaagatggttctggattgttatcgcggctaccaggcaactatgaagagtggcctaacgggccatttacactgggcaaccacggagatatcagcctgtacgttacccatcgcaaatcgataaatggtgaagcctgggaagaatatgagggagtagtacatcaatcgtggggagcgctggcaacctgggtacctgcagatcagattgccagagtggatattcgtagaaaaagggcttag

SEQ ID NO: 268620 - DNA, 147 bp, Klebsiella pneumoniae
atgactaatcaaaacgacgacaaagacagaaacccgcttgactactcagagaattctaaaagcgaacgctctgtagcgtcaagcagcgacgacgctggcggtaaaagcagctcttcggaaccgcccgcgccgttgaacaacaagtaa

SEQ ID NO: 268621 - DNA, 1677 bp, Klebsiella pneumoniae
atgagtgcttctaaaatcagagccatttatcgggatactggtgtttcagcgtatatgggcaacccatttattgaagccttgcccccattgcaagaatcggttgatagcgcaactgcgctgcgctccagcatgactttccatccagaggatcttcaaaaagctagaattgttcgtgctcacaatatttgccgaatagcaaatgagttctttcagccattaggtgcacacatgttgctgagtgagcgggtttctttgatgatccgtggcggttatgtgggtcggaatccaaaaacaggcgatttgcagcgccatctccaaaacggatatgaacgagtgcaaactggtgatctttcgactttcaggtttgaggaagcgaaatctactgctcagagcatgctattgattggttgttcaggtagtggaaaaacaacatcgttagagcgaactcttcaaacctacccacaggtgatttaccatccagagtttaattttgagcaggtggtctatctcaaagtggactgctcgcataatggttcgttgaaagaaatatgcctgaattttttcagagccttggatagagcgctaggtactaattacgaaaagacttatggtctcaagcggcgcaatggtattgagactttgttggcgttaatggcacaaacggctaatgctcatgcgttaggtctgttagttattgatgagattcaacatcttagccggtcacgctctggtggctcggaggagatgctgaatttctttgtcactatggtaaacactattggagttccagtgatgttaatcgggactccaaaggctagagatatcttcgaggccgatcttcgttcagctcggcgaggtgcaggactgggtgctattttctgggagcctatgttgcagggccatccagataagcccagtcaagagtggatcgctttcactaataatttgtggaaattgcagctgttacaaaatcgtgatgttttgctaacagatgagattcgggctgtatggtacgagttaagccagggtgtaatggacatcgtggtgaagctttttgttttatcccaactgcgtgctttagcgctcaacaaagagcggattactgttgggctactacgccaagtatatgaagatgagttgaagcctgtgcatcctatgttggcggctcttcgttcaggtattcctgaaaggattgctcagtattcagatttaatggtgccagatatggataggcgccttatccagttacagcaagatatttctttaatgaaagaaaaaacggctgaagatatagcgttgcaacagttagcaacggaggatgagcggcgactatacttgctactaaaagatgtttatgactctactcttcttgtcgctacagtgcgaaaagcgtttactgcaaatccaaatatgactataaatcagttacttccggttgttactcaatggctgtctatgccagtaattgaagaagtaacaatgcaaaattctgacaaagaaaaatcgagagccattaaaacggaggcttgggagcagctgccctttgatgatttacgttatatcaattcacaacacaaaaatccttctgacatgtatgccgaattaaagttaaaagggatgttgctagatctaaaatctgtgctggctagggaaggtgcgaacaagtccctgatatga

SEQ ID NO: 268622 - DNA, 2091 bp, Klebsiella pneumoniae
atgtggcaaatcaatgaggttttgcgatttgatgagcagctgtaccgaattctggcagttaagcctggggaaatcgtctggattcgcatagatacgaacactgctcagccggagcgcataacagaattagaactcatttcttacttggatgaagagcgtctgttccgacatgccgatccattttcttcaattgatcttgaagaaccgctagttggctcagttgcttttaatcggcgcgaacgagggcttttgattattcagcctattattgtggatgagttatgttttgacccaaaaattcgagctcggcgtgttgaacaagtcaggctgtctggcattgcatcaatagcgactatctacaagttattacggcgttactggcagcgaggacaaaagccgaattcattactgccggactataaaaacagtggcgcaccaggaaaaacgcgagcagcaagtggtcaggcaaaaataggcagaaccagacagtttggtgatggcgaagggatgaaggtcacgccagatattgaacgcctgtttcgactcaccattgaaaaatacattcttagccaagatggcttgaaaacaacggttgcttatcgacgtttctcagacctattcgagcagtattatccacaagtggtgattgcaaacaggcctacaatccgccaattcagatatttttatgaccgtgaatataaaaaacctcaacggttggtagccagaaccagtcctggtgtctacaaaaaagatgttaggcctctaaccagcacagccacagcaaatgttcttgggcctggaagccggtatgagatcgacgctaccattgctgatatctatctggttgctgatgatgatcgtagtaaaattattggtcggccaacggtttacatcgtcattgatgttttcagcagaatgattgctggtttttatattggttttgataacccttcttatgttgttgccatgcaggctgtggtcaatgcttgcattgataaaactgatatttgtagccaacttggtgtcgaaattaaccccggtgagtggccttgtatcggtttgccggatgtgattttggctgaccgtggcgaaatgatgagtcatcaggtcgatggattgattactggatttaacttacgtattgaaagtgcgccaccaagacggggtgatgccaaaggtatcgtcgaaagttgcttccggaccttgcaggcggagtttaaaccatttgcaccaggtgtggtggctggcaacagagttaaaaagcatggtgaacgggattatcgtcttgatgctgtgatgccaataaatgatttctcgcaaatcattttacgtacaattctgttcaggaataattatcacgtcttagataaatacgatcgtgatgcggatttaccagcagatattccatctatacctctggaactttggaattggggaatgcagcaccgtgttgggggattacgtcaggttgatcctcagcagctacaaattgctcttttgccccggcgtaaagtcaccgtgtctccctttggggttaatatgtgggggctttattactttggctctgatattcttcgagaaggttggctacatcgtagcattgagattaatcgacctgaatctcttgaagctgcatatgatcctggctgtgcggatacaatttatctatttcctcaatctggaagtcgcattttctgggtgtgctcacttactgacagaagccgtcagtaccgaggtatgacgttttggcaagtttgggaaattcaagctaaagaaaaacataacaaagcaaacgctaaacttaaagaagatgaaaaacggcgtgaattggatgcgtttatcaagagaaagattaatgatgcaaccaaacagtcttcttcatcaaatgagtctgatcagcaacgaattcagcagattaaatctaataagaaaaatgcgagagatgttgagcgtcaaagtcgagtaaaacctgtaatagtggattcaagtaaaccgctggccgacgttgtttctcttaatcaggttgaagattatagtttaccaaatttcgtacctggattgttcgatgatggtgaaggagacgcagaatga

SEQ ID NO: 268623 - DNA, 717 bp, Klebsiella pneumoniae
atgaaactaaaaacaatgagcgcagcacttctgttgactttgcctttctgggcctgcgccaaagatgtcaccataatttataccaacgatcttcatgcccatgtcgaaccttataaagtgccatggatagcggatggtaaacgagatattggcggttgggcgaatatcacgacgatggtgaaacaggaaaaagcgaaaaataacgcgacctggttttttgatgccggagattattttaccgggccttacatcagtagcctgactaagggcaaagcgataatcgatattatgaatacgatgtcctacgatgcggtgactatcggtaatcatgagttcgatcacggctgggataatacgttgcttcagcttagccaggcgacattcccgattgttcagggcaatattttttatcagaacagcgataaatcgttctgggataaaccctataccattatcgaaaaagatggcgtgaaaattggcgtgattggcctgcacggcgtgtttgcttttaatgacaccgtttctgccgcgacgcgagtgggtatcgaagcgcgcgatgaggtgaaatggctacagcattatatcgatgaacttaacggtaaagtggatctgaccgtggccctgatccatgaaggcgtcccggcgcgtcagtcgagccagggggaaccgatgtgcgtcgtgcgctggataaagatattcagactgcgggtcaggtga

SEQ ID NO: 268624 - DNA, 1197 bp, Klebsiella pneumoniae
atggctcgacaatccaccgtcgcagcacgcgacgaagcaccgacacagcggttttttcagggcggcaccgccctgaatcgcgtgctgcttgaagctccttacctgccccggtgctccgacgataagaccgctacgcgcatccgtcctcgtgagtacgcgattcgctatccctacatgcaggtcaatcgaccgggcatggtgagctggctgatcttcgaccttgaccactcaaacgcgctcatctgggaggatgcgggcttgccagcccccaacttgatcgtgcgcaaccgcaagagtggccatagccacctgtactacgccatcccccccgtttgcacgacagaaagcgcccgctccaaacccatcgcctacatgaaggcgatctacgaggcgttcgccgcccgtctggacgctgacacagacttccacagcgggccggtcgccaaaactcccggccatccgtggtggctgacatgggagatacacagccacatctatgagctgggcgagctggccgactatgtggagctggccgtgtcctcgccgtggggtaaagggccgcagctcgatgaggtcagccattcgcggcactgcatcttgttcgagcacctgcgctactacgcctattccatcgtcaaccgcgagcgcgaaaaggggtcattctcgaccttcactcgcttgctggaagcctacgcacataaccgaaacagcttccagaagctcggcttctccggcgacctgcccctgtcctcgctgcgcgccacggtgaaatcggtcgcccgctggacatgggatcgttaccggggcgatagccgctgccatcgaggcgtgatgcagctcgataaggacttgccgctggttgagcggcagcgacttgcagccgcacgcacgcacgaggtcaggcagaaggccacagagtccaaggttcgggctgcctgccgccagctccagcagaagggcgaaaccctcactcaagccgctattgcgcgtctggcgggcctctctcgacagacagtcgcggcctacaagcatgtcctgaccgaagtgctcaagccagcagttttcgccgtattggaggtggtcgcagcacccagatcggatgttaagaatggtgtacatcaggtatctgccccccgtgcctccgtggttgatttgatcgccaaggggttggatttggagcctgtcgattcttcgtag

SEQ ID NO: 268625 - DNA, 336 bp, Klebsiella pneumoniae
atggccatgagaggactcaagtcggcggtcagccctatgacattgcgcgaattggtcgacacaggcgtcgttacgacaggcgcggcgattcgattcgacgatgacggccaaggtttggtcgggattgtgcttgtcggtagtgatgagctgtttctcgggacagcacgaggcaatgagcctcgttatttcacgagtatcgacggcttggtgtcggcatttcaggactgcggtatcaatgatttcaagctcgacgcgaggggctttgtctctcgcggcaagcaagcatcagcgcggcgcggatttgggcgtagtgcccaaggcaagctgggcgtttag

SEQ ID NO: 268626 - DNA, 303 bp, Klebsiella pneumoniae
gtgaagaagatgcgcggaaaacctgacctcacaggcattgccaccccactgaaagacccgactgcttttctggaaggtggagcgggagatgttgccgacaaggcgcatcgggatgcacccaaagctgcggcacctgccgcagatgagccgcccgtgccgaccgtgcagaagctctttcggatgcggtgggacatcgccaaagccctcaaggacgccgcaaatgcggagtcagtaccgggccaccgggtgacggaaaccgagatcgttgagcggttgctcaaacagcatttcgggatcgaatga

SEQ ID NO: 268627 - DNA, 633 bp, Klebsiella pneumoniae
gtgacgatctttgctgtggtcaataccaaaggcggcgtgggaaagaccacgaccgccgtccatctcgccacgatgctggcccggcagggcaagaccttgctgattgacggcgacccgcaggcgagtgccgcgagctgggccgcgtggcgaagagagaacgagagctacacgcccagcccgacgacgacgtgcctcgcgggcaaagcgatcttggccgaaggcaagcagcttgccagcggcttcgcgcatgtcgtggtggatgccggtggccgcgactcggtggggctgcgttccgctctgctgctcgcccaacgcgcagttattccgattggtgcttctaacctcgatgccgcagccatgaccgatctgctgacagtggtcgagctggctcgtgactacaaccccgacctcgatgtgcgcgtgttgctgacccgcgtcgatccgcgcaccaaggacgctgctgagatgctggagtttctggccgagcaggagctgactgtgctgccgaccaaggtttgcgagcgcgtggctttccgtcgcgccatcggcgaaggtgcgatcgtgcaggagctgggcaaggatcaggctgcgattgcggaaatggaagccttcttcaaggaggtgacggcgtga

SEQ ID NO: 268628 - DNA, 2874 bp, Klebsiella pneumoniae
gtggctgccgccgatccatcaatgccgttctcgccctgcgatcccgcagcagggtcatgtaccgacgtatcggtcggaatccttcagtggatcttcggcccggtcgtcgagaagctgactcaaggggcaagccctgacgctgttgatgccagtgtcagcgtgatggcctcgatcttctctgtcttcaattcgggcctactggtggtcgccagcctgatcgtcagctacgtcgccgtcatgggcgtgacgaacactgcgaacgaaggcgaggcgatgggacggaactggtcttcactctggacgcctgtacggatcgtttcaggcggaagcgtgctgctgccaaccacaagcggctacagcttcattcagctcatcgtgatgatgttcgcgctatggggtgtgggtttcgccaacaccttgttcaagatcggcacagagaacgggatcatcaacggcgcactcaccgcgaccagtgcccagatgggccttggcagcggggccaagccgaacccgaactatcccttatatgacatccgccaattcgcgcaggagtacttagccgtggcgtggtgcaagcgcaccgtgaacgcctcattttcaggcttcggcggcggcacgccgaacgtcagcgcagccggaacacctgaccagaccattgccgaaggcggcagcaagaaggcaatgatctatcaggcgaaggatcgaaatgccgtcaccaatctgggtggcggtgtgccgctttgcggctcggtgaaggtctacagctattcggctccggctgccatcgccgctgaaactaccacgtcagcggcgtccatctttgatccggccaagattcaggataacgcctcggccatgtcggcgatccgtgtcgccgctctgaacgccaaggcgaccgctgtcaacaaggtgatgcaggacattgaggtgtgggttggcgaatggcccgcgaccatcaacgaatccggttgggaaaacgtcacgagcgaccgtttcaaccagatcgtcaatcaagcccagagcaccctgaccgcaagcctgactgctcagattgcagccgacaccacgctgcaacagatcatgcagaagtacgtcaccgacatcaccaaggatggttgggcaatggcaggcggcttctatcagcgcctcggcggcatcaaggaagagctgggccgcatctatgcagaaaacgtcgcacaggccaccgcaccgaacctcaacaccctgccgcaagggccgcattcctcccttgcggccaacagctacaccaccgtctacaacaccatcatcagcaagtcgctgaccgggggaagctacaccacgcccgacacccctcgggctgccgatctcaagtcgaacctgatcccatcgtccctcgacgatctcagcatcgacacattgggcagccggggtgacagcttcatgagcggcttcgtgcagtggggcatggagcgcgtgaccagcaccatgatcggcaccgatggcgacgtggacgccattgctcgcatcaaaaccacgggcgatgtgcttgcgctgctgcaatcgacgggttttgctgccgaccggctgatccacacctcgctttcgggcctgaaagccgctgcggcagcggtaggcagcgtcagtttcatgggcaacaaggtcgatgccaccccgttggccgacaccttcctgaactgggtgatttacaacttcctgaccccgctggccgaagtcacaacgtggctcgggcggctcgcgttctatttcggcgtgttcctgccgagcctgccgtacaccatcttcatggtcgcgtttgtgggctggctgatggcggtgctccagtcgatcattgccgcgcccctgtgggcggtcatgcacatgacgcctgaccgcaccttcgtcggcagccagacgcagggctacctgctcctgctgtcgctcttcatccgcccggcgctcatcatcaccggcctgttcgccgcgatgatggtggccaatcccgtggttgggtacatcagcaaggcattctgggcgatgtatcacgccaacgtcacctcggcggaatcgctaggctggttcattgaatttttgcagtggaaaaattggctcatcgtgtacgggttcgttctgctgcccgtgatgtacatgattttcgggctgtcgcagagcttgccggacaccgtgctgcgctggatcggcgctggcatcagctcgatgggcgaaacccaagctaccgagcagatgcgcgggcagtcggaaaaatatggccccagtgcgttgcgcggcggtgcgtctccgggccaacccgaggcaaaaacaccgaataatcgcctgaacggtgactctggaggcgcaggcagtctaagcgggccgagcggccccactggcaacggtggcggtggccgcagcggtggcggcaaccacccgcgcctgctgaatgccaacggacaaggggtagcaccgcagcacgacaccccggcgccgtccgcatcgagcagctccgcagcgcccagcgggccgacgcgcagcacctccaccgcatcgtccaacaccggatcgtctctcaacaccggctcacaaggcgtggtcagccgctggggtaacagcgaagacatcaccgacgctgaattcgtcgaagtgaaagacacggccccgcgatctggtactacctcacgcccctcatccacaggggaaaaagccagcaacgccgtgctcgctcttggctccgctggtgtcatcagcgcggcatcgaacacagagaacgtcaacgatgacggcattggcggcagcggcttgcattacgacagccgctacagcccgccacccgctgcacaggcgtcctcagtcatcaaccacggcgacaccacagcaagcggaggacaaccggcatga

SEQ ID NO: 268629 - DNA, 531 bp, Klebsiella pneumoniae
atgagctaccagtacgactacaacgccgaggccaccggccacgtcattgggctgcggcgtggatacgaacagggctttgaagcgggcgaagttgcaggttggaacaaggccatgcgtgagtggaacaccgaagtcgaaacgcagtggaacccgctcgttgaccgcctcactgctgagcgagacgaggccatccgcgcccgcgatgaactgctggagcaggtacgccatgcaggccagcaaacccgcaaatggcacaacgctttctacagcgtgctgtgcgccctcgatagcgcaatggacgtgctacagcacgcaccgcaggacatgcgcactcggatgatcctcgattacgccaaacgtgccgagtacatgaaagacaagggctggatcgactcgatgccgcaggaaaacagcgtcctgcgctcacgcgcccgcccaaccgctgaccagctccaaggatggtgggatcaggttctccaccacgcgaagaaggcagcggaagccgaccgcacccagtcccccagcccatag

SEQ ID NO: 268630 - DNA, 606 bp, Klebsiella pneumoniae
atgaacctcaagaacggcgcgaaacgcgcagccaaattcacgttcgtcgatatgccgctgtcgatcctcggatggcggcagatcaaggccaacaatggctacatccgcgacctgtggcgcacgctgcgcaacccgcagtgcccggagtgtgggcgcggtgtgatgcacctgcctgccgattcccaacctgatgacaaggcgctttatgggtgggagtgttcggcgcgatgcggcttccgtgtgctggcaccggaagaccctgccgaaatccgccgcatcgtgcaggcacgatccgagacacgcggcaagcagaggctggcgtttcttggcgaccccgagcgcgacaagctcatcaccagccacctgcgcaagtcccgcgcctattgggcgtttggcgcattcgcctttttgatggccgtgtggcaactagcagcaggcgctccgctaatggttgttttgagcgcactgtctctgtgcctgccattctcaatcctcgcgatccgctggagctatcgggcgtggcaggtgcgctccggcacgctgttcgtggaaggcgctttcgggcgctacgtccgcgacatgctctgggttcgggggattcagtga

SEQ ID NO: 268631 - DNA, 240 bp, Klebsiella pneumoniae
atggcccagatgattcaatccatcctacttcgccttggccgcgagcgtgttaccaacatctgctgcgtgctcgggacatgtctcgccttgttcgtcgagcgcgatgcactgatgaatggccctcctgctgcccagctcggaacgatcaccctcgccatagctgtccccatcctctacctgacaccgttgatctggcttgtgtaccgctacctagtgaggcccaaccatgaaaaccgctga

SEQ ID NO: 268632 - DNA, 189 bp, Klebsiella pneumoniae
atgaaaaccgctgacaactatctcgttctgcgcgtgtcgtggctgcgcgagcacgatcaggttattgccgagctggccgagctttggctcgaccggcaggccaagcagcagcctgcccccaagcccaccaagccaatgcacatcagggcacagcacaacagagacatcaggagccatgcccatgcgtag

SEQ ID NO: 268633 - DNA, 528 bp, Klebsiella pneumoniae
atgcgtagcaagcacttcatcacaattgctgcggtggcgttttccagcatcgtctgcgcccagatgcccgtcccgctgctcgacaacgagccagccgcacccaacgcagcactctggaccgtggctgtcccgatgttgcaggccgcgctggagtgccgcgaagacctgcccgaccatccggccacccgcgccctgctgccgcgcaaaccggcaggcgaggaacagcactaccggctgacaccgcccagcgggttcaaggtattcggcctgcctgtggccgagattgaggtctgggtcgatgacggcagcggcgaactgggccacggctacacctcgcacatcaggggcaggacgctggccgaggtcgccaaggctgccaagctgaacaagggcaagagcttccccaaccgcaaaaccccgatgggcagtctgatggccgatcagcccttcgggccggaatcggtgcaactgacctgcaccattgacggcagctacgccgcccacgaaaacgaataccgggagccatga

SEQ ID NO: 268634 - DNA, 1119 bp, Klebsiella pneumoniae
atgcacaagctgcttgctctggccgcactggtggccgtgactccggcactggccgatacctgcatggtgtcgccgaccgagaaacagaccgtctccgggcgcttcggcaagttccggggcggcggtgcagggaacttcggtagcgccaaccagaagccgcacatgcacgatggtctggacttctcgaccagtggcgcgtcgcagcctctgtacgccacaacggacggcaagatcaccttcatcggcaaccggcgctcggcaggcaacgcgatcctcatcgagcgcagcaatggcgacgtggtggcgtactaccacatgagcggctttgccaccggcttgaaacagggcatggaggtcaaggccgggcagtacattggtctgtccggcaacacacccagcgacgcgatggtgaagcacctgcacttcacctacggcaccgcgcagaaagatgaggcccgcgccaaggctttcactcagagcgcatcgaaaggcaccttcaaccccggccaactcccgtccgccttcaaccagcaacaggggatcggctggaagaccgacccagccccgtatttctgcgcgactttcccgatccaagacggcaacccgcagcactacccgattttgggcaaggacactaaggagcagcacgccatcctgttcggcaacgtccctccgggcggcgtggccccgaacgtcaagttcgagcctgcgcaggtcgtggcggcgaatgcggacgcggcgctggccgcttccgagggcatgtctcccgccgagtggctgtcggataaggacggctacggcacgctgccgaccgcgccgattggcggttacgacacgatgtccactcacgaaatgctactgacagaggcggggcgtcggttcagcgacgccgaatggaacaacaacatcaccaaggtatccagccgggcgctctgggtagatttcaaccgcgcagtaggcgtcagcaactacatggccgaagcgatctatcggaagaaggagcgcgtcgaagccctgctggctatctacacgtcacagaagaccgagcggctgcgcaagcagactgccgcagcacatgatcgggcgcaacgcggtgacgtttcgcgcagcatcaactga

SEQ ID NO: 268635 - DNA, 534 bp, Klebsiella pneumoniae
atgtacaacgcaccatctatcgacatcgccacgatgcctatcgcagacaaggtgcatcgctatgcaaacgccaagtactacaaggccctgctggacgcactgcaagccgcagcaaatgaggttgggtgtgattttgcactgtcatctcgtgatgctgcatacatcccggaggacatctatgagcatctggcctttaacttggtattggcccgtgagcagtatctaaggccagccattggctcaattgcccattatgagaatgcagaatccggcatgaaagatggctatgcccatctactgctcagggatgtcttgtcggccctctcagaactgggcctgaaatggaggatcaggagcatcgagtattacgaccgggaaggcttacaacgggcacaggctcgccgtacaaatggggggttcccacccctgccagagcctgctgcatcagctccatccattaaagccgatgtgtccaggctggcagatgagtttttcaacgggctggatacgcccaaggaggacatcccaacatga

SEQ ID NO: 268636 - DNA, 468 bp, Klebsiella pneumoniae
atgagtacaactgccaagatcgacttcgcgccgggcctgttcgatgaagctgtgccgcccgaagagaagaaacccacccctaacttggaagactcttttccgagcacctacaaacccaaaagcttttggtggtggtacagaaagcaaatcctcaccacgctcgcgctgctgacagcggctggagctgccgcgtactttgtcatcaaccaccaagcggacacatcgccggttgttgaaggcccgttcctgctgcccacaattaaccagccgaaggcacaacctgtcctcacaacatcggctcggtcatgctacggagacgaagccatctgcacgacagccgttactgatcgccctgccgacatgatgacctcgctggtcgccatgttgccgaaggcggaaaaagacaggcgataccgggtgtcggtcgtcatcgaggaactgggcgaatggcctcaatctggcgactga

SEQ ID NO: 268637 - DNA, 231 bp, Klebsiella pneumoniae
atggcctcaatctggcgactgaacgaggatcgtgtcgagttcgagcgggtaacgtccgctgtactcgatgccgatcctgatggcacctacgtcatccagcaaccggacaacacattccggctgcgcatcggcaacgcccccactctcgcagtcggcgagcggttcaccgtggcgggcatcgagttcgacaccgccgagatcgagtgtctgcatttcgcagattgcgtatag

SEQ ID NO: 268638 - DNA, 588 bp, Klebsiella pneumoniae
atgcaattcaaagtcacgctctacgtgaataagtcgttgggcgggatcacagtcgaagggaacaccgtccaatgcctccggcggacagacgagcgcacagccacaggacgccgacgccagcgagtcatctgcaccatcgaccgctgggcatcggagctttccgccgaagcccgcgaactgctcaccgaagaagagcaagcggaatgggccgcatggaaggttaaacacgatgcggagtaccgcaaaaagcagcttggtatcgccctagatgccgtcaccaagacgatggaagcggccaccacggcgctacgcgagtgcgtggctaaacctgctgaccccgctgcaatgtgggccgccatcgaggcgctatctgccgaactggagaaggctggccacgagaaacctaagcggccacgaggccgcccacggacgaatgatgacgacgacgatcaactcatcgagcactggccgatgggcactcagccgcctctgccgaatttcgccccaccgggcacagaggcacaccgccagtaccagagcctgctcgacaactttgaggcatatcgccgggcaaatgaagatagctag

SEQ ID NO: 268639 - DNA, 825 bp, Klebsiella pneumoniae
atgtccgatctgagcggaagtgagcgtcgcaagctggaaaagctgcttggtatgggtggcggctatgtcctgaacttctctgaccgcaccttcggtgacttcttcgatgagtaccgggtcgagattgatgccgaacggtacaaggcgcggggtacgtccaaggccaatcggatgcgtaccttctgggatgtggatggcaatcatgtcgtggggcgggtcattggcgggctgatcgagtatgcgaccgatgagcagtgctttggcgacagcaatccgctgctgatcgacgactgccgaaagattgcccagcgtcttctcagtgaccagccggtggccgagctggatgcgctgaccgccatcgcagatgagcgggatttcgaggtggtggcagagcatgtccgcgaagccatcgagaagaaccagcccgagggcgggctggatcgactacataccttcgtcaacaagttcatccgtgtgacgtgcgagccgcacggcatcacgatcactcgtgacaagccgctgcacagtgtcttcggcgagtacgtcaaggcgctccgggaaggtggccaccttgagtcggccatgaccgagcgcattttgaagtccagtatctcagtgctggaagccttcaatgatgtgcgcaacaacaagagccttgcacacgacaacccgatcctgaactacgaggaaagcctgctgatcttcaaccacgtcgcggcatccatccgcttcatcaaggcgttggaaacgaagatcaaggctcaggccaaggtggcagagcagcaggctgcacggtttccgtgggatgagagcattccattttag

SEQ ID NO: 268640 - DNA, 825 bp, Klebsiella pneumoniae
atggcgctgccttctttcgacaacgggtggcgcgagggccagagcgtaaagccgcgcatcctcgtgctggagatcaaagacaaggatcgcccggatgacaaggcattgggctgggtgcttgtcgagcgggaggaaacctatcggcgcgatcctcgggatgggacgatctacgaggcgtccattcggctttcctaccagcgcatcacagccaagttttcgcaccgggatggtggaaaagggcggtttgatggcagctactcgcgcaacttcaacgctgtgtcgctgacttcgacctcgatgtcgaaaggggctgtattccttgatttgccggggctggatggtcagcgtatcggcacctatctgatgaatgagatcgtccagtgggtgcagcagtggcccgaggcgaccgtcaatggtgtcgagctgctggccggacaggggcatggtgacaacaaggcacggcgcaactggttttatgagcagttcggtctggtcttcgactacaccgaccccgagcatcgcgaaggccgatccagacccatgctggccggagcgttagtcaaagtcgagacgtggaagcagaacatcaccgagcaccggatgctcgactatctggccgcagttctttacgccgaggaacgtgccacatcggagttgcaggcccgtgatcgagcctgtgcccaactcattgccgagcagagacgggcagaagcccggcctgtgcgctgggcgttgcggcggttgtatatccactatgccagcaccgtgcttgccgggcttgtcctgacggcccttgtcggtatggcgtggatcaagatggcgtag

SEQ ID NO: 268641 - DNA, 249 bp, Klebsiella pneumoniae
atggtgacaaccacaactgaggcgctttcagaggtcttgcgcgggtatggacgcgctgatgaagcggcattggcatcactgctggaggtcagcgactgggagcgcatcgctcgtcaggagctggagcgccgggctacccgaattgtgcagtcgcttgatgacggcacccttgaggctatcgcatctggttcgctcgatgtccgggccgtctgccgccaagtggccgacgagatcaagcagaccgcttag

SEQ ID NO: 268642 - DNA, 741 bp, Klebsiella pneumoniae
atggcacttgatcttgtcgattacgaacagaaggcccgcgacgccgtaaaggcgttttggggcaaccgtgaagctgcacggcaaaagcagattgagtcaggcaaggccgaccaaggtgaacgcgctggcgtcacaggcggcaagaacatggacggatttttggccttggtgctcgatgtcatcaaggccaatggtctggcccacgccgagattcaccagaaccgggcgatgctgaccctgcccggctacttccgcccgacaaagctgtgggatttgttggtgatctacaagggcgagctgatcgcagccatcgaactgaaaagccacgtcgggccatcgttcagcaacaatttcaacaaccgtaccgaggaagccatcggaacagcccatgacctctggacagcctaccgggaagaggcattcggcaagcagccacgcccgttcgtcggctggctgatgatggtcgaagatgcgccggagtcccgccgtcccgttcgggactcgtcgccgcacttcccggtcttcgaggagttcaagggggcatcgtatctcacgcggtatgacttgctgtgtcagagattggtgcaggagcagctctacacgaccgctgccgtcatcgcggcagaacgcagtgcggtggatactggcagcttcacggagctgtcgtcgatgaccagcctcaagacattcgtgtcggctttggctgggcacatcgccgccgaggcggcacgactgggctga

SEQ ID NO: 268643 - DNA, 1725 bp, Klebsiella pneumoniae
atggcatttgcgccaagtgttgctcataagcctgttgccgctgctgtatgccctgtcatggccgcgaccgaggcgttggcaacggaaggggggctcgaggctcgaggggctattttcacgcgctctgaggtggtcgatttcatcctcgacctggctggctataccgaggatcaaccgctgcacgaaaaacggcttttggaaccgtcgttcggtggcggggacttcttgctgccgatcattctgcggctgctgagtgcatggcgagcagcaaggcccaatggtactgaggtcgatgatttgggcgacgccatccgggcggtggagttgcaccacgacaccttccgcagcacctacgctgccgttgtcgcgctgctcaagcgtgaggggctgtcggcgaatgctgcgacggccttggctgaccgctggctgtcgcagggtgacttcctgctggctccgctggagggccagttcgatttcgtggtgggcaatcctccctacgttcgacctgagctgattccggccccgttgctggccgagtaccgcagccgctatcagacgatgtatgaccgggcggacatctacattcccttcatcgagcggtcgctgacggcattgtctgctggcggcaatctgggctttatctgcgcggatcgctggatgaagaaccgctacggtgggccactgcgtagccttgttgccgaacggttccacctgaaagtctatgtcgatatggtggatacaccggccttccattccgatgtaatcgcctatccggccatcaccatcatcagccgtgaggggggcggggcgacgcgcatcgcacaccgcccgtccatagaccgggccacgctgaccacgctggctggcctgctgtcggcaccgacacttccgaaggatgctggcccggtgcgggaactcgcccgtgtgaccaatggtgcggagccgtggctgctggagtcttctgaccagatggcgcttattcgccgtctggagggcgcgttcccactgctcgaggaggctgggtgcaaggttggcattggtgttgcgaccggcgctgacaaggcattcatcggcgacttcgagtcgctggatgtcgagcctgatcggaagctgccgctggtgacaaccaaagacatcatgaccggcgaagtgcagtggcgtggtcagggggtcatcaaccccttcgccgagtctggagggctggtcgatcttggcgagtatccgcgtctgcgccgctaccttgaggctcgccgggatgtgattgccggtcggcattgcgcgaagaaggctcctgccaactggtatcgcacgattgaccgtattaccccggcgctggctgcgaggcccaagctgttgatccctgacatcaagggtgagtcgcacattgttttcgagggcggcgagctgtatccaagccataacctttactacgttacctcggacgattgggatttgcgggccttgcaagctgtgctgctgtccgctgtctcgcgcctgttcgtggccacgtactcaacgaaaatgcgaggtggcttcttgcgcttccaagcgcaatacctgcgccgcatccgtatcccacgctgggccgatgtgcctgaaccgctacgccgcgagctggctgaggcagccatcaagcgggacgtgcaagcctgcaaccgggctgtgttcaggctctacgggctgagccacgaagaacgatctgcccttgggggcaatggagaataa

SEQ ID NO: 268644 - DNA, 408 bp, Klebsiella pneumoniae
gtggtctggcgtctggatcggttaggccgttcgctccccgatctggttcgcatcgtgggggagttggagcagcgcggtgttggcttcgagagcgtcacggaacggatcgaaactggcagtgcgaccgggaagctgactttccacttgttctcggccttggccgagttcgagcggaatctgattcgggagcggactcaagcaggcttggctgctgctcgtgctcgtggtcgcaagggcgggcgaaagcccgcgctggacgccaagcaagtccgtgagatcaaggcgcttttgcgtgatcctgatattcaggtcgccgacgtagcgaaacgctatggcgtttcacgcgccaccatttacaagcacgttggtgcggtgcgcccagagcgcggcgcatcgccgatgatttag

SEQ ID NO: 268645 - DNA, 882 bp, Klebsiella pneumoniae
atgcctgctcttgtcccggaactggtgaatgcggcaattgatgcctcggtgtcgcccggcgatttgttacgccgggcgctggttgttgcgcggcgtctggccgtgcctgagctggtcgattggatcagcagcgaactgaacggctactactcaggggaagtgccggactatcgtcgggtacaggggcagttgatggccgaaaacccgattcatggcccgatcccgttttttgcgccgccagacatggccgagctgctgtcggacttcgctgtaagacagtcggtgccggagctgatgcagcttgctcagagcacaaccggaatttacagccactttccggccaacatcgagcacacgctgatgcaaatgatgcgcgaggcgaacggtgtgacgatgcgcccggcgctcaggttttccaccgtgcaggtgcagggtgtcatcgagaaggtgcggagtcgggtgctcgaatgggcgcttgatctggaggctaaaggcgtgctcggggaaggcatgacgttcactcagcaggagaagcagactgtgcagcagcagcattaccacttcggagacgtaagcggctcccaaattcagatcggatcgaatagctctaaccagacccagactcaaacaggcggtgacatggctgcgctgtcagccttgattgagctgctgcgcgatgccatccagcagggacgcatcgaagccgaggtgcgcgatgaattgcaggcagagctggcgacattgcaggctcaggctgcatcgccaaagcccaagtgggccgtcatcaaggcgaccgcagggagcatcaaagccgtgttggaaaacgcggcaggtagcgtgcttgcggcgcaggcgctaccgtacctgacggcgctgctgtga

SEQ ID NO: 268646 - DNA, 2214 bp, Klebsiella pneumoniae
atgatctcaaagcacattcgtaacccagatgcgaaggccgcgaagcatcgtcgcattatcaagctggtcgagtacatcctcaatccacagactgagagcgcgacggagaaatgcgtctatcacggcgcacgcgggttcatcactgctgaacggtcgatgcagcttggcgagatgattgcactttcggaagatgccacgcgaagcaagaacactgtggagcattttgttctgagcttgcgggagggcgagaagccgacacctgagcaggtcgaggagatgataacgatctggctcagggaacttgggttgagcgattgtcagattatctatggtctgcacgaggacactgataactaccacctgcacatagcagtcaaccggatgcaccctgagcgactggagtgcatcaagatcaacggtggcttctcgagggaagcggagcatcgggcgattgcattgatcgagcacgcgcaaggctggaagtccgagaaaaatgctcgatacacggtgtttccagacggcacgctggcctaccgaggcgagaacggtgaggctgtgccggatgcgggctggtcggctgatttggcactcagacggcggcaaaccgatgaccgtaaagagctgcggcgacggcatgagcgtgagcggcgagagttggaggctgttgaagctacgaaggcgcagcggcaggcggcgctcgatgagctgagaacacgccagcttgctgagcagttggcgcagaaaacgcagcagaaggcggagcgcgtggcattgcgtagcgccctccccgcctctcgggcacgtgaaaatgtcgcgatcagccagcgagccatcgacatcgaaactcgcacaggcgtgcagagtgccgagcgtaccgccaaagaggttgccgggccgatcttgcggtcggcatcgagttgggcgcagttgcacgcggagctggccgccgtggggtgccgcttcgagcgcgaagggagcggtgcattgatctgggttggagacacgcccgtcaaggccagccaagcctgccgaaagtcatccttgcctaagttggagaagcgtctgggtgcatatgagcctgctcccgaagggatggtgatttcagagcgggagttggagccactcaagccggatgcgcctcgcatgagcgactacatgcgcgagcggcggcagtacgagcgggagcggaaacaggaaacggcagcactgcgcgagcgtcatcgactggaacaagaggccgcgtggtcacgctacgaagcgcggcgcgatgcactgctggctggccatgcgggcaggaatcggtatgccttgggcgctgttgcacgcgctgagtggctggccgaacgggatgagctgatccagcggcagagcggcgagcgccaccggctgcggaaacggttgccagctttccccggcgtcgaggactggtatcggcgattggatgagccaggactggccgaactttggcgacatcgaaatagcgatcaggcgctgctggtcggcgacgcggacacccctgccctgccccctcgggacatccgggcgttcgtggccgaggtgcgtgggcgtcaggttgtattccggcgaccggatgatgcaggccctgcatttgttgattgtggtcggcggatcgacgtgactgcctcgaatgatcgtgatgcggcacgggcggcgctgcaactggcgaaggcgaagtgggggcgggtcacggtcagcgggccacctgagtatcagcagatgatgctggagctggctgcggagatgggggtgcagattgcaaaccccgagctgcaagagcggctgaatgtggagatcgaacgccgcaggcccgtcccagtgccaacggcaaagccagactggtcacggtatcggtcagtggcttccggtggggtgccctcccctgctcgaacgactggcgagcgcgatccgcgttggcctcaatttgagcggtccatgctccagatcgggcagttcgagctgggcgtgtcggctgtggtgctgatgggacagcttgagattgccaagggcacggtgactgagcgtcttgacgctgcggatcggtctggcagatcggttgatgacgtggcccgcgagctggccaccgcagcagcgcgagccgaggccgaggcattccagcggcagcttgacgcggctgatcgagagcaggcgcgtcctgacatgcaccccgacgagccagaggggccgggttggtga

SEQ ID NO: 268647 - DNA, 846 bp, Klebsiella pneumoniae
atgacacatgccggaacgcttcgcgccccgacctgtatcattcaatggacgccacttgttcggcgctgcgcttctcacaagatggctctttcgtcctgccccctcgcgccgggggtggcgtttgcagcttgctatcaagcagttttcaagggggtcgcaagggtgccgttcgtttgcattggcgatgagccgcttacagcaaagctcgcgctgcggttacagccagatgagcgcgatgcgctgcgtgccgaggcggatgcacgcggtgtcagcatgagcgcccttgtccgtgatctgtacttcggcgctcccgttgtcagtgatgtgaatcgtgatctggttgcagagttgatccggcttggtgctgtagttcgctccgcgtgggatgcttccgctgcaagccagtcaccctacttccctcctctcgcggaggccattgttgatctgcaaaagttcgctcggacactggccggaaagatcaagccgagccgcgtccggcatgatcgcgccgctgatgttgtcgagttcgttggaaagtcagatggcgtggcactggaagctattgtgacgttgcgtcttctgcccgcagaaaaagaccaccttgcgttggatgcggagatggtgggtattacacccggcgcactcgttcgacgtcggatattcggtcgcccggtgtctgcgaacataaatcgcgtgatgcagcggcgtatccggtcgctgatggcgatgttgcaacatttcctcgcagagcatcgtagtcgggactacccagagatttatacgacgcggagtgtactggcggcgctcttcaagaggctgggacatgatctcaaagcacattcgtaa

SEQ ID NO: 268648 - DNA, 327 bp, Klebsiella pneumoniae
atggctacactcaccgttgagcaggtcgagcagatcagcgcaaagctgaaagaactgcctgccgttgagaacaagaaacgcccggtcagcaagcaagaggccatcaagctgcttgcaaaggacatcaaagcaatgcaggcccgtggctatacgctggagcaggtcagcgagcagctaaagcagcttggtgtatctctggcaacaccaacgctgcgcagctatctgaagagagctggaagcggaacggcaacacgcaagaaaggcagcgaagcgggtagtgcaaccgctatcgaagatcagcaacagcctgctcagccaacggcatag

SEQ ID NO: 268649 - DNA, 222 bp, Klebsiella pneumoniae
atgccgacacctgatgaactacagcaactctcagatgaaatccgccgtgctggtgcgatgctcgttcaggtggcccatgacggcgatcctgaaatcctgatgatgatcgtcaatgtgcttaacgcatgtgcagcaaaacctgcatggtgggcgcgtgaggcgcaggctgctgaggtcgatcagatcgttgccgacatcattgagcgtgcgcggtcaggatga

SEQ ID NO: 268650 - DNA, 1053 bp, Klebsiella pneumoniae
atgcgccctgctgagttttccccggaagagatcgtcgcggctggtgaagcccttgtggccgctggtcgcaatgtgaccggctttgccctgcgccagaaggtcggtggcggcaaccccaatcgcctcaagcaagtgtgggacgagcatttggctgcgaagaacacgacggaggctgagcctgtggcggagctgccggtcgaggtggctgaggaggtcgctgctgtcaccaagtcgctgacagagcgacttgcgacgttggccgtcgagctgaacgacaaggcggtcaaggctgctgagcgccgggtcgccgaagtgttgcgcactgctggtgagcagcgtgagcaggcggagcgggagctggtcgatgccgcacagacggttgacgagctggagacacggttggacgagtcgcaggcggaagttgaatcgctggaaaggcggctcagtgaggctcagtctcatgggcaggcgcaggctgtcgagctggcccagttgcgtgagcgtctggttgccactgagcaagctgcacgggccactgctgatgcccacgaagccgtgcgctcggagctggatgctgcccgtcgcgacgcaggcgtgaagatcgaggcgctgcgggatgagctggctcagttgcgtgagcgattggcggcgtctgaacaagcggccaaggttgcagcggaaactcacgctcgcgagctggagcaggcgcactctgaaacgaagacggtacgggccgagcttgatgtggctcgtcgtgaggcggcagagaagattgaggcgctgcgaggtgagttggccgagcagaaggccaaagccgctgctgatgctcaggcacacgccgattaccgggcgcggatggagcaggatgcagcgcggattaccgagctgctggggcaggcaaaagaggctcaggaggttgcccggcatgatgcgtcagaagcccgtgaatctgctgcaaagctggcgggtcagttggaggctgtacaggctcagaatgccactctacttgcggctgtccagcagaggtctgatcgcggttcgggtggcaaatga

SEQ ID NO: 268651 - DNA, 198 bp, Klebsiella pneumoniae
atgcaagtcaccatccgtcgatttccctgtgctcgtgttcgagcgttcgttcacgtcgaacgtgtcttcgaggccgcgtgcggcatcggtgacgatctcgtcgagcctgtcctgctggccgaggtctgccagcgcgaagcggtctgtccgcatcttcaccaatgccctctgcggagccgggcgacggcgacggaatag

SEQ ID NO: 268652 - DNA, 315 bp, Klebsiella pneumoniae
atggctaagagatcatttagccctgagctgctggagtcgcttcggtcgatggttgtgacaaaagctcttgatgccctcgggctgcattggaagcgtgatccggattttcagccggtgaaggatgcggccactatccggttgcatgttgcagttggtggccaggttttcgagctgctggtgactggtgccaagtttttcgatacccgtgcagacaaaggtggtggcggtgcgattgatctggctatgcacctcttgcggctcgacttcgttgcggcggttaagcggttgtcgtcctcgcgtgtttccagcgtttga

SEQ ID NO: 268653 - DNA, 1095 bp, Klebsiella pneumoniae
atgaataaacttacagatatttctaaaaacggattcagagtttgtgagtcacgcgaaaatgaacttgatattgcgtttatttcactcaggcttgcgcttaaagcatatttttctacttatcgtgatctcaaactaaatttgtcatcccttaatagtaatatttttaatattgaagatgttgataaaaattattctctttcttattatgagtcttgtacagagactatcgttcattttcagcatttctttgaacttgcttgcaaacatattttaaaaaatgaacacccccttttagctgacgttgcatctaaaaaagccgttgttctatcaaagcttttaaaaggcgaaatgctaaatgagattgaagataatagtttacagtcaatagagttcagcgaagcaatatccagactgttagagttgattaaaaatgaaagtatcaatgatttcaaattattaaattttatcctttctggtgaagaagtattgagaactgtaaattcacttaggaatagaatctggcatagagggctttttgttttacgctacgaagcacttgatgagttagtttgccgatttattttaccgttagtcagtgagtttttatctctgaatctattttatggtaatgaaataaattggaagtataaagatctacactgtaatgttgacccgatttctgaattaagtaatatgaattttaatacagcttttgagttggataaagttgcatttttaaaagaaatgggaagggctgcatataataatcccttatatgaaactgttttaaaaagaacaggaagacaaaatttctcttcattatttgataatgcttctattcaaaaagctgaggatgtcgctaatcatgaattacagaaacatcatgcagagttgaaggcttgcccagtatgcggtgtaaactctttgattttataccctgaatctgattgtgagtataataatgataacgaggtaagcaatgtcattacttacatatggaaaataacatgtgaatgctgtgggttttcgttacataatgaatttaaaaatgcgaaagattatggcttcaataatattgaagatttttgggtgtaa

SEQ ID NO: 268654 - DNA, 126 bp, Klebsiella pneumoniae
atgttcagatatttcattctgcgccctggtaatgctgccaacttgctgatttggtgtataatggtgtttttgaggtgctcccgtggcttcagtctccgtctgctgtccctcctgttccgctactga

SEQ ID NO: 268655 - DNA, 507 bp, Klebsiella pneumoniae; identical to SEQ ID NO: 203902

SEQ ID NO: 268656 - DNA, 333 bp, Klebsiella pneumoniae
atgaaacttgaagtggaattctggacgctggtgggtctcctgacagggtttctgggctttgtgtttgccatcgcgcggatgtttttgtcccggattgaaagccagcagaacgaactctcaggggcgttgaaaagcagtctgcgtgagttcagcagcaatctctccggtctggagcgggatctgatggccctgaaggccgaactgccgctcagttacgtgcggcgggaagattatgtccgggggcagacggtgatcgaagccaagctggatgccctttataacaaactggaagtggtgcagcagtatcgtgctgccggaggtcgaaatggttga

SEQ ID NO: 268657 - DNA, 312 bp, Klebsiella pneumoniae
atggttgatatgacccgtattcgtcgggaatccctgcgctggagcctgatggtggctctgaacaaagcccgcccttataccagcagcgaagttctcctgctggatattgccagggcaatttatcccgataccaccgcgctggagctgcgcagggagctggattacctggctgaccgccgcatggtggaagttacccgccagccgtcaggtagctggttcgcggacctgacacgtctcggtgtcgatgtggtcgaatacaccgtggaatgcggcccggggatttctcgtcctgaaaaatactggagtgaatga

SEQ ID NO: 268658 - DNA, 570 bp, Klebsiella pneumoniae
atggccagtcgcagcacagttgagaaactgcctgaggaggtgcgtcgctggctggagcggtcgctgaatgagtccggattcagcggttatgccgagctggaaagtctgttgcgtgacaagggttatgtcatcagcaaatccgcaatccatcgttatggccagaagattgaaaagcggttcggcgcgatacgtgcggccaccgaagccgcgcggatgctgactgagggagctgaagacgatcaggatgcccgctctgaagcggtgatagcgcttatccagaccgaactgtttgaaagcatcgttcaactgcaggaagccggtgaggaagagatcgaccctaaaaagcgggtggagctgctgtccaaggtggcgaaaaacatcgccacgctctcccgggccagcgtcaacctgaagaaattccaggctgacgccagggaacgcattaagcgcgaagcgcgcgcagaattgatccgcgagcaggaagagaacctgaaagagaccgccaccgcacaggggctcagtgaagaccaggtgcagttctggcgcgagcgcgtgctggggatcaagtga

SEQ ID NO: 268659 - DNA, 561 bp, Klebsiella pneumoniae
atgtcgggtgtgacgctgacgtttgatgctcaggatgcgctgagccgactctgggatgcccgggcggaaatgatgcgcccggcaccgctacttgagaggatgggagagcgcttactggtgtttcaccagaaacgattccaggaacaaaagtcgccggaaggcgtcgaatgggctgcacttaagccccggtaccagcggcgtaagcggaaaaacgcggacaaaatcctgacccgcgacggctatctgcgtaacaccctgcactggcaggtgaatgccgatgaactgctgttcgggacgagtcagctctacggcgctatccaccagttcggcgggactatcgaaatcgccgcccgcagccagcaggcgtattaccggcagaagaaaaacggcaaggttgccagtgcgttcgttcgcaaggacaagtcgaactttgcgcagtggcacaccattccggcctacaaaattaagattgaggcccgcccgtggctgggcgtgtcaaaatcagagggtgaaacgcttatcgatatggcgaaaaactacctgcagggggcgtttaactga

SEQ ID NO: 268660 - DNA, 987 bp, Klebsiella pneumoniae; identical to SEQ ID NO: 250397

SEQ ID NO: 268661 - DNA, 291 bp, Klebsiella pneumoniae
atgcgccgggtgtggccaaataacgttcgcgaactggcgaacgccgccgagctgtttgcagtaggggtattaccactcgcagaaacggttaatccgctgatgcacatcggcgagccgacgccgctggatcagcgggttgaggacgtcgaacggcagatcatcaccgaagcgctgaatatccaccagggacgtattaatgaggtggcggagtatctgctgataccgcgtaaaaaactttatctcagaatgaagaagtatggtctgaataaagagcactacaaaggggtttag

SEQ ID NO: 268662 - DNA, 1194 bp, Klebsiella pneumoniae
atgctggtactcaagactctcatgcagaaacacggcattgaacagaccgaagtggccaccgcagcagcagtttcccggccagccatttcacagttgatcaaccatggcatctggccaaaacgtcgtacccgggaagtgcggcagaatattgttacgtttctggcctcacgcgggctggaacaggaagccatcagggcattcgaagaggtgggtgaagtgctgacagcagatgccgccagcactccggtcccgcaacaggcaaatgaaggagacatcactatgttactgtcaaaacaggcgttaaatccagccactaaaaaacatttcggcatcttccgcgatccgtttgccgaagaagccatgcagggttccgacgatgtattcaccaccccggatattcgctatgtccgtgaggcgctgtatcagacagcacgatttggcggttttctggcagttatcggtgaatccggggccgggaaaagcaccctgcgtcgcgacctgattgagcgtatcaaccgcgacagagaaccggtcatcgttattgagccctatgtgctggcgatggaggacaatgacgtcaagggaaaaaccctcaaagccgccgctatcgcggaggccatcgtcagtacactggccccgcttgaaaacatcaaacgcagccaggatgcccgctttcgtcagctccatcgcgttctgaaagacagctgcagcgccggttacaaccacgttctggtgattgaagaagctcacagcctgccaacgccaaccctgaagcaccttaaacgcttctttgaactggaaagcggtttcaaaaaactgctgtccatcgtgctgattggccagccggaactggcgacaaaactgtctgaacgcaatatggaagtcagggaggtggtccagcgctgtgaagtggtcagcatgccgccgcttgagcaggagctggaaggctttctgcggttcaaatttcagcgcatcggcaaaaatatggcggaagtgctcgacgagagcgccattgaagccattcgcggccgtctcagcctgcgttccggtaacggcaagacgaccaccagtctgctgtaccctctggctgtctgcaatctgactattgcagccatgaatgatgccgcagccttgcatattccggttgttgacgctgccgttattaagggcatcgggaaggacgttaacgtttaa

SEQ ID NO: 268663 - DNA, 1785 bp, Klebsiella pneumoniae
atgaatccagtccttattcagcgccttgttgccattgccgaagcggccagtgctgccgggcatggcaataaagaagcggtgtatcaggccgcatgcgaggaattgtgtatgtcacgtgccacattgctcaaaaaactgaatgccgtccgcctgcagaagccaaggaaacagcgttctgacgccggtgagaccgcactgacccgggatgaagccatgaccatttcaggtgcgctgaagaagaccctgcgcggaacaggcaaacgtaccctgagcgtcagaaaagctatcagcagcctgcgtgacaacggcctgatcgccgccggtaaaactgatactgaaaccggcgagattgttccgttatcaaccagcgccattgttcgtgcgctgtacagctatcgcctgcacccggaccaactgagcgcaccagccccggcagtacagctcgccagtcgtcacccgaaccacgtctggcaactggatgcgtccatctgcgttctgtattacctgaaaaacccggacaaaaaaatcaagggtgataccgggctgcgcatcatggacgagaaggtgttcaacaagaataaacccgacaacctggccagggtcgtcaatgaccgtgtgtggtctttcgaaggtaccgaccataccacgggctggatctacctggaatatcggtttggtggcgagaccacggagaacttcacctcggtactcatcaatatgatgcaggagcgtggaggtgcagatgtgctgcacggggtgccgaaagtgctgttcaccgaccccggtgcggcactgaaatcccccacgatgtcaaacctttgtcaggcgctgggcattcagcttattgcccataaagcacgtaacgcccgggctaccggctcagtagaaaaagcgcgcgatattcttgaacgcgatttcgaacacggcctgtgcttctgccgggttgacaccattgatgaactgaacggactcgcccgcaagtggcgcatgaagtttaaccggtcggagacccactcccgccaccagatgacgcgtactgataaatggttgttgatcaccgaagagcagcttgtgaaagcgccttccgttgaagtctgtcgggaagcggctgtgtccgcgccggtgagcagcaaggtggataccttcctcagggttcgtttccgcgggcgacagtacgatgtttctgctgttccgggcgtctgtgtcggtgatcgcgtgatggttgcccgtaacctttaccgggacgatcaggcgcaggttgtgatgaccggtgaggacgggttcagaaccttctttctggtcgatgaagtactcaaagacgagcacgggtttgccgtcggcgcacccgttattggtgagaacttcaaatcgttgccggagaccattgcacagcaaaacgcagaagaggttgaacagcatattttcggtacgacgagtaaagaagaaaccgcagcagcgaaaaaggccggagccctgccgttcgggggacgtttcaacccgtatctcgatattgaacgcgacgatcacccgacctacctgccaaaacgcggccaggaaagtcaggttcgtggcccgcgcatcgaggagcgcccgctgacgcatgtggaagcagcgaaaacgttgcgtacgcgtctgatgcaggtcggtaaatcatggcaggcggagcattacaccctgctggtgaagcggtatccggagggcgtacccgcaacggagatcgacgcactggcagaagagctgtccggtggtcagtcgccccggctcagtatcgtcaatggtcattaa

SEQ ID NO: 268664 - DNA, 444 bp, Klebsiella pneumoniae
atggtcgcatcacctttcgtaccacctgtaagtgtccctcaacacgaaaacatcctgatggacagtcccgaagcgttggggctggcgctgtgccgccatgtgcccgatatggccaacggtttcaccatcaccactcgcgacagccagctgcagctgaccgtaaccgccgaagataccagaccctttatggcggcgatggaacgcctgctgaagggcaaaatccgccacattcagcgcgggcatcaggggcgagttctggatgaaaaagaggccatttttgatgccaataacaagattattgctgaacggcaggctgagtatgagcggctcctctgggacgggaaccctccatttactactgacgaactggaccgcatcgccgccatctacagagcggccatgtcgcgcaaaaaagcggactcacatactgacaccggtatctga

SEQ ID NO: 268665 - DNA, 933 bp, Klebsiella pneumoniae
atggcacgcaccaaatcgcaaccagctgaactgataccagacgtcgcgctaaacccagagctggaaactacccaaaatctgatggcgacagtcagcagccagatgaatgacgaacgcgatcttctcaatcagttgctgggtcagacgcagatggccgatgcttttacacaattttccctaacggttaggacttcaaaattaaaatttgttaaagaaaacaagctataccgtgccctcaagggtaaaaaaagtcctaacggttatgactttttaagcggttcatgggaggagttttgcaatcttttaggaatttcagtgcaaaaggctgatctggatatacaaaatttaaattcattcggcgaagaagcccttgaatccatgtcccgcatgggcatcggctaccgagagctacgccagttccgccgtctgccggaagaccagaaaagcgccctcattgaggtggccaaagaaggcgataaaactgcactgctggacctggctgaagagatgatcgccaaacatgcccgcgagaaggaagagctgaagaccgaccttgaaatcagtcgccagatgctggccgagaaaaaagaagaactcggcacgatgcgcactgaaaaagatgagttgaaggcccgcctggttcgccgctccgcaaccgaaaccccggaagaggaaggtgcagcccttgagacggaagtgaccgggtttacgaatggcgttatcagttcctttttcgaccttaaaagcggctttaatgcgctgatcgagcacaccgaacgcactggcatcagccataccggtttaatggcgggtcttcttgatgatttacagatgaagtttgaagaactgcgtcaggatttcagtctgcctgaattcagagagcacgatccccgcccacagtgggtaaaagaaatgcaggaagaggagaagtaa

SEQ ID NO: 268666 - DNA, 597 bp, Klebsiella pneumoniae; identical to SEQ ID NO: 203897

SEQ ID NO: 268667 - DNA, 573 bp, Klebsiella pneumoniae; identical to SEQ ID NO: 203898

SEQ ID NO: 268668 - DNA, 3474 bp, Klebsiella pneumoniae; identical to SEQ ID NO: 203899

SEQ ID NO: 268669 - DNA, 483 bp, Klebsiella pneumoniae; identical to SEQ ID NO: 203900

SEQ ID NO: 268670 - DNA, 180 bp, Klebsiella pneumoniae
atggttaaagatatggcgaatatattctgtaatctaacgggagtgacgccgcaagatatcaccgtcaatggtaattcgttctgctccgtaatgggggatatctcggacagaatcgacggggccacgcgcgaccttccgagagttccgttgtccgccatttccggcagctttgccgagtga

SEQ ID NO: 268671 - DNA, 636 bp, Klebsiella pneumoniae
gtgcgtggggatcgctttgtactccacagaactgctgttgagtccggtattctgtatcgccccgaggttctgcgcccggacctcaccatcggaattcgtgacggggtcattccaggtcacgacaacctcattcggattcgatgtggtactggcgctgtcgtcatcctgaacggcgataatgccgttgtcgtaggtgaaaaccggcagatcatcaacattgtaatccccgcgcagcagtttcagggtcagtttgccggtttcaaggtcggcatactgcaccgcgcctacgtggtcgaggatctgctgaacaaaggtgtccaggccatcctgacggttatagcggaagcacaggccaaaaccttcctcaaacagcgtgtcggcggcgacacgatagctgtcgaggttcaggtcatcggcgagcgtcagctgacgcccccagtcgcgattggtggcacattccaccagaatgtgagccgggttcatggcatgaatggcccggaggttggcgacttgttcagggagaagatccgcttcatcatcaatctgggtctcgctgttctccagcaggatagtcgctttctccgggtaccagacatcaccgtcccagcctttagtcgtgcggcgaacgcggtataa

SEQ ID NO: 268672 - DNA, 2688 bp, Klebsiella pneumoniae
atgaatacagataaaccgggggcgccctattatcagcgctccgtcgaggagactctcgccagcgtgcagagttcgccggaagggattagcggaacagaggcggctacgcgcctgcagcagtatggcgaaaacgccctgccgcagaagccgggtaaacccgcctggctgcgttttattgcgcattttaacgatgtgctgatctacgtcctgctggcggcagcgttgctcaaggcggtgatgggccattggatcgacatggcggtgatcctcgccgtggcggtggtcaatgcgctgatcggcttcattcaggagagtaatgcggaaaaatcgctgcagagtatccgcaatatgctgtccagcgaggcggtggcgatccgtcagggcaaccatgaaaccatccccaccacctcgctggtacctggcgatatcgtggtgatccgcgccggcgaccgtatccccgccgatctacgggtgattgaggcgcacaacctgcgggtggaagaggcgatcctcaccggcgagtcgacggtggtggaaaaaaccaccgagccgctaagcggcgatttaccgctcggcgatcgcagcaacctgttgttttccgggaccaccgttagctcaggggcgggaaaagggatcgtggtggccaccggcggcaataccgagctgggccatatcaaccaaatgatggcgggcattgagaaacaccgcacgccgctgctggtgcaaatggacaagctgggcaaagccatctttatccttattctggtgatgatggcggcgctgttcgtctttagcctgctgttccgcgatatgccggtctccgaactgatgctgtcgttgattagcctcgcggtggcatcggtcccggaagggctgccggcgattatctcgattattctgtcgctcggcgtacaggcgatggcccgtcagaaagcgattatccgcaagctgccgacggtggaaaccctcggcgcgatgacggttatctgctcggataaaaccgggaccctgaccatgaacgaaatgacggtgaaggcggtgatcactgccgacagcgtctatcgggtggaaggggatagctatgagccggtcggtaagatccacgccattgacgatccgacgccggtcacgatcgcgcccggctcgctgttcgagcgctatctgcgcaccatcgatctgtgtaacgacagccagcttatcaaagaggagagcgggctgtggaaaatcaccggcggcccgaccgagggggcgctgaaggtgctggcggcgaaggtcactctgccgccgctgaccagcgaactgcgcagtaaaattccttttgattcgcaatataaatacatgtcgaccctctaccggctgggtgaagaggaggtagtgctggtcactggcgcgccggatgtcctgttccgcctgtgccagtatcagcagagcgacagcggattgcagccgctggatctcccgtactgggaaggcaaaattgaagagtacgcccgggaagggctacggatggtggccgcagcctggaagccggctgccgcaggccagaccgaactgacccatcaggatctgcagcaaggggtgattttgctaggggtcgccgggatgatggatccgccgcgtccggaggccatcacggcgattgccgactgcctgcaggccgggatccgcgtgaagatgatcaccggcgaccacccgcaaacggcgatgagcatcggcaagatgctggggattggcaatgcgggaaatgccattaccggacgcgagctggaggtgatggacgacgcgcagctgagcgtagccgcgcagcagtttgatatcttcgcccgcaccagcccggaagataagttccgcctggtgcaggctctgcagagtaagaaagaaattgtcggaatgaccggcgatggggtgaacgatgccccggcgttgaagcaggctgacgtcggcgtggcgatggggatcaaggggaccgaggtgaccaaggaggccgccgatatggtgctgaccgatgataacttcgccaccatcgccagcgcagtccgcgaggggcgccgggtgtatgacaacctgaagaaaaccattctcttcgtcatgccgaccaaccttgcccaggggttactgatcgtgatcgcgctgctggcgggcaacgtactgccgctcacgccggtgttgatcctgtggatgaacatggccacctccgccacgctgtcgtttggcctggcgtttgaagccggtgagaaaaatattatgcggcggccgccgcgcgatccgaaaattcacgtgatggacggctttgccatctggcgcgtagcgtttgtggggtcaatgattgcggtcagcgcctttattctcgaagcctggctgcagccgcgcggctattcgccggagtttatccgtaccgtgctgttgcagactctggtcaccgcccagtggttctatatgctgaactgccgcgtatcggatggattctcgttaaccaaaggtctgctggccaacaaagggatctggatcgtcagcggcgtactgctgctgctgcaactgctgattatctacgcgccttttatgcagatgctgttcggcaccaccgggctgccgttccgctactgggtgatcacctttatcatcggcttcgccatgttcctgatcgtggaactggaaaaaccgctgacccgcaaatggcgttccgcctga

SEQ ID NO: 268673 - DNA, 726 bp, Klebsiella pneumoniae
gtgacggtggcgggcgaagtccataccaaacacgtgacgcagctcaggattcagggtctccgccatcaccgggcgcagctccctgtcaatccagtcattaccccatgccgctcgctctgcctcggtcatatggataaagtcatcatccagcgcgagacggatgacgggccgttcctccggcatggcccgttcgatccagacaccgggaatacagataccgttaccgtcacgcgggatggcgtccagctcctcacgcatcgccgctttacgcgggccataggcgttacggatgcggttataccaggtctttttcccctcaacggttgccgcttcgcctttcatggcgcagacccgctcaaacaggccattggcgacagcatcatcaaaggtcacggtgaatacggcggcgtcatcaccatagcggcccgcctcaatatcgttacagaactggcagaacgggttgttcttgccgttatgggaactgatgataacgatacgcccgccccagataagcagtgcggtcgctgcatccagtacgccctgcacatcctggtggaatgccgcttcgtcgataaccaccacgccctgcagacctcggatgttggccggacgggaagagagcgcagccacctggaacccgctggcgaagcggacgcgataggcagcaatcatccgggtattaccctgttcgtcctggtcttcgaaaaggaactcttcaatcgctga

SEQ ID NO: 268674 - DNA, 405 bp, Klebsiella pneumoniae
ttgcccgccttgctgaatggccacgagccagaccggcattccgctggccaacgaagtgacgacgtcggttatctgcatcggcagatagcgcatggcctgcgcatactgaccggcgctgataccgcctttactcatggcggcgttctggtcggtaatcttctgaataaacggtgcagcttccgccgaaatacccagttgtgccgctttgtactgcagcaactcggcagtggtcaggttcatggtctcggcctgctcgcgcagccggttgatgaactgttctttggtggccgcagcctgggcttctgcctgtgcggcttcccgggctgcagccgcttccttgcgcccggcatcggtcgcggcatgagcggatttttccacctgcaggcgcagttcgttcaggcgtga

SEQ ID NO: 268675 - DNA, 1149 bp, Klebsiella pneumoniae
atgacgaacgcggggcaaccagccctcgaccgcagccataccgtggcggttgaacgcgtgcaggaagtccagcgcaccgggctgctgaaccacagcggcccgggtcacaaactcctggtcggagagcatcgccgggatggaatccgaggtggtgctgcccggaccgcgaacctgaccgccatcagccgcaaacacactgccaagaagaccgccgatgccgccgctgctcccgataaggctggaagtggccatctgcgccagctgctgtgccgccagctgcgccatgctgttaatgatggtgagggcaaggtttttcaccgcatcacgcaggttcatcgtgcctttggccagccccatcagagaactttcgataccgctctgcagaccgtcgcggaatgcctgagtcagctcattccccgcctgattcagcttgccgagttcttcctcgagctggcggatcatctcccggattttgtcaccggcttcaccgggggcggtggccatctctttcagctgcgggaggtagcctttgattttgtcgccaacttcctggtgaagctggacgaggcgctgccgcccctgaatctcattaagcaggccaccctgaacctgcgcctgaatgctggtttcctgctgggactggtaggtgaacagatcgtccagctgctttttgaggtcatcgacgcggattttggtttccgcgaccggcagcagcttgtcgagccagttcagcccttcggtgtttccactggcttcaaactcgcggcgcaggtcagatacacggttctgcagctcgagcatcgatgcgccagcggtgtcgccggtatcgcgcatgtattccagctgcagctggaggttctggcccttaaactcctgagcggtgatggccgcgttcgccgcttcggcctgacggcgctgctcggcggtcaggttgcgggtcgcaatctcctgggcgcgggtagcggcagcaccctgagtgcgttttgctgcctgatcctcaagctgttttacgaaatttttgttggaggtttcctgctgtttggccagcgactgaccttcctttgtcgccttattggccgcgttggccgcatcaatctttttggccagcgcccgggcttcatcctgctgggctttagtcgcactggatag

SEQ ID NO: 268676 - DNA, 507 bp, Klebsiella pneumoniae
atggctaatcacgattctaaccgcaaaggtgcggtaaaccaaaacgaaacgaacagcaagactcagggccgtcacgtcatgacacctgaaatccgcaagatttattgccgccagctggtcaaagtgttactgcgtcatgccactgaggccgaagtgctgtacatggcggcgggtctggagggtatgggtacggtgatgaccgggcgcaaatacggcgcggctctgatgcttgagcatcaaaagcgccgggattattgcattcagtgcatcgaagtgatctcccgtcacgccacaccgtcacaactgaacgaaatcagcctggctctggatttgttcgtcgccaagatgctggctgagaactaccgccccggactcaactccgccgcctatgatatttactgcaactgcgcaatgcaggaacgggccatcaatagccttgcgactaagctactggacagactgcaaaacagcgcttcccgtaacggaggtcatagcgatgaaaaataa

SEQ ID NO: 268677 - DNA, 939 bp, Klebsiella pneumoniae
atggctagaaaaaaatcacctacaactgacgtgcttcctgatgtaatcctgaatcctgaactggaagccacccagaatctgatggctgccgtcagcgggcagatgaatgccgaacgagatttaatgaatcaattgttgggccaagcacaaatggctgatgcttttgctcaattttccaaaaccgtttttacttctaaaatggcttttgtaaaagaaaacaagctttatcaatcacttaaaggaaaggtgagccaagacggtaccgtattgtccggtacttgggcggaattctgtaatttgcttggctacacacctgaacatgcgaatgaatcaatcaagaacttgcaatcctttggcgaagaagccctagaatccatgtcccgcatgggtattggctaccgcgagctgcgccagttccgacgcctgccggaagaccagaaaagcgccctgattgaggtggccaaagaaggtgacaaaaccgcactgcttgaactggccgaagagatgatcgccaaacatgcaaaagaaaaagaagagttaaaagcagacctcgaagttagccgccagatgcttgctgagaaaaaagaagtaattaacgaaatgagtatggagcgagaagagcttaaagcccgcttggttcgccgttctgccactgaaacaccggataaagaaggagaagcctttgaaactgaaaccataggttttaaaaatggcgtccttagttcaatgcttgatctggaatgtaattttaagttattagccagtcatactgaacagtcgggaattaaccatctttcaataatggcggcaacgcttgacgatatagaatgtaggataattaacctacgacaacaatataatcttcctgagttcagggagattgatggtatggatgagtgggtaaaagaggcgcttaatgaggatgaaatagcgccctga

SEQ ID NO: 268678 - DNA, 141 bp, Klebsiella pneumoniae
atgaattttctctatctcggaataaactgctttctggattcgttgttccaaactctcctgacggcgaaacatgcgaaaaaaagctttaaatatctttaccttcaaatgcatattcatttcctaccatttatttttatctga

SEQ ID NO: 268679 - DNA, 525 bp, Klebsiella pneumoniae; identical to SEQ ID NO: 190480

SEQ ID NO: 268680 - DNA, 669 bp, Klebsiella pneumoniae
ttgctgaatggccacgagccagaccggcattccactggccagcgaggtgacgacgtcggttatctgcatcggcaggtatcgcatggcctgagcatactgaccggcgctgataccgcctttactcatggcggcgttctggtcggtaatcttctggataaacggcgcagcttccgccgaaatgccaagctgtgccgctttatactgcagcagctcggcggtggtcaggttcatggtctcggcctgctcgcgcagccggttgatgaactgttctttagtggccgcagcctgtgcttcagcctgtgcggcttcccgggctgcagccgcttccttgcgcccggcatcggacgcggcatgagcggatttttccacctgcaggcgcagttcgttcagacgcgaggaatactgctcgaaatcatcatcaccaacgagacccgcgccacggaatgcactcagctgctcctgcatgtcatccagtcggccataggcggcgacgactggatcgatacggttgaccagggcggtcagcgcagcacgctgggtatcaatatctgccgtggtgccgtccataccattctggagcgagcccatctccgcccgggtacgggcgattgctgcctgataaccggcgtaatctgtcgccgcctgctggaccacatcgccggtctgtga

SEQ ID NO: 268681 - DNA, 675 bp, Klebsiella pneumoniae; identical to SEQ ID NO: 232406

SEQ ID NO: 268682 - DNA, 135 bp, Klebsiella pneumoniae
atggaaaatttaaccgttatcagttcatttattacctcaatagcccctgtcatcagtgggttcgttccgttcctgttgtcattagctgttttggcaggcttcgttgctatttgcattattggctggaggaagtga

SEQ ID NO: 268683 - DNA, 192 bp, Klebsiella pneumoniae; identical to SEQ ID NO: 217366

SEQ ID NO: 268684 - DNA, 675 bp, Klebsiella pneumoniae; identical to SEQ ID NO: 232406

SEQ ID NO: 268685 - DNA, 135 bp, Klebsiella pneumoniae; identical to SEQ ID NO: 268682

SEQ ID NO: 268686 - DNA, 684 bp, Klebsiella pneumoniae
atgaagcaacatcgagtggtgctgttgcttatatatcttctcaggccatttttaaagaaggtagtatcgttactaaaaaggttgtcaataatgactaatacagcaagtcgtgtttcacgaattctttttaaagagattgtggatggcgatgtaagaaaaatacatgcagattccaatgatagcgacactggtggtggagcccgcgatttccgttttgggtcatactctgaattagaacatatttttcattctatgtttccatctccaatacaggattatcgcagaagaagtggtgtgacatctttagtcactatttattctggatatttctactggcaagatcctgtgacaggtcaaactttaagacagatatcttatttcgaaccaccgaccgatgctcgtccacaagagggcagaattacaaaaattcacgagcatccttgcttatcaactgcccttatgccgaactccagtacaaccaacagagtgtttttgttattaacacaaatggatgatggtacggtttggcccagctatgttgaagaacgaacattgaggtcagttggtctatgggctaatgaagtaactacaaaaatgcttaactgcattgattctccccgtagagcaaatcaatctgttattggttattatgattttacaactcatgatagatattgtaattga

SEQ ID NO: 268687 - DNA, 1209 bp, Klebsiella pneumoniae
atgaagggtatgcgaaaaattcgcaggggtaagaactttgctggtgtggtccaatacacattgaaaccgggagcacatcataaatgcgatccagtcgtaatcgggggcaatatgctggatgacacggcccatgaactgattgctgaatttgatggcactaaacaacttcgcccagatgttcagaaaccggtatggcacaactcgcttcgcttacctgatggtgaatcattatcgaatgaccaatgggtaaccatagctgacgactacatgaagaggatggggttcagtgatactcatctccgttgctatgtgcttcatgacgacgatggccagcatatacatatcattgcaagcaggattgacctcaatggagggaagctctacttaggtaggaacgaaaacctcatcagcacccggatcatcggtgaactcgaaatcgctcacggtctgacagtgaccaagccagccccttccattacaccaatgcaacagaagcgaagaaaagtttcccgtaatgaacagatgctttcagaacggactggccttccatcccctaaagaagctctacaacagatacttgataaaagtttggcagatacacctgatcttttaacttttataaaacgactggaagaagctgaagtcggctggacggctaacattgcttctaccggtaagatgaacggcttctcattctcttaccgtgatatagctttcaaagcttcgcagttaggcaagggttactcttgggcaaatcttagtaaccgtcttaactataaccccggccacttagaagctcttcgagcgggcatacagaccaaggaagctctacctactcatataccaatgtctgtccttgtccctgctcctgctcctgctcctgctcctgctcctgctcctgctcctgctcctgctcctgcaatagttttgaaaaccgctgagagaaaggaaagtatcggtaaaaaaattgcagaactggaactacggctcagagaagacaaacggaacgaaatcgtagaaaagatccttcaaaagaatgcagacaaacagcaaaagcatctcaggctcaccggctggattccctttttacaacggctcatagagcttctcagaaaatatggaaagagcatcctccacaaggttcctacaaacttctcagaagtctattcaacacatcatctgaaacctacaagaaaaattcgtttatag

SEQ ID NO: 268688 - DNA, 126 bp, Klebsiella pneumoniae
atgaagctgactgtcggaaatattcttttattgtgcgtgctgggctgcatcgtcatctgggttgctgccggttttatcggttattacaccgttatcgccgctctggattattttaataaaccgtaa

SEQ ID NO: 268689 - DNA, 249 bp, Klebsiella pneumoniae
atgaagagtaaaccgcctaggcagctttataaatgggacagggctcgggtaaaacttgccaggccagcaggaaacatgatggcatctttgcctaccggtactgagggggaagtaagaaaacgaggacgtggtctggaatttacttctgatgcatgtgagtgctgtggtgttcaggtgcgaatatcgagaatgagccgcgatgattttgagcttattgaactggatgaacaattcaaaagcgagggctga

SEQ ID NO: 268690 - DNA, 702 bp, Klebsiella pneumoniae
atgaccattcccagcccgagcgtgctgcacttccgcggcgggcggaaagatatcgatgccacggtctacccggatcttagcgactacttcgacgatctggccaccacctggcgcgacgccatccgcgcgttttatgacgccggctgccgctatctgcagctggacgataccgtgtgggcctatctgtgctccgatgcccagcgccagcaggtacgtgagcgcggcgaggatccggatgcgctggcgcgtatttatgcccgggtgctgaaccaggcgctggagggtaagccggccgatctgacggtgggcctgcacgtctgccggggtaacttccgttcaacctggatctcggagggcggttacgagccggtggccgaggtgctgtttggcggcgtcaatgtcgatgccttcttcctcgagtatgacaacgaccgctccggggatttcgcgccgctgcgctttattcgtcccggccatcagcaggtggtcctcgggctgatcaccaccaaaaacggcgagctggagaatccgcagagggtaaaagcgcgtctcgccgaggccgcgcagtacgtgccgctcgagcagatctgtctcagtccgcagtgcggtttcgcctccactgaagaggggaatgccctcagcgaagaccagcaatggcaaaaggtccgtctggtgacctccatcgccgccgacgtctggtaa

SEQ ID NO: 268691 - DNA, 702 bp, Klebsiella pneumoniae
atgaccattcccagcccgagcgtgctgcacttccgcggcgggcggaaagatatcgatgccacggtctacccggatcttagcgactacttcgacgatctggccaccacctggcgcgacgccatccgcgcgttttatgacgccggctgccgctatctgcagctggacgataccgtgtgggcctatctgtgctccgatgcccagcgccagcaggtacgtgagcgcggcgaggatccggatgcgctggcgcgtatttatgcccgggtgctgaaccaggcgctggagggtaagccggccgatctgacggtgggcctgcacgtctgccggggtaacttccgttcaacctggatctcggaaggcggttacgagccggttgccgaggtgctgtttggcggcgttaatgtcgatgccttcttcctggagtacgacaacgaccgctccggggatttcgcgccgctgcgctttattcgtcccggccatcagcaggtggtcctcgggctgatcaccaccaaaaacggcgagctggagaatccgcagagggtaaaagcgcgtctcgccgaggccgcgcagtacgtgccgctcgagcagatctgtctcagtccgcagtgcggtttcgcctccactgaagaggggaatgccctcagcgaagaccagcaatggcaaaaggtccgtctggtgacctccatcgccgccgacgtctggtaa

SEQ ID NO: 268692 - DNA, 288 bp, Klebsiella pneumoniae
gtggtggacccagaaccgccgtttttttatgaacgctgtcgtccggctggaaaccatcagggcaacacgggcgaaattgtcggcttcggcagcatcttcgcaaccctcatccgggccggacacgacccgggcaggctcggaacctacaccctccgccagttgacgctgtattacagcgaagcgctacggcaacaccggcaggcgtgcattgaccgcgtatttgacgtcaatgccgcatttgccggtggcaataccgccactcagcgggtgaatgccctgaaatcctga

SEQ ID NO: 268693 - DNA, 141 bp, Klebsiella pneumoniae; identical to SEQ ID NO: 145066

SEQ ID NO: 268694 - DNA, 216 bp, Klebsiella pneumoniae
atggcaataaaatttgagatttatatcgcgctgactcccagagggggtatttattgcaaaatgcagggcgcaaacactaatgatgcatgcgaacgtgaattatccatactggaatcattgaaaccttgtgttgaggagtctgttctcagcgagcttaaaaatagcggttatcgggtagaagaggattttttaatgcccggcggaaaatcacattaa

SEQ ID NO: 268695 - DNA, 303 bp, Klebsiella pneumoniae
atgattgacctggaaggtatccatccagagcagggtgccgccgtcatagtccagaatgtcgcccttgagccactggataccggtggttgcaagcttgccgggcacccagccaatcagttgctcacgaatctggccaatcagcgggctgatttcatgggtcagaccgtcggccccctgcccatagttgcgcacggcaacggccacaccgaagaccgcctcggcaacctgtgcccggcttccgttccccgggacaccgcgctcaggccccatcagaacatacgcgccggggaccgcaaatcctga

SEQ ID NO: 268696 - DNA, 306 bp, Klebsiella pneumoniae
atgattgacctggaaggtatccatccagagcagggtaccgccgtcatagtccagaatgtcgcccttgagccactggataccggtggttgcgagtttgccggggacccagccaatcagctggtcgcgtatctggcctatcagcgggctgatttcatgggtcagaccgtctgcaccctgaccatagttgcgcacggcaacggccacaccgaagaccgcctcggcaacctgcgcccggctcccgttccccggaacaccgcgctcaggtcccatcagcacatacgccccggggaccgcaaaaccggataa

SEQ ID NO: 268697 - DNA, 210 bp, Klebsiella pneumoniae
atgtgtaatcgtgaagcttctgacatcaacgacgatttcaagatcaagttcgctgaatgttttgtagacttcaacagcttcttgtttagcagcgtcacgaacagcctgttctgctgctctttgctcttgtgctgctttactacgccatttggcactatggatacgcttcattggaggacggtttgtttcagcggctttagcaagccatag

SEQ ID NO: 268698 - DNA, 207 bp, Klebsiella pneumoniae
gtgcgtcacggcgatacggcgattgccggttgtctggcgaactatgccgccctgaatctggccactgagatagcgtttgagtccaccggtgagcgcgatattttccgcgtgctgtcaggcttcggcgacagcagcagcgccggggaattcactgacaccgggttcggtaccgtgcgtggcattaatgactttggaggattcctgtga

SEQ ID NO: 268699 - DNA, 219 bp, Klebsiella pneumoniae
gtggtcctcgggcttatcaccaccaaaaacggcgagctggagaacccgcagggggtaaaagcgcgcctcgctgaggcggcgcaatatgttccgctcgagcagatctgcctgagtccgcagtgcggtttcgcctccacggaagagggtaacgccctcagcgaagaccagcagtggcaaaaagtccgtctggtgaccgccatcgccgccgacgtctggtaa

SEQ ID NO: 268700 - DNA, 204 bp, Klebsiella pneumoniae
atgcggagcacgtatgcgattactggcatccatgtccattcggtgcagttggcgatgcgatttatgtcagagagtcattttcgcggctcgacgcatttaatttctttgatccaggagttcctcacgaagtcccggacttctggtattgggccgatggcgagccagaatggggagactggacacgcccacaatctggcgcagtaa

SEQ ID NO: 268701 - DNA, 258 bp, Klebsiella pneumoniae
atggtcaaaatctacgtaacaaagtacgccctttcttcaggacctttctcggttgatgctgaattaaaaggagagtctgcattttggtatgtcaatggctatcagcaaagtgcatatggaaaagacttttggctgacggaagatgaagcgctggcagattgtgagcgccggcgatcagcaaaactggcgtcgattgaaaaacagaagaaaaaacttaccgcgatgacgttcactatcactgaggtttcgaacaaatga

SEQ ID NO: 268702 - DNA, 240 bp, Klebsiella pneumoniae
atgcatcgacagtcagacatcgccgaggcgtttcgggagtcagttttacggaactctaaaggctaccaatacctgcacacaaaggattttgtgtcagcgctgcgccggcgcggcattcacttttccgaggtagaggccaactcctggatcgcacgcgagcagacatatttcgtcgacaaaacagttgagcacagcgaaaaccgtctgtggatgctggcgaacatggggagggttctatag

SEQ ID NO: 268703 - DNA, 1011 bp, Klebsiella pneumoniae
atggacatcaaccgtgacgggaaagtgacggcagaggaaatcaggcaggcgctggcagtgcgcgatccgctggtgaagaatgtggtcaaccggctggtggtaaaacatcacagcgagtggtgtgatggccgttcgacaggccgctgggaagggttttataaggatctggactcgctggaagtgaagtactgtgagaagtggcaggcggatctggagtggatgagtaaggtaccgccgtttgataaggatgaggcggtgtggcattttcatccggtggtttttttgaatgaattattatcttcaaaacttattacactggaaatggttcttgctgcaaatctaaatgaaaataaaattcaatgtgaaagggttctaccttatctcaataaatatgcaagagcctataagatggaagataaaaaagaaattacacacttcctgtctcaaattgggcatgaaagtggttttagtataacagaggaaaatctaaattatagtgctaaagggatgcgaaggatttttgggtgcattaaaggtccagcccaatataataaaaatactgatgattgcaacttgggacgtttaagagacaaactctggactcaggaatctttgtatgcgcatagcccaaaaaatttggctaattatgtttatgccagtcgaatgggtaacgatggagaatcttctggggatggttataaatacagggggcgagggatgattcaattgactggtaaagatggctacagattttttaccaataaacataatgaaatgaatccggatgataagagagactttgtcgaacaacctgatctagtgataagtgatactgaatatggtgtagagtcagcgttttccttttgggtaagtaaaggactaaacaaaactgccagagcattgagtgtgcaagaagtcacgcaaatagttaatggtgggcagaatggttaccctgatcgcttacagaggtttaatgcagtggccccattattaagagtcgataaggagtga

SEQ ID NO: 268704 - DNA, 204 bp, Klebsiella pneumoniae
atgatgcttacccttgagcgctgcgaaccctgcgaaggggctggggtggcctgctattccgggtcgaccgtcacccacgtagggatcgtggtcagtatcggtggtctgctgcatgtggcggaatgcaacccaggcacgaacgtcacctttctgcccttgccgcggtttaagcgtcgatttgtcaaagtggagttctggcgatga

SEQ ID NO: 268705 - DNA, 132 bp, Klebsiella pneumoniae
atggcgaagggattctttctgtatcacctggataaaaccacctggggggacgcatactttcgggtgcgcctgatgacacttaccacattggcggcattgagcggcaacaggtcagggtgggcgatccggtga

SEQ ID NO: 268706 - DNA, 174 bp, Klebsiella pneumoniae
atggttccactggcgctaatgctcctcatgctcatcgccagcgcatggctggaaccggccccgcggcctgtcgccagagggctgtgcgtctggttcgacggggcaatggtcaactgtctgcagaggcaacggctgggcgaaaggttgccgactcactcgctggccaggcggtaa

SEQ ID NO: 268707 - DNA, 540 bp, Klebsiella pneumoniae
ttgaacaacgcctgcgttggccccgcaggggcgaggcccagggatgggccgagtaacggcgagcgaagcgagtcaatccccccctcaccgccatattttaagaagagctcgtacgcaagtacgggcttttttttcgcatgtggcacttaccggggttcgacaactggcaacgccagttggacagaccgcaagcctgcgagcgggctgccccgcaggggcgagcgaagcgagtcaatccccccctcaccgccatattttaagaagagctcgtacgcaagtacgggcttttttttcgcatgtggcaccgcagacatccccggggtcggcagcaatgcctctcccgggctaccagaccctacccgccaggtagtccggccacgcgcagtaccgccgggaagcgagtcaatcccccctcaccgccatattttaagaagagctcgtacgcatgtacgggcttttttttcacatgtggcaccgcagacatccccggggtcggcagcaatgcctctcccgggctaccagaccctacccgccaggtag

SEQ ID NO: 268708 - DNA, 288 bp, Klebsiella pneumoniae
atggggactttcgaatatgcaagtcggttccctgagtcgaaatcgaagacatttggcggggaggttcaaccggtagaaacatttgacgacctctgcaatcttttccttgaaaataaaaggcttgagattgcagagtcatcctacttcaatctcaaatcaatgctgagggtcctcactcggatcatcggtaaaaacacgctgattaaagatatccagcaccacgacatcctggcctgccgtagagagttctttacggcgctgttatccacgatgattccccttggctga

SEQ ID NO: 268709 - DNA, 525 bp, Klebsiella pneumoniae
atgcctagtctcgtgggctcggagatgtgtataagagacaggatcctgcccgccaggccagcagattgtcccctggctgaccgttgccgggcgcggatcgctcggcagcccgccgcggctcatcgccgggcgggccagcagcagattattgacctggttgagcagcggcacggcgctggcgaagccaaactggcccaccaccggcgtaccgtccgggcgcccggtccagatgcctatcagatatcgcgcattgaggccgaccgcccacgcgtcgcggtagccgtagctggtgccggttttccacgccagcggcaccgcctgcggcagcgaggcatcgggaaccggttgcgcttcgccggccaaaatacgccggacgatccatgccgccccgggcgacatcagcgcgcgctcggtcaatggatcgctcggcttcaggcgcagccgcgccgccttgccatggcgggcgaaggcgctgtacgccgcgacaatatcttccagccgcgccccggcgccgccgaggattag

SEQ ID NO: 268710 - DNA, 1650 bp, Klebsiella pneumoniae
atgagaaaagcattaattatagggaatggagattactattcaccagcaaacaaactaaacaatccgattaatgatgcaattttaatgagtgaagtattaggctataaaggattccaagtaaagactcattataacttgaataacttagacatgatctcttatttccattcattttgtaatactattagcgaaggtgatgatgttgttttttactttgcaggacatggcgtagaatttcgtgatgttaactatctcctttctgttgattttcatttattagatgtaacaacttccatttcacttgacaccattcaaaaccgtcttttcagtaaaaataaaagtggtctcaagttgatcgtaattgatgcatgcaggaacaacccagggttacttgaagccccacccgcacaaaatctaaaagcaaataacaatgttttaatagcatattcgacgtcatcaggaaacactgcgaaagatggtcgaaatggtaatagtttatatactaaattcttagctgaaaatataaaacattacaatcaaaccttaagctctatattctccaaaacaagagaggaagttatttcaaaaacaaacttctcacaaatcccatgggaatatagttcattgcttgaaagcaaattattttcttttgataatataaaagcccctattaacttaacgcgaataataaaaaactctctctcccaagcatatgcaatgaaatactttgatgatgttttcattgtagctggtgattcaaaatatttaaatatcttcagcgcatcaagttccacagcaataagtaaaactcttaaatttggtagagactttaagacaattgaatccattgactttaatcataaataccttgttttggtaactgatagtgataccttctatctttttgatactgaagggaataagatcactgaaattcagattaaccactcattatttacagtgctaatcaacggctacaatgtgatattttttgccggaatgagtcatattatatatacatttgatattaattctaaaattatggaaactattgatgttaaagaagaggttataagacagatttatactaatgaggataaggtgaactttatctgcaataggataacaataatgagcatgtcttgccaaaccgttaatcataacatattagcatttggagggagtaatagtattttttgtgttaagaatgtaaaggacaacacatatttatttataaacactgatagagacattttctctgaaacatactcaatatccttttcaggtgatggaaaatttatagccacaggacatgaagacggtaaatgcattttatggagtgctgaaaactataaaatagtaaacattttcaagattaatgaaatcatcgtgaagaatcaattttttgagtctacaaaggagaggcatagcaactacatatcttgtgttagattctctccagactctaaatatcttgccatttcaacttcagaaagttccgtgatattttacgatacatgttattttaaaaccattaattcaatcaacctaaacattgagccattccccatatacggcatggagtttaataataaaggggattcattggttgtatcaatgaaagaaaaaaattatgtattctgtcagtaa

SEQ ID NO: 268711 - DNA, 462 bp, Klebsiella pneumoniae
atggctactaccccaatccagacacacccgttacttgccgtttccttcaacgccgccacggatttcacggtccttgccgaccactgcgaaaacttcgccgaaaccctgattgaaaacgacgaccccacgctgaaaatggcgctctgcggcagactcaacgccgctctgacgctgctccagcccacgctgttagaacccgtcccgccccatcttgttgacagcctgactgttgatactctcccggcaaactccccccaatttgggcctgaatgcaccgagctttgtaattactgccttgccctgacgcagacgttggcggggcagggtttttcctctgaaacggagaaattccttagctggttgctgtatgacctgatcaactattttgcggcagaaatgaaagccccgcgctggttgcgtactgccgacggcgtaaagtttattgacggggtggcggcatga

SEQ ID NO: 268712 - DNA, 327 bp, Klebsiella pneumoniae
atggattttctaacaagtaccattttgtcgggattactttatgacggattaaaatctggcgtaacgatcagtgcggtctggttaaaagatactcttagaaactggctgattgacgataatactgcgcaaataatggcggataaaattactcaactgggcataaatgatgatctaagtggaaaagcaataaaaaccagaattgataacgatcctgagttattgagactattaatggagattaaaactgcaccgcagactattaaccatattagtacccatcatggtagcggcgatatcgtgcatggtaataaaatcatcaataactaa

SEQ ID NO: 268713 - DNA, 3321 bp, Klebsiella pneumoniae
atgaataacgaattgcactcttcacattacggttctggtgacattgtccttggtaataaaataacatacccatcagaacttacccccgaaaacctattccctattgcagaggacatatttagaaagatacgtaacagcgatatagccacggctaagaccgttatagatactatagaaaaattacctgccacacctgtcgccagaaaatttgtagatgtattaaatacagcaattcttgcatcagaaaatgctttaacctctggatttgatgaactgtatactcttgccaaagaagatgatttatcagataaactaagagatgttgttttttctgttattatgcttatagagtttaaaaataacaatcatgaaaatgctatagccatatactcacagtctccaaagaaaaaatactcacacatgttttatcttcagtgccttgcaactgaagatgaaattaacgatttctggaatgagaaccggcctctcgttagtgtagatgaactttatgcaatatctataggtgccaaccgggtaaaaaatcaaatatcagcaaaaaattttgcaacattcttagttgaaagagcaccaacacctataaactctattctgcttaattatattaccgtactggaacttgcagaaaaatatctcaatatagatttactatctctggataaagatgtctatgaccaagtaattagctgtattaatgatacgatctcattctcaaaagcatatccagagaacaaatggttgctttactctttaagtaatttagttatgctggttaaagcaaatcattatcaacttattcaaacaatagctaaatataaggataaaatatcagccattaaccaatctgttactgactttgttgatatgctattctctatcgatgaaacagcacctctcactttacgggatattaaagaagatgatgagttaacatcaggctctctgattgtattattagaggccgcaacaaaaggaacgtatattaaggagaatataaaacagcttattctgaatactgatttaaaacaagatgactatattaaaaacttacctttcaactatcaactcatctcgttgaaagctaaattattattaaatgatagtaatgatctcattaataaaaatagaatcaaaaaagatcttgctattttcattccattagcacataaagataaaacatctctttccggcaatggcttagttaatttatgtgatgatctactctggttagatcttgctaaagaaagctgtgatcttctcgaacctcgtttacctgaaaatttatggccgtcacgcttagttatagcctattttgagtcacttattcgtgcagaaaagctaactacattaacagaatgcctgagcaggatagataaaacattatgggatcactacacatggctctttcaggccagaatagatattgcatataacagttggcctcgggcaataatagccctagaagaggccattaagaaaaatgatgataattcatacccttggcttctactgattcgttgtaccttaaaaactgcgccagctacagccattactattctagaaagaataccgaaaactgttttctcatctttcgatgctcataccttgtcattattgagacttatctcaaataaagtagatcctcatttttcagaaaaaataatttcagagaaatttattagctcgccacaaaaatttgcacctattcttttacaaacacatttttcatctttaacaggttatcaagctaaaaaagctaatgaattaaacacgcaatatccagataaagttataagagctataaaactgatccgtaatggagtggaagaagagaaagttattcttgatataacacctgataaagaacaaggtgccttattatctgctcacactgaatatggagatcttcttgctaatttagctatagatgaggaagatgtttatgtcatggacagagtaaaaataatagaagaattaaatccttatcatgttatattcagatatgcactaaatattgtctctgaaaaacctgacattaacttcccgataaaaaagatagaagttccttcagacccagagctaatgtttcaaaaaataaaagacgaattttcgcaatatgatcatcaatcaagagaagaacatattatcaattgtcagaatgtgcctttataccttaaagctaatgaacttgaaaaaggaaaacctgtaaaatctattttgcagctactaacctctcagagagtcaataaatctttatcattacccgagggtgaagtcgatcatccagaacaatttattactgatattcatggtatcatttatttcgctttaacgcattcagacataacattacgcaaaagtagatccaaactaataatcacaaatgagactaaaacttgcattgataattggttaactgaagttgaaaatccttcttatctatctatcggcgtgcgcgatgatcatctttttaggataacggcagaagacattcaaagctcaacagcatccattcgtgactccctgaataacttacttgactactgcgaagttcactcagttccggtagcggatacgccagatactttattaaatgtaaaagagtttttagacacatctgtctattctacaatgaaatatgttctgttcacaaaaacaccatattttattattgatgactcctttagtgccctgacaaagtctttagactctgaaataaagatagtaaattcgatagtgtttacatcccatctcttagagcatctaccgctacctattaggctaaagaatttccaatgtcatgtagaaacttatcttcctatgtatataagctacaaggattgtattgcattggcaaattcagatgatgaacaacacgtcgctttagtgactaaaatatttcaaatacacgccaatccatttaataactttaatagtttatgttcattttttacccatgctatctctttgccattattttcagtttatatcaaccattataagaaaaaaagaccattatctctggataacgctataattgtattatttaatacttgttgccaaggtgtcgttaatgcttccgatggacgtaccgcagaggaacgattagtaacatttactaagcttattgttgatgaccgtatataccctcaaggatttatttcatttattttttcaattttcagttcatttgcacaaggccattttcttgatattaattatatgaatctactaataaatgacgttgaaacaacagaaccagtcgaggccgccccaactatagtaaatgaagcccttaattaa

SEQ ID NO: 268714 - DNA, 228 bp, Klebsiella pneumoniae; identical to SEQ ID NO: 167500

SEQ ID NO: 268715 - DNA, 174 bp, Klebsiella pneumoniae
atgttcgttgaactgatttatgacaagcgaaatgaaaagggacttgaaggggccagagagattacctctggccgagttaacgaaacggatacaccagtttttccagatgccgcagtgaaagtgaagccaatgcaggcgaacgcttcaaatagttacgccagccaaagttattga

SEQ ID NO: 268716 - DNA, 594 bp, Klebsiella pneumoniae; identical to SEQ ID NO: 217784

SEQ ID NO: 268717 - DNA, 345 bp, Klebsiella pneumoniae; identical to SEQ ID NO: 185230

SEQ ID NO: 268718 - DNA, 327 bp, Klebsiella pneumoniae
gtgctgcgcggtgaccgcattgtggtctcggccgtgacgtatgccgagatgcgcttcggcgccaccggcccgaaggcctcgccgcgccatattcagctggtcgacgcgttctgcgcgcgcctcgatgccatcctgccctgggaccgggccgcggtggacgccacgacggacatccgggtggcgctgcgcctcgccgggacgccgatcggcccgaacgacacggccattgccgggcacgccatcgccgccggtgccgtgctggtgacgaataatacaagagagtttgagcgggtgccgggtctggtgctggaagactgggtgaagtaa

SEQ ID NO: 268719 - DNA, 192 bp, Klebsiella pneumoniae; identical to SEQ ID NO: 121260

SEQ ID NO: 268720 - DNA, 2487 bp, Klebsiella pneumoniae
atgaagcagaggtcattctgcccgggaagattaagcaccgcgatcgccatcgcgctgtgctgctttccgccattttccagcggacaggaaaacccgggaacggtatatcagtttaacgacggctttattgtcggcagtcgcgaaaaggtcgatctgtcgcgcttttcgaccagcgcgattaccgaaggcacttactcccttgacgtctacaccaacgacgagtggaaagggcgctacgatttacgcatcgcgcgcgataaagatggtcggctgggcgtctgctacaccaaagcgatgctggcccaatatggcatcgcggcggaaaagctcaatccgcagctgagcgagcaggagggctactgcggtagcctcaaatcctggcgcaacgaagaaaacgtcaaagacaacctggtccagtcctccctgcggttgaacatttcggtaccgcagatctatgaagatcaacgcctgaaaaactatgtcagcccggagttctgggacaaaggtattaccgcgctcaatcttggctggatggcgaacgcctggaacagccatacctcttcggtaggcgggtcggataacagcagcgcctatctgggcgtcaacgccggtctgtcgtgggacggctggctgctgaagcacatcggcaacctgaactggcagcagcagcagggtaaagcgcactggaacagcaaccagacctatctccagcgccctatcccacagctcaactccatcgtcagcggcgggcagattttcaccaatggtgaatttttcgacactatcggtctgcgcggggttaatctttccaccgatgacaatatgttcccggacggcatgcgctcgtatgctccggaaattcgcggcgtggcgcagagcaacgccctcgtcaccgtgcgtcagggcagcaatattatctatcagaccaccgttccgcccggaccgtttaccctgcaggatgtctatccttccggctatggcagcgatcttgaggtctcggtgaaagaagcggatggctcggtagaagtgtttagcgtgccttacgcttccgtcgcccagctgctgcgtccgggaatgacccgctacgcgctctccgccggtaaagtggacgacagcgcgctgcgcaacaagccgatgctctatcaggcgacctggcagcacgggatcaacaatctgttgaccggctacaccggggtcaccggttttgacgactatcaggccttcctggtggggaccgggatgaacaccggcatcggcgcgctctcttttgacgtcacccattcgcggttgaagagcgatgcccatgatgactcgggtcagagctatcgcgcgacctttaaccgcatgtttaccgatacccagaccagcatcgtgttggcggcgtatcgctactcgacgaaaggttattacaacctcaacgacgcgctgtacgccgtcgatcaggaaaaaaatagtcgcagcaactacaccctgtggcggcaaaaaaacggcatgaccttcacggtgaaccagaacctgccggacggctggggcgggttttatctcagcggccgtatctccgattactggaaccgctccgggaccgagaagcagtatcaggtcagctacaacaattcatttggtcgtctctcctggtcggcgagcgcgcagcgcgtctatacgccagacagctccggtcatcgtcgcgacgatcgtatttcactcaacttcagctacccgctgtggtttggcgataaccgcaccgccaacctgacgtcgaacacctcgttcaataactcgcgctttgccagctcgcagattggtatcaacggttcgctggacagtgaaaacaaccttaactacggcgtgtcgaccaccactgccaccggcggtcagcatgatgtggcgctcaacggtagctaccgtacgccatggaccaccctcaacggcagctacagccagggcgaaggctatcgtcagagcggcattggcgccagcgggacgatgatcgcccacagcggcggcgtggtgctctcaccggaaagcggctcgacgatggccctgattgaagccaaagacgcggccggggcgatgcttccgggatcgccgggcacccgtgtggacagcaatggttacgccatcctgccgtatctgcgcccgtaccggattaacgccgtggaaatcgacccgaaaggcagccatgacgacgtggccttcgatcgcaccgtggcgcaggttgtgccgtgggaaggcagcgtggttaaggtcgcgttcggcactaaggtgcagaacaacctcaccctgcaggcgcgccaggcgaaccacgagccgttgccgtttgcggcaagtattttctcccccgacggcaaggagatcggcgttgtcggccagggcagcatgatgtttatcagcgatgcgaacgccaaacgcgcgattgtgaagtggagcggcgggcagtgttcggtggatctgggacagcaaacaacaaaggatagcgtatgtcgctga

SEQ ID NO: 268721 - DNA, 357 bp, Klebsiella pneumoniae
gtggtggccaatcagaaaaatgaaggccagaacgtgctgcagctggcgatccgttcgcgctttaaatttatttatcgtcctgccggactgggcaaccgcgatgcggcggccgagaagctgaccctgaccgccagcggcagtagtctcgccatcaacaacccgacgccgttctacatcaccgtcagccgtatttcccgcgacggcggtaaagccctgaacagtaaaaccgtgatgctggcgccgcagtccagccagacggtggcgctctcctccgccgtcaaccgcggcgaaaccctgaccgttaacaacattaatgactatggcgccgatgtcgcagtgaaagtggccgttaaataa

SEQ ID NO: 268722 - DNA, 498 bp, Klebsiella pneumoniae
ttggcttgttttacccaattgcgcctgggttttctccagagcatcgcgggattctgcaagtttactgttgaggcgatcgtaagccaggggcgacagcatcccggatgttttagctgtatccagctggcgctgctgctcgttaaggcgacggaatgcttcacctacgggatctatttgggcctcaagacgacgcagtgcatttacctgctcatcatgtgcttttacagcctcgcgctcggcttgggcttcgccagtgacttcccgacgagtctcctgaagttttttgctgtatgcatcatattgggaagtattaattgcgcccgatttaaaggcagtattcagttcactttgttgttgttcaagattgcgaagagcagctgccagagggtcgattttatcgagcattctctggaatgcatcagcctgcgcctcctgctgcacagctgccagtttactggccttctctgcttctcgttgagcttgtgcaacaccacttag

SEQ ID NO: 268723 - DNA, 306 bp, Klebsiella pneumoniae
atgctgatcaatatcagcattcaaggcggtgaaattagcagaatccttgtattgggctacctttgtccttgcctcgtcataactaaaaccaacgtcgataagcttatttattgcttcgctcgcaccgtcattagtcgttataaacatactactgacttcatcaatcgcctgaccagtcttgtcagatatggcaaccatattaaccgccagccgttctgcagcatctccgttagcgccaagagacgttgtggctatttttgtcgcagcatcaatttcctgtcggttctgatagacggcataagttag

SEQ ID NO: 268724 - DNA, 327 bp, Klebsiella pneumoniae
atgggtgtagtcagggttgcgatcggttttattaccgccgccagcattcgtacctgcatcggttttcaaaatcgaagaaatgcagttaccggcagcccattccctggtgagaataccgcggtcgagcgcgttagtagcgaaccacagctttgcaaactggatacgcttgccgagctcatgccgtttcccttcggggaagacttttttattggcactggtgaatttccagagcgccggcatatcgtattttttgatttcagggatattctcggcggccagaatcagatcctggacggctgcgttatcagtgtccatttcaagaactga

SEQ ID NO: 268725 - DNA, 285 bp, Klebsiella pneumoniae
atgataaacgtgactctcttcggccatatactgcgccagcaactgagcgcgaaaggggagttctgccactttaaaaagcgcgctcgaatcgtcctggtattcatcgctaccgaaagtttccacggtctcatcttgtgccacgtcgccagtattattggcatcaaccagctcgccactaacgggctcagcggatactccggcatcatcgatgtgatgaggcgcctgacctggcttcagagcccaggtgcgaccatcatcaccgagctggtagcgttcgcaccatga

SEQ ID NO: 268726 - DNA, 156 bp, Klebsiella pneumoniae
atgcagaagaaatgcggttactgccgtaaagcaatcgagggtaaatcagtggtaagcaccctgttgtacctccaggggaaccagctcgcacggaaagaaaaagagtattgctcagaacgttgcgcctcttacgaccagatggcgcacgagggctaa

SEQ ID NO: 268727 - DNA, 327 bp, Klebsiella pneumoniae
atgggtgtagtcaggattgcgatcggttttattaccgccgccagcattcgttcctgcatcagttttcaaaaccgaagaaatgcagttaccggcagcccattccctggtgagaataccgcggtcgagcgcgttcgtggcaaaccacagctttgcaaactggatacgcttgccgagctcatgccgtttcccttcggggaagacttttttattggcactggtgaatttccagagcgccggcatatcgtattttttgatttcagggatattctcggcggccagaatcagatcctggacggccgcattatcagtgtccatctcaagaactga

SEQ ID NO: 268728 - DNA, 285 bp, Klebsiella pneumoniae; identical to SEQ ID NO: 268725

SEQ ID NO: 268729 - DNA, 909 bp, Klebsiella pneumoniae
atgcaaataagcagagctgatgttgccgatcttatttatttcatggcgattgcacgtcatcgcagcttcagccgtgcggcaattgaactaggcgtcagtgcatcagcgctgagtcatgccctgaaggggctggaaacccggctcggggttcgcctgcttaatcgcacgaccaagagcgtcacccctacggcagccggcgaggaactggttcagtctgttcttcagcctttcgacaccatagaaggcgcgcttgaatcgcttaaccggtatcgcaatacccctaccggacgtatccgcatcaatgcagccgttgaagcggcaaatcttttgcttgcgccggtcatgcccgcttttatggatcgctatcccgatattgaaatcgatattgtggccagcaaccgtatggttgacgtgactgatgcgggcttcgatgccggcatccgctacggtggcaccgtcccggaggacatggttgcccggcgtttatctgccgatattcgctgggttatcgcggcctcccctgattacctggaacgctacggaacgcctgaacatccggatgatttattacaccatcgctgcatcagcaatcgtctcggtgacgatcgggtttatcgctgggaacttgcgcgagacggcgaaacataccaaatgacagtgccaggctcagtgacggtcaatcatgccgaaacgggtctggtggccgtattgggcggggctggcctgatgtattttccggagcctcttgttgcaccctatgtcaaggatggacggctccgtctggtgcttacggaatggtccccactggaggaaggttttcatatctattattcaagccgccggcaattgccgaccgggcttcgccttctgattgagttcatacaggaggccaggccgctggggttgtga

SEQ ID NO: 268730 - DNA, 402 bp, Klebsiella pneumoniae
atgccctacagctgttttggcaatgctgccggcgttggccctgctcatctgcagcgcgccatcctgatagccacggttagcatgaccacgcacctttctggcgatttgttcatgcgaatcgcccagcaggaatccctgccgcaccgtgttactgatgcgcgtcatgcgatcggcttcaaggctatcagcccattcactgagcaggcgtccctgaaatggcttggccatcgccgccgcatacacagcatcaggggagattcccaccagcggatgaagcgccagaacatcgtcggggatagcgaactgaaacaggctcatctgatagcctgcctcatgctgcgccagttcctgcagctcgccggcgaggctttcgctcatcgactgaaccacatcacgatttaa

SEQ ID NO: 268731 - DNA, 132 bp, Klebsiella pneumoniae
atgtcgatgtacgcactgaactggatgtttctgctcagacgtttgatgcctcagctgcaacggctgttcagtcacttcggcagggtggtgatattcgacagattgatgcggttcgcgttcttcaggcgctga

SEQ ID NO: 268732 - DNA, 393 bp, Klebsiella pneumoniae
atgacctttacagaaatcagaaacgctgtcatttcccgaatggcggcacagaccgctattgcctctgatgcggtggattatcccaatggcccggtatttgaccccagtaaccgcgatatctgggcccgcctaaccaacattgctgggcaggctggcgcaaccgagatcggggacgggccggtagtccacaggacgggcttactcatcattcagctgtttgttccggtcggttccgggacgttgcttatctcccgaacggccgatcagctaacggagctattcgagtttaaggacgacggaaagctgagttatttcgccgtttctgctgtgccggcaggtgagaccgatggctggttacagctcaatcttcaaattccttatcgcgctctgtag

SEQ ID NO: 268733 - DNA, 399 bp, Klebsiella pneumoniae
gtgcagcgtctggtgcgcgatctgaaccatacctatcgccaccataaggcactgcacgaactggattttgacccctacggctttgaatggcttgttgtggatgaccacgaacggtcggtgtttatctttgtccgtcgcgataaagccgggaacgagataatcgtggcgagcaacttcacgccagtaccgcgtcacggctatcgcttcgggattaaccagccggggcgctggcgtgaagagctgaacaccgactcgatgcactaccacgggagcaacaccggcaacggcggctgcgtggcaagcgaggcgatcgccagccacggtcgggagcattcgctgtcggtgactctgccgccgctggcgacaatctggctggtacgggaatctgcagggcaataa

SEQ ID NO: 268734 - DNA, 354 bp, Klebsiella pneumoniae
atggcggcacagaccgctattgcctctgatgcggtggattatcccaatggcccggtatttgaccccagtaaccgcgatatctgggcccgcctcaccaacattgcaggacaggctggcgcaaccgagatcggggatgggccagtcgtccacaggacgggcttactcatcattcagctatttgttccggttggctccgggacgttgcttatctcccggacggctgatcagctaacggagctattcgagttcaaggacgacggaaagctgagttatttcgccgtttctgctgtgccggcgggtgaggccgatggctggttacagctcaatcttcaaattccttatcgcgctctgtag

SEQ ID NO: 268735 - DNA, 324 bp, Klebsiella pneumoniae
atggccaatacctggatgaatggacttaacctgaaactgccgtgcaataaggcaactcacgaaaccattattcctgacgatgtgaaacaggctggcgcctatgcagcgctgtcggcggcaaatggcgggctgtatcagcagaaaactgattcgggggtattgctgagtaagacggttgacgctgacgacgtttctgtttcaaagaccttcgcagaactcgctaccaacagctctgcattgcttgattctgacctgcagctggcgctggccatgcttaagccctatggcgttagtcagtcaaaggtgcggctggtgagggggtga

SEQ ID NO: 268736 - DNA, 399 bp, Klebsiella pneumoniae
gtgcagcgtctggtgcgcgatctgaaccatacctatcgtcatcataaggcgctgcacgaactggattttgacccgtacggctttgagtggctggttgtcgatgatcacgaacggtcggtatttatctttgtccgtcgcgataaagccgggaacgagataatcgttgccagcaacttcacgccggtgccgcgtcacggctatcgcttcggggttaatcagccggggcgctggcgtgaagagctgaacaccgactcgatgcactaccacgggagcaataccggcaacggcggcggcgtggcaagcgaggcgatcgccagccacggtcgggagcattcgctgtcggtgacgctgccgccgctggcgacaatctggctggtgcgggagtctgctggtcaataa

SEQ ID NO: 268737 - DNA, 393 bp, Klebsiella pneumoniae
atgacccttacagaaatcagaaacgctgtcatttcccgaatggcggcacagaccgctattgcctctgatgcggtggattatcccaatggtccggtatttgaccccagcaaccgcgatatctgggcccgcctcaccaacattgcaggacaggctggcgcaaccgagatcggggatgggccggtcgtccacaggacgggcttactcatcattcagctatttgttccggttggctccgggacgttgcttatctcccggacggctgatcagctaacggagctattcgagtttaaggacgacggaaaacttagttatttcgctgtttctgctgtgccggcgggtgaggccgatggctggttacagctcaatcttcaaattccttatcgcgctctgtag

SEQ ID NO: 268738 - DNA, 354 bp, Klebsiella pneumoniae
atggcggcacagaccgctattgcctctgatgcggtggattatcccaatggcccggtatttgaccccagtaaccgcgatatctgggcccgcctaaccaacattgctgggcaggctggcgcaaccgagatcggggacgggccggtagtccacaggacgggcttactcatcattcagctgtttgttccggtcggttccgggacgttgcttatctcccgaacggccgatcagctaacggagctattcgagtttaaggacgacggaaagctgagttatttcgccgtttctgctgtgccggcaggtgagaccgatggctggttacagctcaatcttcaaattccttatcgcgctctgtag

SEQ ID NO: 268739 - DNA, 879 bp, Klebsiella pneumoniae
atgaaatcacccaaacagagtatcattaacaaatatccagacgcatatattaatcaaaccgttgatgagattagagatttattaataaatggttttgatgattcccgaaaaacaatcttcttatgtgggaaagataagtccgataaaaaaagtcttcgatataaattttcaacttttctctctcaggagaaaggaatctctcttacctacccagaggatttatttgaagaccttcttgaaggccaaggtaaaaatagcctgctatcccttgaaacccaacttgcagactctgttgacctaatagttcttatacccgagagccccggttcttttgctgagttaggggcattttctatggataaagagttagcaaagaaaatgcttgtgatgaggctgggagaatacaagtcagggaaaagcttcataaatcatggaccgataagacttgtccgaactcatggtggagaaatatttgatatcccaaaaaactttgatgaaaaaaatccgaaacatgtaaaatcagtacttggtaaaattaaggaaacgcttccaagtggaagaaagaagaaagagctagataatatcttactatactcaaagcatgttctccttttaatctacctctttgatgatttgaatttactatcagtatataaaaccatggaattgatcatgaggagaaggtttgaaagtagagacaatattgcctgtaaagcagcaacacactctctcataagggcaggaatgattaaccagcaagaggggttatatactataactcaaataggttatgattcaataatcaatagtttccattcaaaatcattactagctgaattaagaactaaaataatgaataaacaatatgctagacactga

SEQ ID NO: 268740 - DNA, 930 bp, Klebsiella pneumoniae
atgactgctcatcaaggaaagtacacacagcaactgttatcacttccgattcttgagaatgtggatgatttatcacaatcccttcgactcccgaaagaagtcatttccaaatttagctttaataatgataaatactatcaccgtatagaaatgaaaaaaaaatccggtggggttcggcacatcgaaagccctctaaaggaattaaaagcaatccaacggtgggttctaagatatattttagataaattatcaccttcagtaaatgccaaaggctttgtaaggaaaaaatcgatccttgataatgctaaaccacatgagggaaatcagtatgtattgaatcttgatttacaagatttttttaccaatgtaaaagcatcacatatatatactctgtttaaaaacatagggtataacaataacatagcctttatactaacatcattttgcactaaagggggatatttacctcagggagcaccaacttcaccggctttatctaatcttgtttgcctaagacttgatcaccgtgtatctacatattgtaaaaagcgagctttgacatatacacgctatgctgatgatctttgcatatcaggaaataaaataataattttacagaaagcatcttatttaataaaagatataatcgtagacgaaggctttgcaattaattccagaaaggaaaaatttctaggtcccaaggtacgaagagaggttacagggttaacagtcacgcctaggatcactatcagcaaaaaggattattgtgtctacagaaaaagaatttatgatttagtcaggaatgaaattccgaataaaaataaaattatagaaggtatattatcttttgtcagaagtattgacaaggataaagcaaagaaactttccgcattctatcagaagcaaaacacaataattaccgatatttaa

SEQ ID NO: 268741 - DNA, 870 bp, Klebsiella pneumoniae; identical to SEQ ID NO: 193527

SEQ ID NO: 268742 - DNA, 324 bp, Klebsiella pneumoniae
atgattaaagaaaaaaatgaaacgatgatgtttgccgtagcagttgtattaatgaggtattgtaacagtatctattatatggcgaatgaacactatgatactgctgtattctttgtgaaagaaaaagaagctgttgattacatattagatgatttaattaaagatctgatgaataatttttattcttataaagataggtatggtaaaggacatgagaaacaagaagagattaatgagtcagaacttaaggggaaaatattattgattcatgaacaatctgttaaatatttagttatgaagaatattaaatatggtactgtataa

SEQ ID NO: 268743 - DNA, 663 bp, Klebsiella pneumoniae
gtggtcgagagcggcaactttgccagcgcggcggcgatcctccatgtgacgcgttcggcggtgggaaaaaccattgcccggctggaagcgcgtctcggcgtggcgttattccagcgtaccacccgacggcaactgctgacggaagagggggagcaattctatctccagtgccgggaagcgctggagcgcatccgcgaggccgaagagacgctgcagcgcggcaaagatgaggtgcaggggcggctgcgggtgtcgctgccggtgctgtttggccagcgctgcgtggcaccgctgctgttccgcctcagccagcgctatccgttactgaagctcgagctccactacagcgaccggcaggtcaatctgctggaggaggggtttgatcttgcggtgcgtatcgggagcctggccgataccgggtcgctgcgggcccgtgcgctgggagagcatggcatggtgctgtgcgcggcggcggagtacctgcgccagcagccagcgccgcagactattgccgggttgaacgagcaccgtaccctcggctatctgcacaacggccagctacaaaaatggcaactgtatgacccgcagcagggcgacgtgcgcttcagtccgcagacgtggctgatacaggatgattttgccgccatcgcggcggcagtgtag

SEQ ID NO: 268744 - DNA, 153 bp, Klebsiella pneumoniae; identical to SEQ ID NO: 196873

SEQ ID NO: 268745 - DNA, 204 bp, Klebsiella pneumoniae
atgcacttccttctttccttctcaatctttatctttggaatagctatatccgtaacttgtatacccatagttataataggaacttgctttccttacaactccattaagtatacagcctttgatcgttgcaccagcttgttcaaagcgcttgatacaaacctccatttcttttacggtattttgttcaaatcgagcaacaattag

SEQ ID NO: 268746 - DNA, 1041 bp, Klebsiella pneumoniae
atgaaatctgaagatactaattcgttacataaaatatacaatccagtttatgggctagagaatattgttttacttgcgcaagagtaccaatctacagaccaagtaaaagttaaccttttatgcctaggatttaaggaagatttacccaaagataaagaacttgcggaaaccttatttttagaattagttcattattgcattcctcatccggttatagcgaaaagaaaagccctaggtcaaagtgagggaaaagatgaagctcgactgtatagtgaacttgctagagaagcacgtgctcttttcatgaaatacaaattagaaagtgcattaaccaaaaaaaaggatgaactcccagaaaagtttgaacaaagagtaaagaatgctaatctgcgctatggtgaagtgggtgagctgatttcatactgtatagcaattcattttttaaaagcagcacaattagtctctaaaatggcccttaaaacctcttctgaaatgccagtcttcgggctagatggaattcatgcatccgtagaccgtgaaggaacattaacggtattttaccttgagtctaaaatgaccagagaattcagtagtggatctgaacaattttcaaaatcagtgagtggttttgaaagcgatagaaagagccgtagaaatgaatatagaatattgcaggacttgagtaatttagagtctttagagggagaagaacgaaagaaagcaatacaatactttgacccttactcaaatgaatcatcaaatgtcagagagcgtttcgttgggataatcgcctacaatgaagaaaactataaagataagatagcaatcgacgatgaagccccactttccatccatttggaccactttatgaaaagttatacaagcagttatggagataaaataaagactattacggatgacctcgaaaaagcgggagcaactccacagaaatgtagggcatacatcctagccttacctgatgttgatagttttaaattggattttgcaaaggagttatctggtgaacactttagctactga

SEQ ID NO: 268747 - DNA, 2559 bp, Klebsiella pneumoniae
gtgaacactttagctactgaagtcattgaccaaataaaaaatcgtttagagtttaaaaatgatcttggttatctgtttgcacactcctttttgcaaaagcataggcaaaattctttttctgccacgcaaagcaaaatagaaaatgaaagcatagtaatttataaaagattaattgaatctgcatacttgttttctcaatccgagtcagatgaagataaaaacctagctcaaagcattgcatatcatctaaatgtaataaccagtgacgatttcttgaagcaactgtctgaaaacttactaagggctctgggtaactttccaggagcaagctatttacaaaaagaaaatggatttataccagaaactttctacgcatatttaaaaagatcttttattgaaagtgaaaacacagtaaaaatatcgaacaaagaaatagtgctaacaaactttcaaaaaaaagtatgggaatcattgcattctaatatcccacaagccatatctgctccaacctcagctgggaaatcgttcttagttgtagaaatgcttgccaacagaataattagtggtgagataaattccgcaatttatattgcaccaactcgtgccttagtaaatgaaataacacaaaaattcgttatcaaaaccttaccacatcaaaatgaagttagagttacatctataccaacaattaatagcgaatatcaaaaacagatatttgttttaacacaggaaagacttcaagtattgcttgataacttcaaaaataaaatagatatagtagttattgacgaggcccaatcgatctctgatgaaatcagagggatgatattgcaggattgccttgataaaataagcatagaaaaccccagtgcaaaatatgtttttctcgcgcctggtgccgaaggcttcaatgattttgctgatattattgggattgatgcaatccacgtagaaaaaacaagtttatctcctgtggttcaaaataaaataattatcaaagtagatcccgctaaagagaataatctacaactatcattattggacaattcaaacaccttatctatcggtgaattaacctcaacaagaggttttgctaatgaaaatacaagattagcagctatagccttagaattaggtcaagatgagggttctcttgtttacggaacgggggccgctaatgcagaagacgtagccaagcaaatatcgtctggcctgcctgctctagagaatgatagtgatttacaagaactttcaaagtttataaaaaaacatgtccataaggattactctcttgcaaacctcgtattgagaggtgttgggtatcattatggtaaaatgccaagtttattaagagaaacattagaaaaaaactttacgaataacaaacttaaatttttagtttgtactacaacgctttttcaaggagttaacctcccagcaaaaaatgtttttattgatactcccacccgcggaaacagaggcgaagccctagatccagcatcgctttggaatttcgctggccgggcaggtagattaggtttcgcattttctgggaatgtttatcttattgattatgatgattgggaaacaaagcctttagattcaaaaatagatttcaagatcacttcatcttttaaaaaagtaattactgatgattttgagactgtaatatcacgtttagataaaaacaatcatcttggagtaagtcaatatagtaatgttgatgctgctgccggtcttttgctttccagagcggcaaaaggtgacttgcatagttttcttgaaagatcatttagaactatacctgacaaagcgaagcttgaaaccattgaaaatgccacctatgattctttagagtcacttaatatacctcatggtatattaactctaaactggacagttgatccatttgggcaggagcggttgtacaatagatttatccagaaaataaaggatggaaagattgacgagcttataccaagacatccttctggtaatgtctacactaactatgttggtgtttttagccgaataaacaaatatattcttaatcataacacatctaaattctcaaattacctcacagcaatggctttgaattggatgagaggaaaatccctcccagagataatatctctttccatctcaaagaaaaaagaaaaaaactcttcaaggcctgtgaatgtggaccgagctgtgcgagaggtttttgattttgttgaggataacttgcgattcaaatacgttcaactcggcaaggcatatatagatttattgcgtcaagctttagttgaaaataatctagctgataaggcagaggaaatatatgatttcccattgtcacttgaattgggtgtttcatctatcgcagggcaagtgttcattgaactaggactatcgcgaatctccgcatcttaccttgagaatctcattcccaactctaacccttcgatcagtgttgcaaaggaatggttaagaaacaatgattatgattcattacagttaccacttaccattttcacagaattagaagataaagggttactaataaataattaa

SEQ ID NO: 268748 - DNA, 135 bp, Klebsiella pneumoniae; identical to SEQ ID NO: 203717

SEQ ID NO: 268749 - DNA, 474 bp, Klebsiella pneumoniae
gtggaagcaatcagtatcgtgtttttagtggtacttttcatcgttatcatgaccgcagtagatatacagaagaaaaagcactacaacagcttcatggaaattctggacggcgacatcttatcttatgagtgtcagagaaccgggatcgttatagacaccaaacagcgtacagttcggtttttcgataaagaaaaagacaaaacatattcttatgacaatattagagagatcaattacacgctctcagaggctggaaaattttacgggaatggaacattacgaggcatgaataatgcagccattgctaacggaagagaacagattttagctaatcaacgctcaggtattaatatcttaaccgatgatattaaaaatcccatatggaaaattaatgttcccgttaaaaataaaataacgtcaaatcaagaactttgcgaacgctggctgttagtttttcaacgatatgtattgtaa

SEQ ID NO: 268750 - DNA, 378 bp, Klebsiella pneumoniae
atgaaaaaaatgcttattgctgtattagttattcttccacttaccagttgcaccgttcagggaaataaatctctcacagatgaaaatcatcagacggtaaagctaaaaatcatcaaggggaaaaccactcaacaagagatacttaccgcattcggagaaccacagacacgcgccacgaatgacggacaagagatgtggagttactccagtatgacgggagaaagccagctatctaactacgttcccggtctcgccctactaaccaatagcagtacagcacacattagatcgctggatatctggtttaagggtgatgttgtagaacgttataattttagtcagacagccagtaaagttacacgaggtatgcttgattag

SEQ ID NO: 268751 - DNA, 279 bp, Klebsiella pneumoniae
atgagatggaaatacaaagcaaaagacaccaatatgtatatggatatgttggtgcttgatgaatgtcgttatctgtacgattggatgccttcacttgatatgttttatagtgggatgatggatatcgagaggcaatttagttttaggtttattctcgacgctgtagctaagcatcgaatgatttataataatgaattcttttatgggactgcatctgttagtagattcgaaactgattatgttgaaaaagtattgagtgttagaaagaatataatctaa

SEQ ID NO: 268752 - DNA, 423 bp, Klebsiella pneumoniae
atgatagtcgaggagtatgttgatttaatatatgactcaaccagctttgttttacgtgtgttaggtcacaatggatttcatgagcctcataatattccaacctttggctatgaggtatatgaagctattggtatattaaatttaggcatagaagatttaaaagagcagacaatatataaatatcataagatggattttgcatatcacgactggcgcttgaagtatggtgaacaagagctgataagcgcatgtgccggttttaatcgacgtgtagcagggctgtttaaaaactatgggtttgataaaacctgtattcctgtattgatggcaattattattaatgaaacagatcacatttatggattttcagattatggttttatcgagtccttaataacagctattgagaaagagatggggtaa

SEQ ID NO: 268753 - DNA, 480 bp, Klebsiella pneumoniae
atgaaaaaagtcaaattagataacagtgatttaatccagtatttagagacagtcaaagaactaaaaaatcatattccgatagaagaatacagaaatgaatatcgtaagctacgttccggtgatgttcctttgattaaagcccagaaatttaagtctgcccacaccgaacttcgcagactccaaaaaaagaaagaatctcttattgaatactttattgacgagttaaaccccatcagcagttcaatagctaacacgtcagcgagatcatcaggtaatcttgataagattaatgaaagaatgctctacaggaaagcaattgaagaaaaaagcgatgaagaaataattgccttggtcataaaaaagcgtacagaagccgctgttgagttccagcgttccatagaacaaagtcttgagcaactctctcacatctcgtcagagttcgaaccaccaagccaaaagcgcaggaaaatgtctctttaa

SEQ ID NO: 268754 - DNA, 252 bp, Klebsiella pneumoniae
atgaaaagcccaccaagaaatgaaaagtcgatactacgcagcctgcgcatcccgcatgatatcgataaggcaatccatcacgcgtcagttgccggcgcctgcagctattccgcctgcctgattgagttgattcgcatggggctgaggaacgcccacgccgcagcaccttacggggtatctgagcgggagcgtatggctgaagagatgataacgaggattaaaggagctgctcagggtcagcgccggccttaa

SEQ ID NO: 268755 - DNA, 1353 bp, Klebsiella pneumoniae
atgagaatgaccgcagcagtaaattccttttctgatggctttagcgaaagcgatgacatttttaatcgcaaaaaactacatgacacaattatcagggtggcgacaaatgcacctgatgcgagcctagttttagcacttaatgataagtgggggaatggaaagacatcatttgtcaaaatgatgtcttcagaaatcaaaaaaaaccactcggaacagtttgacgttatttattttgatgctttcgaaagcgattaccaatcagacccatttattgctctaacatcaagaatttactcattaataaaaaatgaagattcaaagcttaaaagcttaggacaagaattgttattaataggtaaaaaactaggtgcttcatttgccctgaacggtgctaaatttgccgtaagctcactaacaagtgggttagtctcaggcacttcgctggataaatttggtaacaacatctcagaggcccttacgtctccaattgaagattatatagaggagaaaataaaaaccagtgaaaatgagttagccacaatccaacaattcagtgacgtattaaccaaaatacataaggaaacttccaaaaaaataatcttcgtagttgatgaacttgatcgcgcccgtcccgacttcgccttagatctgttagaaaaaataaaacatatattctccgttgaggggtttgtatttttgcttgtaattaatcgcgagcagtttgagcggagtattgaatgtcgctacgggaatataaatgcacgactctaccttaataagttcatacattactggtttactctacccaaaaaaaacctcttcactgaaacatgtctgaatggatatgaacaatcaaccatagctcgacatcttttgtctctagatcgtgggaataatttattatctagaaacggaaaacttgtcaacaccctatcataccttttggaaagcaatgactgctcactgcgtgaagcagagaggtgctattctgttttctctgtcatgtcccgccccgatgaaatacttggatataatatagagatatttctcgttgcttttggcatggtttctttcttgaaggtatgtaatgagtctcttcttaatgatattgcatacaaaagaataaaccttgaagaatccttaatcaggctatccattaataacgcacctgaaataactgaaacattatatattgcaatgctactaagataccacttcgccacagataaggaactctccgaaccagaaatggcaagggaatatgcctttatgactggaatgcctggaaggcgtatcaggtggcttgaaacaatgtatgagaaaattgaaggatttacagtttcaaattcataa

SEQ ID NO: 268756 - DNA, 252 bp, Klebsiella pneumoniae
atgaaaactaataatcgtattcataacgtcaacccatctcacctcagtatcgagagttatcataaactgaatcgcgcgagtaatgtcgcattccagatgcatttacatattcgtcggtgtgaggttaatgcagcgccacttttatggattccggatatttttagttatatcagtcaggatgtctccgatgttttacaggaagtgaagtctatgggtatttgtaatgactttctggataagaaatcggggtga

SEQ ID NO: 268757 - DNA, 378 bp, Klebsiella pneumoniae
atgtttaaactcattatcacactcatcaattatcaaaacggtgatcagcgagagctggtgcataactggcgctataaaaccagtgatgaagcctggattgatgcaaataaaatggcctatgttcgtaaaggcgatgacggcaagaccacgcacgaatgcagggttaaagttgtggggggagtcatgtatgagattcatgtaaaagccagaaatgtaatcaccggtgaaatcaatttttaccgtcattcaaaaaaatataattcaccgggtaaagcgttcaaaacagccagaaggcttgttgatgacattacctttaatgggcgttatttagacgataacgaatatacggtgacggttgggaaggtgaaacatggctga

SEQ ID NO: 268758 - DNA, 588 bp, Klebsiella pneumoniae
atgccacatgacaaaataaattcaaaatactgtttgacaacctcgcccgatggatcgcagaatccagacgttgccgcaaaatcggcaaccgggcgtggaaacccgtgtatgttatcggcgacgacagacgcgccatgcgtctttttttacgtcgtaatcaacgccacagagcgccatattatggcgtggtgcgttcactccggccattcaattgccgggcatgaacaggtagcgcaccactccgccatgtcaatggtagctcaggcggggcagccttcgggctggccggtttccgataacgccggtatttccacccccgtctgggctatcgccactgagcgtggaaactccggcgatagcgtacttagcgctgttatcggaggttgccttatggctactacccctatctctttgcaccctcaatttatctggatctttcttgctgtccgccgttctgacgtgttggcgaagccgcagcgtaaggaagtcaccgcccctgatctcacaagcgcacgccgcgttatagcgcgtgattttatcgcctctttcgccggtcgtctgccggttcgcgaggtggttcatgtttaa

SEQ ID NO: 268759 - DNA, 192 bp, Klebsiella pneumoniae
atggaaattcgagaccgcatgacccgcaaagaagctgcgagctatatcggtgtttcaaccgccacaatggctaactgggcttgtacagggaaagtcaaactgccttattacaaggctggcctcaaaaaggttatctatctcaaaagtgaccttgatgactacttaaagtcaacccgtcgattgcaggcgtga

SEQ ID NO: 268760 - DNA, 942 bp, Klebsiella pneumoniae
atgaaaagaaaaactatcaatcagaatgagcctcaagtgaccaatatcagggtgcctgctgaattttttgatatacagagccttgctgtggacagttggatctcattcagaaagaataatttaattgaaggggcattgatgtcggtagatgaacttgattctattgccacgcaatttttattttctatacataaatatggatttaatggtattggaacattagacaccgttagagatttattagagcaatattatgttgatggcaaagatataatttctttttttgaatttattatccgcattgccaaagatgagctagataaaaaaattaacattaaatttaatgaaatgagtgcacaccttaaattaaaattaaatggtgaacgtttaatttcaccgaacgttgtgatttcatctattcgcgactttttaaatgataacggtttagtttttattgaagagagagagataaaaattctttctggtggtgtttgtctgaaggatgattatttttcttatgaaacagaagttttttctctgatctcggattatgttgttggtagagttatagtgtcaccatacacaaatattctgattgagttttttcgcgacaatagtgatattcgacataaaaatgggcaaggagaaagtaaagtaagattatcacccaaaaaaggcccaagaaaccccgagttgcattcatatattattaagatcgttgacgcaacgttgcttaaaaatccaaatgcaacgacttacgcattgactgagaagctcggagcacatttagaggaatatcgccataaccatcccgaaaggaaaaattggcggatatcagaaaaccagttaaggagatggatcaaagaacatcgggagttaacgggtcaggactcgcaaggaaagcatgatggcaacttgaagcttgaaggtgtaacttattga

SEQ ID NO: 268761 - DNA, 1422 bp, Klebsiella pneumoniae
atggagtccttcaagttcacaaaatccaagataaacgagttgccacacgcaccaaaaggcaagcaggacgaatattacgatagtcacgttagagggttgcgcctcagggtcggggctactggcttgaagacgttctatgccgtcagaaaacttaaagggaagttcatcagaactgcgttgggccggttcccggagatatctgttgagcaagcccggacgatggctcttgaaacgctcggaggtattgggacgacaggaaagaacccgaacgaaacaaagagggaagctgaaagggccagtgttactcttcgcgaagcaatggaactatatattgaaacccgcggagatagactaaaagaaacaacggccaatcagtaccggcgtttgctcaccaatttttcaggtgactggttagatagaccaattgccaaaatctcaagagatgatactcagagccggcataaagctattacggaaggtatggtttggttcggagctgaattatctaagctacgcaaaggcgtcggatctgggagtaaagcccaagctgatttgtggggccggtcgctgagggctgtatataatttttcctacgataattatcgtgatgatgagggtattaaattattacctgatccccctaccattgcattaagcacaaagcggcaatggcacggcttaaccagaaagaatacacgcatccgcaatcatgaattaggccgatggctgacagctgttaaggacgtcagagaggaagctgaacttaaccgggatgatcatatcgctgcaatttgcgatgctcttgatatggcgttatttacaggtctacggcgtggtgaggtgttcggcttggaatgggatagggtaaatattgatggaggatatttttggatagacaaaacaaagaacggcgaaccgcttgaacttcccctaactaatactcttttaactattcttaccagaagaagaaaatacagagttgataataataactatgtttttcctgcggcgaaagggggcaggataactgaccctcgcagagcaattgataagattgttgaaaaaacaaatagcgggaataatataaatgagaaccccatagaatttacatgccatgatgcaagacgcacttttgcaaccttagccgaattaagcggggtcggaacctatatactcaagcggttaatgaatcacaagtcagcacgtaactataaaagttcagatcaaacacaaggctatcttatctttcctgttgaggaacttctcgaaccagcaaaaattattgaaacaaaaatattaaaagaggctggacttataaaaatacatgaggattctagagcgggttttctcgatagtcttagtccggaggaaactgagttagttttaagattcattgatgatatgaaaagaggtggaaaatga

SEQ ID NO: 268762 - DNA, 822 bp, Klebsiella pneumoniae
atggaaacggatgaggattgttttgagcttgaatatttcaattcgttagtaggtgaaaacctagtagacatgattttgacgaaggcccccacgaaagtaaaatggcgagtgattaaagctgcggaccatgtgcgaaaagctcacagaattaaagatatagacatggagatgttttccattcggttgatcgcagctgaagaagaattggttgtagcagtttttgaatggctgaaattaaacactgataagatgccagaacacaaagacttagtgggaaagttcaagaaccaccaagttaaactaatgtttacccctgttttaatgttgatgaagagtgtacttattgaaagcctcggacctaatttaaatattcatggggttagagtggaattgaagcctcgttttgagaatgaaaaagtggacttgtgtttttcaataccttcttcagggttcatgatgccgcttaatccattatcaatctttataaacttggaagagcaagagcaagatataatagaaagtttgtatgagcagttacagaatgaagtacgtaatgagtttggaatacctcttaaagagtttgttatgaaaagagccgattttaggaacttgcttctgtactcaaatgatggtggttttgtaaattgcgtgattgattatgatgagttaatggacggttttaatcagacgtttgaagctcttttgtggtcgctggcggctttactgactaatgatccgctatctcctaacttgggcctggttacccagttcatcgatgtatacagacttgttttgattaagacaaaggttctcaaggggtga

SEQ ID NO: 268763 - DNA, 429 bp, Klebsiella pneumoniae
atggcaaaaccagtcctgttcgacttctcgaacgctaccgcatctgagattgtttctgcaatcgacaacaagatcacctctttagtaaatctgagaagtttcagaactcgcgttggcggctccagagttgccgatcggcgctatccagctactcgcgaagcaatgaacatcatcaaacgcctgcgtcagcaagcgaaagatgcaaaaatcatccgtgatattttgcaaccatactcagcagagttggcaaaaggtcgtgatgttatggaaatcatcaagcctgttattagtgcctggaaagagttctacttctccaaaggcagcgggctgagtgatgagcaagtattgattctcaagatgattgaatgtggtggcgaacttgagagcatgaccggacgaactaccccggatatgacaaccccagcttaa

SEQ ID NO: 268764 - DNA, 387 bp, Klebsiella pneumoniae; identical to SEQ ID NO: 169908

SEQ ID NO: 268765 - DNA, 588 bp, Klebsiella pneumoniae
atggcaattgttggttacgctcgtgtttccaccacagggcagagccttgatacacagttagaagctttatccgggtgcgaaaaaatctttcgggaaaaaatcagcggggctaaagatgaccgccctgaacttctggcaatgctggagtgggttcgggaaggcgacatagtgcaggtaacaaaactggatcgtcttgcccgcaatacacgccacttactcgagatatcggagtacctgcaaggaaaaggcgtagcgttgaacattctcaacatcggcataaatacggccacaccgaccgggaagttaatgctgaccatgatcggggctatcgccacgttcgagcgtgaaatgatgctggagcgtcaggctgaggggatcgctctggctaagcttaagggcaagtataagggccgtaaagcgacggctagaagcaaaacactggaagtcatagaactagtagaaaagggactgagcaagccggaaatatcccgtcaactggggatcggcatcaccagcatatatcgaatcatcagagtcaacaggccagaccttctgggcacagcaggtaataatcaaaatgttaactga

SEQ ID NO: 268766 - DNA, 963 bp, Klebsiella pneumoniae; identical to SEQ ID NO: 169909

SEQ ID NO: 268767 - DNA, 1695 bp, Klebsiella pneumoniae; identical to SEQ ID NO: 169910

SEQ ID NO: 268768 - DNA, 492 bp, Klebsiella pneumoniae
atgcagattcactgcactaagcccgaagataaaccctatacgcttggggatgggcaaagcttgtcattgcttatagaacctaatagaagcaaaagctggcggttcctctatcgctatgtcggtaagcccaaaatgatctcgcctggtgtgtatccgacaatcaaccttgccgatgctcgctctcgtcgcgatgatgcccgaaaactggtctcggaaggaaagaacccgagtgaagtacgaaaagagcagaaggtcgctttgcaaacggaatccgaaagtgcgtttgaaaagatagctacagagtggcatcagatgaagtccgccaaatggtcggcaggatatgcgtcagatatcatggaagcgtttcagaacgacattttcccgtatgtggggacaagacccatcggtgaaataaaaccgctagaactgcttaatgtgctgcgtaaaattaaaaaacgaggggcgtcagagaagatgtgcaaagtgcgatag

SEQ ID NO: 268769 - DNA, 135 bp, Klebsiella pneumoniae
atgtgcgctgaagccacagataacataagggactccccggcggtgctttccctcaccctggccctctcccggagggagagggaaccgtccggctggcgtttaggcccgtacaagcgcagcgccgccgggcaataa

SEQ ID NO: 268770 - DNA, 546 bp, Klebsiella pneumoniae
atgaaaaaaaaatttgatgcgtcaatcttgccattgatggcagcagctctgctgctgccatcggtcagcaacgcagcagatatctcccgctacgataaagcagcacggccccccattgtgctgacagacatgggtagcctgatgtttgcgggaaaaaccgatacggatgaggaaggtaatacttttcattacgatcatggttatgctcagtattttattcctcagagcagtcacagcctgcctgtagtgatgtggcatggtggaggtcaatcaggcaaatcatgggaaacaacgcctgatggacgtgacggtttctggcaaatgttcacccgtgcacactggccggtttttataattgaccagccgcgccgtgggagggcaggaagaacagagccggcctccgcagtatcagatattcccaccgaccataagaatccatcgcatggaatacgttcagactgggtaaatggctcccgccacaaaaaccggtttttttcagcgactctcaatttcctcaaaacgagcgtgccattgagcaatttttaa

SEQ ID NO: 268771 - DNA, 468 bp, Klebsiella pneumoniae
atggaaaatcataactttgaaagactcaaagaacatatcttatcgttatctgtttcagaaaacttcgaagttgctaaaacagagtggaagctacattcgatagaagttactgaggaactggattcctgtccatgtggccaggatatcaaagagcattgttatattgaaaataagaaaaatggcaataggacttatgttggtaataaatgtataaatagatttcttaatatttcaaccggaaccttatttgatgggttgagaagaattaaggaaaatatttatgcaaatccaaacttggcattgattgagtatgcgaatgacaaagggtatttatacgataaagagtatgattttcttattgatacgatgaagaaaagaaatcttagcgataagcaaaagtcgtggaaggagaaaattaataatcgcatccttaaagaaattgttgttaagagtcgtacagcaaggtaa

SEQ ID NO: 268772 - DNA, 1362 bp, Klebsiella pneumoniae
atgaatgatttaaaatttcaggaaaacagagtgtttttaaaagcaaaacagtctgactattcattttgtatcaatgatggaaagtggagattaaacagaaatagccttgttaatgttgaggcagtatcacttctccttgaatcaaaattaattgatggatatctgaatacgcttgctttttatgcctgccgatatagccccagctatgtatcgaaaataaataatgccatgaatgattttattaataaggtatcccctgaatatattgatgaatcggttatcttaaactacagagcttcactgcctaaatggaaaatgcagaatttagtgagtttgagatgttttttcatcagatggcattctctgggctactatggcattgatgaaaaagtaataacacttctgaaagcaacaaggttaaaagttaaagaagcagggaatatcataagacaggacaacccggataaaggggcattgactgataatgagcatgagactctgaatcaggctatatacagtgcttacagaaataaaaaaatagcactgcatgagttttctgcgtcattgttagcgagtttttcagggcgaagaccattgcaaatcatgtcattaaaattgaaagatatagtaaaagaaaggacacgcaatggcgaagtgaggtttcttataaatattcccagagttaagcaaggtcttgggttcaggcagtctttcaggtcattgaatattaataaatctatgtttgatatcctcaaccaacaagccagcgcctctgttgcacttattgaatctcaaattggcagggcacttaagccagcagaaaaagatgaggttcccgttttccttgacagaacccattgtaagatgctggtcggaagagagaaaatcttagacttactagtttctgacagacttcatgcatcaaaacatactgttgatattatcctgaaaaaaataattaaaaaagaaaatgtaatttcggaaaaaacggcacagcccatgaaaatgagtgcgcgcaggcttcgttataccattgggacaagactggcccgtgaaggatgtagcgtacaggttattgccgaactgttagatcactcttcaatcgccagtgcaggaatttatattgaaaaccttcccgataatgccgaaaaaattagtcatgcagtttctaagaaactggcctttcttgctaatgtttttcttgggaaagtgcagggggatagagccaatggcaatcatggtttattgacgaaaaaaacatgttcatcctgcgtcgatacttcaacaataccatgtcatagctgtatttatttcagaccattacacaataatgctgataacaaagaggtgatatatgaataa

SEQ ID NO: 268773 - DNA, 1212 bp, Klebsiella pneumoniae
atgagaaaatacagcgttaattcttttgtttttgaaagtggagaaaggttttgccatgtgatagataaaatatcaggagaacctttatattatccaaacctctatataactacacaagtcaggaacagatcaaagtcgatcaacacgatggaggctattggtggaaatctggcattactatatcgatttttttctctcaggggaatagatataagagagagaatagctacgttgcaatttctggatcttaatgaaattgatgatttggctgatttcgcttcgaaaaacttcaaagacaaaagaacaacatttttgcatgagcgtagtgttgttaaagaaccgacaaaatatttcaggttgaccgttattattaattatcttgaatggctgtgtgaagttcacacaatcggaactaagagtaaagataatcaaaaaataatggacagttttattgataagctaaaaattaaaagaccatcaaatgaaaatggatataaaaatcaaatccatgagaaaacattaagcagagaacagcttgatattttatttgagatagtcagacctggctctgaacttaatccttttgctgatgaagttcagtcaagaaaccgattgattatattactgcttttttcttttgggatcagggcaggagagttgttaaatcttcgcatcagggatatcgatttttcttcaggaatgattgtaataaaaagacgacccaatgataagtttgatccaagagttaatcaaccacttgtgaagacttgtgagagaatgttttctgtgggcaatacattaatggctgagttatttaattatattatgcaggataggcgtcatgtgaataattcaaaaggtaacgattttctctttattacatataaaaaaggatattcacagggaaaaccattgtctttttctgcatatcataaaattattaatatgataagcgagacttcacctgaactggccgaactaacaggacataaattaagacatacatggaattatgagttttcctcactggtagatgggatggatgagactttttcggaggaaaaggaagaacaaatcagatcgtatcttatgggatggaaaacgggttctggaacggcgcaaatttataacagaaggcatttggttgaagaggctcacaaaacttctcttgccatgcagaaccaactgatggagggatacattaatgaatga

SEQ ID NO: 268774 - DNA, 234 bp, Klebsiella pneumoniae
atgctgaatgatttcaccgggtctggcgtttcgcagctgcagctgttcgacgaacgcccgccacggcctcacagtgctgagctgatgatggttctggacgggatcaacaactcagggctgggtaaagtatggtttgccggtagaggaataggcccggaatggcagatgaaacgtgagatgctttcatcggcatataccacccgctggaaggaactgccggttgcccgtttctga

SEQ ID NO: 268775 - DNA, 351 bp, Klebsiella pneumoniae
atgtcggcgcgcgtgatgaactgcctggaggtactggcccccagggtggaacagtattccattgatgagatgttcctcgacctgaccggcctggagcactgtatggggcttgaggacttcggccggcagctgcgtcagcacgtgtatgactgtacccgcctgaccattggcgtgggcgccggaccaaccaaaaccctcgcaaaatcagcccagtgggcctcaaaagagtggaaacagtttcgtggcgtactcgctctgaccaggggaaatccgcagagaacgcggaaactgctttcactgcaaccggttgaagaaatctgggggggggtaaccgtattgcacgcaagctga

SEQ ID NO: 268776 - DNA, 1164 bp, Klebsiella pneumoniae
atggatggaagcgccgctgaagatctgatagttgaatttaataccacaaaagcgcttcgtcgtgatgtggtcaaacccgtatggcacaattcgcttcgtttgccgaagaacgaagcgttaacaaattcagaatgggcaatcatagctgatgactacatgaagcgtatgggcttctctgaaacgcatctcagatgctacgtcctacatgacgacgaagatggccagcacatccatatcatcgccagcagagtgtctcttaatgccggaaagctctacctcggcaggaatgagaacctggcaagcacgagaataattcagcaacttgaaagagattacaatctgacaagaaccaaaggaccgaaagcatctccagcagcgccctcacctaaaccgaagctcaaaaaatcccgtaatgagctgatgatagaaaagagaactggtgagctatgccctaaaaccattatccaaaacgctctggaagtactccttgccaataaactgtcaaccactgagtttgtgcatcaacttgtcgcacaaaacatcagagtaatcccgaacatcgcttctaccggacgcatgaacggcttctcattcgaatacgacgggattgctttcaaagcatctcagcttggcaaaggctattcctggacggctttacaggacaaactcgattatcagccggaacgcgataatgctttcctgtttaaactgaaatcctctgtcagagaaacatctgttagtgcaactcatgatatggccataactacagatgctcctgaaatcatgacagaatacgttaaccgccccatagaagcacttatccatgataaccataaccgtgctgatcaggacgaatacactaacgcttctgtaaagcagcttcacttagaagcaggtgctggtgctcaagaagcgtttgcaaccgaagcggtaaaagaagccgccaagcgaagctatatggtttcaacattcagatggttagagaccatcccctatatcaataccattattaccatcttcaaaaacctcaaaatcccaacccttaaacgtccaagaaaacacaaaactatcactggtgtgaagatgatagagataacacatctctcccaaaaaaatcctaccgaatcagtatctctacctagaagagcgtcgctttcgatgtaa

SEQ ID NO: 268777 - DNA, 327 bp, Klebsiella pneumoniae
atggctgagttacgcgcaggaggcatggcgttaatcattgatagcgccacccctgaagaggttgggcgttgcgtttatacagtgagcctgatccctccgggaggaaggtttacttcccctcatggcaggccgacgaataatcactctgaaagcgtggcatggtttattaccggagatgttaaagccagccttggtgatggggcgccaatatgggctggaaagggctggtcgctttatccgccgcagtacctgatgcccatcgacggcgacgacttcggcagtgaagaccagcaccagaaggaacgggaggtgaattgtgagtcatga

SEQ ID NO: 268778 - DNA, 273 bp, Klebsiella pneumoniae
atggactttaatgcgcttcaccagcaaaaccaacctttgttgcttgccaatgtctgggatgccagcagcgctcaggctgctcagcaggctggttatcaggcgctggggtcctccagcgctgctatcgccgcaatgttagggtatgaagatggcgaagagatgagttttgacgagctgttttatgtcgtctcacgcatcaaaaccgttagcgaactgccgttaagcagtcgatttagaggcgggctacggcgcgacaaccagccacatcattga

SEQ ID NO: 268779 - DNA, 228 bp, Klebsiella pneumoniae
atgaagaaaactatgagtgtattggctgtgttgatgctggctggcgcctctatgggtgcatccgccgcacctgctaatacgtctgaaatgagttctggcaccactacggcgattggcctgggggttgcgggggccattgccgctgggattgcggtggctatggctaacaatggtaacaatactggtagcaacaccagtactactaccactacatcaacaacccgctaa

SEQ ID NO: 268780 - DNA, 648 bp, Klebsiella pneumoniae
gtgcgctatctaacgttgctgctttgtctactgtgtttacaggcttgtaccccgtcccaacggagcgttggggacacgtttaaacaggcgctgctcggtcaggatgatgtcactattcccgatgctcagattgcccgtctgccggccccatacggcagtatttatctccgtcttcctcaggtgccgcgcctgtatgtggcaggctatcatcaggatggtctggactactgggtaaccagcgatcaggtcgtttttgtgacccaaaatgggcggctggtgaagtctgtcggctatcgggataacctgctatcggtctccaacttgcagcaggatccgctagtgcgggcgaaaaacctgcactatggcgcaagctggacccgcacggtccgctggacggaaaacggcaaccctctttcttctgtcctgacatcccgttttagccttcagggtaatgaagtgctcaatctggccgggaagtcggtaccttgccagatttggcaagaagatgtttcacttcaggcgactggtagcaactggcaaaatacattctgggttgatgctgccacggggcaggtacgtcagagcaaacagcatctcggtgctgtactacctgttgaaatcagccttctgaaagcgacgatgccataa

SEQ ID NO: 268781 - DNA, 708 bp, Klebsiella pneumoniae
atgctggcgtttacctcggccgcagccatcgcggaagggcaagttgtcatttattctcctggcggagggcatagccagaccgtgaatcaggtgaaggatttgcgccagctggttgccgaccctgcgttcggtcaataccagccggggatggtgattgcgactccggctgcgacgcgcctggcaaaccaagaattgcagcagacgcttacccggctaggcagctgggcaaaccgtgaagagggtgagcgtgcggcggcaattaaccaggttatcactcagctccgggatataaaggtcacaggccggcaatttacctctctagatccagcattagtgaataataatgacaaagcaaatcgtaccctgagcggtgagtacagtctgtatcaggctagtgaagcgagttccgttactctgctggggccgatcagcggcgccggaaagctggtgtggcaggcggggcgtcaggtcagcgattacctgaacggccatgattatttgtccggagcggagcccagccaggttacggttatcgatcccgacggtagggtccgtatcgcgccagtggattactggaaccgacgccatgtcgagccgcagccggggagcattatcttggtggagttttccgcgggagccctgcctgcgggcgatgaagacctgaatcagaaaattatctcagttctgacgcatcggatgcccaattaa

SEQ ID NO: 268782 - DNA, 2091 bp, Klebsiella pneumoniae
atgaaaagagacttcctgcttagcttacttaccgtttccgtcgcgtttgcctgccaggcccaggaaacggaaacttatccgctacctctgggcccctcccagtcggattttggcggtgcgggtttaatgcagactcccagctcgcggatccctcaggaaggggaaattagcgccaactaccggaataatgatcaatatcgtttttactccatatcgctagcgatgttcccgtggctggagacgacgctgcgctataccgatgtacgggaccgtctgtatagcaacgaccctagcttcagcggcagccagagctataaggataagtcctttgatattaagctgcgcctttgggaagaggggcactacctgccgcagatggctttcggcatgcgcgatatcggtggtaccgggttatttgatagtgagtatctggtcgcgaacaaagcggtcgggccgtttgacttttctttaggggtcggctggggatatatcggcaacagcggcaatatcactaacccgttctgttcatacagcgacaagtactgcgcacgttcgaccagccattcagccggtgacttcagcttcagcgattcctttaaagggcctgcaggcgtctttggcggggtttcgtggcagaccccatggcaaccgctgcggctgaaattagaatatgatggcaataattatcgggatgattttgccggccggcttgcccagagcagtaaatggaactggggagcggtctacaggctgacagactggatggatattaacaccagctatgagcgggggaatacgtttatgttcggctttaccctgcggatgaatgctaatgatttacgtccatcgcaacgggatccgatgcccgcataccgacctgaagcgcagcccccgcatgtcgtacaatacagcgtttccgctaatcagttgaatgatcttaaagataccgccgggttgagcgggcctcgtctggagatcgtcggcgataaactgaaagccagcggggaacaggataaatacctgaacacacaaaaaggagtggatcgcgcaaatctgatcatggcgaacgatctgcctgctaacgtgagaaccctcgaagtgacgcagtcccgttttggtatgccgctggtcacgactcggactgacgttgctagcctgcgacagcagcaggaagggtaccctcttggacaggagcaactgttgcgtcaggaacgggttgaacctgaccctgctcaggggcagggcttctatatggacaaggaacgcctgaattacggccttagcccggttttaaggcagtcggtgggggggcctgaaagtttctatatgtatcagattggtgtggtgggtgacgccagctactggctgaccaaccactggctggtgggcgggagcgtatttgccaatattaccaacaactataataagtttaattatgatggtacgcctggagattccactctgccgcgtgtgcgtacccatatccgcgactacgtcgggaatgatgtttatgtgcagacgttgcagaccaactacgtcagatcgttagggaacggtttctatggccagatgtacggcggctatctggagatgatgtacggcggcattggtgcagaattgctgtatcgtcctctggacgccaactgggccgtaggtgttgatggcaactacgttaaacaacgcgactgggacaatatgatgcagtttactgattatcgtgttgctaccggccacttaaccggctactggcgcccatggttcgcacaggatgtactggttaaactcagcgttggccagtatctggcgaaagacaaaggggcaacattagatatctccaaacggtttgacagcggggtgattgtgggggcctacgccacacagaccaatgtgtcgaaagaggagtatggggaaggttctttcaccaaagggttttacatctcaataccgttggatttgatgaccacccagccgacacggagcacaccaaccatcagctggacgccattaacgcgtgacggtgggcagatgttgggccgtcagtatcaactttatgatatgacctccgatcgtgaaattccggttggaccataa

SEQ ID NO: 268783 - DNA, 1155 bp, Klebsiella pneumoniae
atgatagatggtaaacgaaccatggaaagacgattagtaaaaattagcgggttggtattaactctcggcttgttaagcggctgtaccgtaatccctggacagggattgaatacttttggtaaggacgttattaagccgatagatagtgattatgatctcgataagctggtgaatgtttacccaataacccctagtctaattgagcagcttcgcccggaaagcgtgctggcgcgacccaatccacagctagatgacttgctaaaaagctacgagtaccgcgttggagtgggcgatgtcctgatggtgacagtatgggatcacccggaactgacaacaccggccgggcagtaccgtagcgccagcgatactgggaactgggtcaattccgatggtactattttttatccttatatcggtaaacttcaagtggcagggaaaacccttagtcagatacgccaggaaatcgcgagccgtcttaccacctatattgaaagcccacaggttgatgtaagtattgccgcatttcgatcacaaaaagtatatgtaacaggcgaagtgacgaactcaggaaaacaggcaattactaatattccgttaaccgttatggatgcgattaatgccgcgggcggattggctgctgatgcagactggcgaaatgttatactgacccataatgggaaggatacaagaatatctttgtatgcattaatgcaaaaaggggatctgactcagaatcatctattataccccggtgatattttgtatattcctagaaatgatgaactaaaaatatttgttcttggtgaggtaggcaaacaaagtacacttaaaatggatcgaagtgggatgacattagcagaagccttggggaatgcagaaggtatttctcaagaatactctgatgctacagggatatttgttattcgccagatgaaagcggataaaaatggtaggattgcaagtatctaccaattaaatgcacaggatgcctctgctatgatattgggtactgaatttcagttgcagccatacgatattgtatatgtaactactgcaccacttgttcgttggaaccgagttataagtcagttactaccaactattaatagcgtccgctatactgttgaaccagctaatacaatacataattggtaa

SEQ ID NO: 268784 - DNA, 1299 bp, Klebsiella pneumoniae
atggatatttggggatttttttggattttattgtcttttttagtcttctttttgggctatggccctatgtttttattgttggctttttcctctctttttcaggggagtgtggcaataaaagtcggtgactcaggattaccattattttatttcatcgaatgcatgactatccttagattcatcctcccctatagagggagtaaatggatatttaatttaaataatatatttctactgcggactgtctttttattgtttttcttttggttaagttcttttctggttactaatcttttttctggtgctaaagtctactcacctcagttaccatttgaattaaactattttttaggtggtataccgttatcttggggattttcaaatataaaccaattggttcttctttcactaaatctgatggtgttattttgtgtgtttgaaagacggacagaactctcagataaaatagttatgagagcattgtttggtattattattatcttttgtatttatagttttttatggctttttgccaagcctctcgctgatattattcaaggggttatttataattcaggtggtcatgctaatgccattttcgaaacaggtagacttagtggtacctttggcgaaccatcttttgctggtgttttccttggaactctggctgttcctttgttttttatgccccaaaaaatatataaaatatttgctattgcctttttgttttttttgattaagaataactcatcttctgggtatttttcttgtttagtctctcttgtttttatttttcttttttatgggaaaaaagatatttttgtaaagacatttatgattgtgcttttcttacttattgttttcattgtttacttcttattttctgacttgattataagttattctgaccagaagtcaatttcagactcaggtataaccagacaggcatcaaatatttcaggaatacaaaatcttattgatacatatggacttggcgttggagtaggaagtaccaggatttcatctttacttgtttgtatttttgcaaattttggtattgtaggcgctgttttattaattcttcatatttattctttattgagaaaatctgttgtcgagcagtcagctcagaaaagattgtttttaggtgttgccggggtttcctttatcggctcgtttgctgcgaatcctgattattcattttccatattatggatgtttgtatttcttgctattataataaatagtgacataacttataaaactcaacgtgacgctgttgtagtaaatgatgcgtag

SEQ ID NO: 268785 - DNA, 1917 bp, Klebsiella pneumoniae
atgtctttatttactcgtcgtaagtttatttctggaatgttgcctggttcttttttgctattatctccttatagcagtgcagagactaatggaagttttcggaatacgcagtcgacgagcagtgtcgacatatctaatctaaactcatctttgattatattagaatgtattgatgatttaaaaaaaatcattccagaatattccgggcaagtcgtttatgtaaaatcctactatgtacataacaattcaaaagacaaatatttaggagggggttttttttattatgatgatgaggatgcaatttccccagaagattttattcttactttcgtttctaaatctgggggacgatggatacggaaattagatagtaaaattattgatatctccatggcagggataatttgcgatggtatcaccgatgagacaataaaactaaaatcattaattgattttctaagctctttaggtgggtatataataaatggcggagggaggaagataattacttcatcgacagtagaaatcgatctttctaaagtcggcttggttaatattgatcttctttcaaaaatgacatccacagataatggttcgttatttatattaaaaatatccgggagcaaaactagtaatacattaaagtttactaagaataatataggtataataaaaaatgtcactgtttcgggggaggtggttcgcgatgatggtaatgttaatggagttttaattaacccatcagcagacatagctaatatagatatatattcattgactatcagaaaggtgaatgttggtctggtgttagggtctaacagctatttaattacctttactaagttatgcatttataactgtaatgtctgtatgacagattcaatatttctgaaactcgaaagtcatataaaaaatgcaggtgagaatatacagtttgtttcatgtacttttgccaacagtaatcaaattggtgcgtttcatggtatggaagcatacttgacctttgataaatgctcttttgattatactggaggaaatagaacacaacagtatgttcagtgggaaatatataagcaaggaattactcttaattatcttaattgccattttgaatcaggaaataagttcgacagtttgaatgattgctatttttatactaataaatctattcgtataaatattcggggtggggttatgcaatttggtaatacagaatacaatgcatgtccttatttttttttcgactcttcagggaaggccgatttttccattgaggacacttttatatacggtctaggtgtgaaacgatgggctaattgtggatttagaaaatttatgcctgaagttaattttgatacctctcatgtctctgcagttattcaggacaataattaccttattcaggatggctttttctctgcaaaatcaattattgatgagtggtttttcagtgaattcaatgatagcggaaacatgaatgttgcaactaaagttagcaatttgaaaattattaaaaattatttaattgataatgagtctagtaatgttcttaaggttggacaaatcgagagggggcagctttttttggtgttaaatagacccatgtcaaaatttgcaccttttatctcatttgaaataaaaggttcagagttacagcgaggtatagtcaattttagtttggggttgactcaaaaaagttttttttgtgataaaaataaacacccgttattaattgaaaccacctctaaatcaaatgttaacatttctgataatgtggaaaaaataattttagggaaaacattggcttttaagaatgaatatattaaatatgattctataattttaaaaattgattttcgtaactttaagggggatgatatttttataaggaatgtgattgttaactcacctttttaa

SEQ ID NO: 268786 - DNA, 1398 bp, Klebsiella pneumoniae
atgataacattttctcaccgggcacgtgcgaatgctaatgcctcgcttatatcgatggttcaacgcttttccgatatcgtaattatttttttaggtctatatcttgtatgttttttgaatgctgtttcatttgactataagcagactttactttctcttgccgtgcttgttgtatttcagatgattggtgggattactgatttttatcgttcctggcgaggagttaagatatctacggagttggttttaattactaaaaattggacgcttagcttattttttacattaggcgtaacatctctttttcctgattttgaacttaaatttagtatttttgttcaatggtattttatagtcattatagggtttgttagttgtcgtacactaattcgtatgggggccggcgttctacgtaaattaggatataatacccgtagggtcgctgtcgtaggagccaccccggctggtattagtcttctgaaggggtttttggaagaaccatggttggggtttgttgttaaaggagtgtatgatgatgacctttcaggtaattatgatggggtgccttatggaggctcattcgaaaaattaatccatgatgcccgtgatggacaaatcgatagaatatatatcgcgttaaatatgaaagatgaggcaaaaattaaagatattgttaggcaacttaccgatacaacttgctctgtattattgataccggatatgtttacatttaatattttgcagtcacgtactgaagaaattaatggtatgcctgtcgtttcgttatttgatacaccacttaatggtataaatatggtttttaagcggcttgaggatattattgtttctgctgcaatccttattttaatatctccagtactcttggtcatatcaatggctgtaaaaataagctctccaggtccaattatttttcggcagattcgatatggaatggatgggcggccaattaacgtatggaaattccgatctatgactgtaatggagaatgataataaagttaagcaagcgactaaaaatgatatccgagttactaaggttgggaaattcttacgtagtacatctcttgatgagttacctcagtttttcaatgtttttcttgggcaaatgtctgttgttggaccccggccacatgctgttgcacataatgaacaatatcgcacattaattgaggggtatatgttgcgacataaggtgaagcctggtataaccggactagcgcaaattaatggttggcggggcgaaactgacacattagaaaagatgcaaaaaagaatagagtttgacttactatatattcgtggttggagtatatggttagatattaaaataatatttcttacgatttttaaagggtttgttaataaatcggcatactag

SEQ ID NO: 268787 - DNA, 1155 bp, Klebsiella pneumoniae
atgtttaaagatttgaatgttggaatagttaccgattggcttgtaacatatgcaggtgccgaaagggtcattaaagaattcatagatgcttttccagatgctgacttatattcaattgttgacttcttgtcagatgatgctcggcgaatatttaatgggaagcatgctcatacgagttttattcaaaagttaccttcagcaaagcgaaaatatcaaaaatatcttcctttgatgccattggctatagagcaattagatgtttcatcgcatgacatcatattgtcgagtagtcacgctgttgctaaaggtgttttgaccggccctgatcaacttcatattagctatgtgcattcacccatccgttatgcttgggatcttcaacatcaatatttgcgtgagtccggacttaataacggaatcaaggggttgcttgcaaaatggttattgcataaaatcagaatgtgggattatcggacagccaatggtgttgactacttcattgctaattcaaaatttatttctaggcgtataaagaaagtctatggacgtgatgctgatgttatttatccacctgtggatattgatcagtttatatttaaagaaaataaggatgattattattttaccgcttcccgtttagtcccctataagagaattgatcttattgtagaggcttttagttatatgcctaataaaaaattagtagtgattggtgatggtacggaaatgagtaaaataaaatctaaagctgcaaaaaatgttgaagttcttgggtaccaacctaatgaagtaatgagggagtatatgcaaaatgctaaagcatttatttttgcagcagaggaggattttggaattacacctgttgaggcccaagcctgcggtactccagttatagcatttggtaaagggggggcattagaaactgtacgcccgcatggtgtgagcgatgctacaggtcttttttttccagaacaaagtatatcatcaattgttgatgctgtgatgaaatttgatgatattggtaatggtattgcacctatagattgtaggaataacgctatcaatttttccagagaaagatttcaatgtgaacttagagagtatattgctaataaatggggtttatttaatgagaataaagcaataacttattga

SEQ ID NO: 268788 - DNA, 990 bp, Klebsiella pneumoniae
atgagtaaatatggagtaattgtttatgaaggtgggaagtttgaatcacaaaacttgcttaatttgggtgattatgtgcaaagtactgctgccaaacaattcttacctcaagttgataaatatgttacgcgtgaaggaatgcacttatacaatgatgaaaatattaaaatgattatgaatgcatggtacatggcgaatcctgaaaactttcctccttctaataaaattgaaccattatatgtatcagttcatttaaactcttctatagttgataaaatttttagacccgatgttattgctcactttaaaaagttccaacctatcggatgccgcgataatcatacccgtgatctgcttcaagcaaaaggcattgatgcctattattcaggatgtatgactcttacattaggacacacatataaaagagaaaatgttactaatgaagttatttttgtcgatattatgcatgattccctctcaatgaaacaattaattaagcaacctctccgcttaggtaagagggtattaaatggccggataaaagagttaaccattaagcgtaatgtattacaaaaatattttgacgagagtgtattggagaatgctgtttatattgaacaaatggtaccttatataactcctgatatcggttttaaaatggcggattcttatttaaaaaggttggcttctgctagatttgttgtgacatcaagaattcatactgctctcccatgcttggcgatgggcaccccggttatttttattaatggtggttttaaaactaaggttgataattgccgttttgatggcttatttgatttttttaataggattgatgttgatccctccggtaattccacgactaactttaactttgcaggtagtaaaataaaattagacacgactcttgagaataaagatttacatattccatatgcaaatgagctaataaggaaatgtcaggaatttgtctccaaagagattaagtag

SEQ ID NO: 268789 - DNA, 1530 bp, Klebsiella pneumoniae
ttgtcaaataataataagagaatagccaagaatacactaatgctatatacgcgaatgatcatgataatgattgtatcgctgtatacatcgaggatacttctgcaggcgcttggtgtaaaagatcttggaatttatagtattattgcaggggttatagttctctttggttttattcaaaatgtaacaactttggccacgcagcgtttcctatctttaggattgggtaaagatgatattgcttggactaataaggcttttaataccagtataattgttcatatagttatagctttaattattttttttcttggtgaaactatagggttgtggtttgtaaatactaaactaagtataccagtggagcgtattaatgatatcgcatgggtgtttcagttctcgcttttatcattaatcgtccaaatattacaaacaccatttatcgcagcgatcattgcatgtgaaaaaatggaggtttatgcaaaaattggtgtgttagatgcttttcaaagatggtttattgtatttattttgacttcttttgcttttgaagataaattaagaacatatgcagttttggttctgattggttatttttttatattcttttgttattttatatttagtgtgaggaagtttgccatttgtcggttgactatgagggccgatcgaacaatccttaaggaaatgttttctttttcgagctggacacttatgggttcgatgagtgtcgtcgcactctctcaaggaattgctatcctcgttaatatattttttggcgttatagcaaatgcatctttggggttatccgatcaagtattagctgcaataaacagagtgacagggaattttcaaacagctttcaacccacagattataaagtcatatgcatccgataataaaacttatctacgaacattaatcttgcaatcaagtaagttatcattttgcttagttcttctagcagtttcaccaatttttgctgatactcattttattttatctctttggttaggtcatgttcctgattatttagtaacattagtacgtgttgttgttttttatgtattaatagattgcttgtctggtccatttgtaacagtgatatatgctgcaggcaaattgaaaaggtatcaattaactataacgttaataattctttttaatttgttgttggcttatgttttggtctatttaaaaatgcctctctatgtgattgtaatggctagagtgagtagcgtgtttttgctttttctttatcgcgtgttaatggtagggaagctaattgcgtttgatgttaagtattatttgttcaatgtatctttcaagttgctgatggttggtgggggaagtattttattcataagttatataagtaaatctttacccgaggatattttaggattgtgttatttgttggtggtttcgagttgtactattctcttgctattttacatgattgttttttctgtagaagaaaaaactttttgcaaaatgaaagtcaagggtttttataaaaaattatctagttga

SEQ ID NO: 268790 - DNA, 723 bp, Klebsiella pneumoniae
atgccagttaaaattttagaagaagctgaaaatgagttaattgaaaaggctgatatagtttttgttacttcacctcagttgtattctacacgaaaggaaataaataataatacatattatcattctaatgtggctgactttaagcattttaactctagccttaatatggagataaaaaagccaaaggatattgaagaaattaatggtcctatactcggttttgtcggagcaataagtagttataaaatagattttgagcttttatcatttattgcaactcaacgtcctcagtatcaaattgtcttgataggtttggttggtgagggggatcctaataccaatatctcaattttagaaaaacatagtaacattcattttctgggacctaaatcctataaggaattgccgcaatatctcaaattttttgatgtggcaatgttaccgaatgtaattaattcttatactgataatatgtttccgatgaaattcttcgaatatctggctgcaggaaaaaatgttgtttccgtcaacttaaaagctattcaagaatttaaagattatgtagatataagtaattcacaggctgaatttctatctaatattgacaagatactttctggctgtattgtccctttagataaacgactggaattagcaatggaattcacttatgaagctcgaacaaagaaaatgctggatttaatagagcgaacagtaaaataa

SEQ ID NO: 268791 - DNA, 822 bp, Klebsiella pneumoniae
gtgatcccgttaaccgtcgaaacggctctcaatgcagagctgactgaccatctcgggcatgagaagaacgcacccaaaaaaggctctaatacccgcaatggctactcatcaaaaacgctgctttgtgatgatggcgaaattgagctgaacacgccgcgtgaccgcgaaaatacctttgaacctcagctgattaagaaaaaccagacgcgcatcacgcagatggacagccagattttatccctgtacgccaaaggaatgaccccccgtgaaatcgtcgccacgttcaaagagatgtacgacgccgatgtgtctcccacactgatatctaaagtcaccgacgccgtaaaagagcaggttgctgagtggcaaaaccgacaactgaatgcgctgtatcccattgtttatatggactgtattgttgtcaaagtccgtcagaatggcagcgtgataaacaaagccgtcttccttgctctgggcattaacaccgaaggccagaaagaattactgggtatgtggctggccgaaaacgaaggcgcaaagttctggctgaacgtcctgacagagctgaaaaatcgcggtcttcaggacatcctgattgcctgcgtggacggtctgaagggtttcccggatgcgataaacagcgtttatccgcagacacatatccagctgtgcatcatccatatggtgcgtaacagcctgaaatatgtggcatggaaggactacaaagccgtcaccagcgggttgaaagcggtgtatcaggccccgaccgaagaggcggcgctgatggcgctggcatcaggatctgccatgatgatgcgctga

SEQ ID NO: 268792 - DNA, 258 bp, Klebsiella pneumoniae
atgcaaaacgccacgcttattggtattgacctgggtaaacattcctttcacgttcattgccaggatcggcaaggcaatgccctgctacggaagaagttttcccgctctcaacttgccacctttctttcaacctgcccactctgtaccgtggtaatggagtcctgtgcgggggcgcattacatggcacgaaccatatctgtgttagggcatcaggtgaagttgatcgctccacagtttgttcgtaagcgtacagcgtga

SEQ ID NO: 268793 - DNA, 996 bp, Klebsiella pneumoniae
atggttacaatgcatgatgtagcatccaaggcgggggtctccagagcgacggtttcacgcgtcttatctgatcctaattcagtaaaagatgaaacaaaaagaaacgttttattttggattaaccagttaggataccagccgaataagatagcacaagcactcgctggaaatcgctcaggagttatcggggttgttgttccaaacattactaatccttattattctgaattagttaactttgctgaggaaatcgcttcgaaccaaggatactcaataatattatgctgctcccataactccttggaaaaggaaagaagaatctttataaacctgaagagtagaaatgctgaaggaatattgattttccctgtatctacagaagatgaaaaatattcaacactcgatattccttgcgtcactttgggtagaatcctgaagagtaaaatggctgttgtttcggatttagaatcaggggcaatgaaagtagcaaaacattttattcaaaatggttatgataaaattggtttttttggccctacttctgggatacccggtttcgataaatattttggtttctctaattacctgaaggatgcaggtattaagttgacagacatcattgaaattccctccaaaagggagtcattgcaagaattattagaaaattatcatatgctacatggcatgcagagtaaagcatggtttgctcataatgatgacgcagcagtttatcttattaactatttttgtaagagagatgtaaaagtacccgatgaagtgattgttgcggggtatgatgataccattctgtcaaagaattttttccccgcaataacttctgttcatcaaccaatcggtgaaatggtgaataaagcatttaatctgctgctggaacaaattgtttcttgtaatacaaaccctgaaatttatagatttgataatgagttagtagtcagaacatcgacaaaccaacaaaaaaaatattttaacaaatga

SEQ ID NO: 268794 - DNA, 228 bp, Klebsiella pneumoniae
atggcttacgttcgaacatcaatgtttctgacgtatgatgcggtaaacacgtttggcattcaccgcaccaagacctttggcttcagattgtcggcgcagaaatgcccagactcgcctgtagccatacgtaggcagatcaccgatgacagtatgtatttgcaacagggcatcggtatcatccaactggagtatccggaggcgatcctgcctggtgttcggacgtcgtaa

SEQ ID NO: 268795 - DNA, 1497 bp, Klebsiella pneumoniae
atgtataaaaaaagaaaacttgccgttatgattagcatactggtcggtagtacttccgtctttgctcagacggatatgacaagtgtagaatcgcgacttagtgcgctggaatcacgtctgaaggatgcggaaaaccgtgcagaatcggcggaaaaaaaagttcagctgcttacgcttcaacagcagaaaacgcaaaccactacccagcaggtaacgcagcgcacttcgcaattggagaaaaaagcagaacagcaaagcggctttgaatttcacggttatgcacgttccggcacgctgatgaataactcgggcgccagcacccaatctggggcttatatgacgccagccggagaaactggtggctcgataggccgcctagggaaccaagccgatacttatgttgaaatgaatcttgaacataagcagacactggataacggcgcgacgacccgtttcaaagtgacagtggcggatgggcaaaccacctataatgactggacggcaagcaccagctatctgaacgttcgtcaggccttcgtagaactgggcaacctgccgaccttcgaaggagccttcaaaggctccaccctgtgggccggtaagcgcttcgaccgcgataacttcgatattcactgggtcgattccgacgtggtattcctcgcgggtaccggcggcggtatttatgacgtgaagtggaacgacagcctgcggagtaacttctctctatacggacgcaacttcggcgatattgatgattctagcaatagcgtgcagaactacatcctcagcatgaaccacttcatcggcccggtgcaggtgatggtcagcgggatgcgggcgaaagataatgacgagcgtaaagataccaacggcaatctggtcaaaggcgatgcggcaaataccggggtacatacgctactcggtttgcacaacgacagtttttacggcctacgggaagggagcagtaaaacggctctgctctacgggcacggtctgggcgcagaggtgaaaggcgtcggttccgacggcgcgctgcgtccgggagccaatacctggcgcttcgccagctacggcaccacgccgctcagcaagaactggtttatcgccccggcggtactggcgcagagcagtaaagaccgctatgtcgatggcgacagctaccagtgggcgaccctcaacatgcgtctgattcaggagatcaaccagaacttcgccctcgcttacgaaggcacctatcagtatatggatctcaaaccagaaggttatgatgaccgcaatgcagttaacggcagtttctataaactgaccttcgcaccaacgtttaaggttggcagcattggcgatttcttcagccgcccagagatccgcttctacacttcttggatggactggagcaaaaaactggataattacgcaagcgatgacgctttaggcagcagcggctttaaatcgggcggagaatggtcgttcggtgtgcaaatggaaacatggttctga

SEQ ID NO: 268796 - DNA, 831 bp, Klebsiella pneumoniae
atgattgttagaaaggtcgctctgattttattgttcttcttgtcttttaaaacttgcgcatatgaaatcaaacgaatggaaatcaacagtaataacatagacaaaaaatcatatgcgacaattgtattgccagatagttacagtaaaagtaatcaaaggtattcaactatttatttactacacggatggagtggaaatgataaagattggacagaaaacagtgatgtttctgttcttgctgacaattaccaagttattatcgtaatgccagatggaaattatgacggatggtatataaatagtccaatactgagtaaaagcgactatgaaaaatacatcggaaatgatgttgtatcctttatggataagaacttcaaaacaattccttttaaatacggaagagccatcactggtttaagtatgggaggattcggagcacttaacatagcattgaattaccctcagaaatttggtgcggtaggtagtatgagtggaggtgtagacccaagagattatcctaagaactgggggttggaaaaggtttttggcgatcctattaccaattcaaaattctgggatgataaagccatcataaataatgcatatcaatttattaatatgggagtttatatttttattgactgtggtgtgggtgatttttttatcgagccgaatagaagacttcatcaacgattactagaattacgaattaatcatacttatttagaaagtcctggagggcattcatggggttattgggataatgctgttaaataccagttgctatttatgaaaaattctctggaagaaatgcaaaaggaaatcaaataa

SEQ ID NO: 268797 - DNA, 1344 bp, Klebsiella pneumoniae
atgaataatgaaaatgtattgatccttatagatttgattggtgggggaggcaatatagaatcgctgactcactgtgcgacacgattgcgttttaaaattaaagatgaaagcaaattaaatatacagggtcttgaggagttgccagaagtacttaaggtaatcaacagtgctggacagttccagattgttatcgggccggatgtcagtcatgtttatgatagtataattcacaggatacagaaaattccctccctgaatgagggtaaagataatgcaaagaaaaataacattattaattcaatatttgatctaacgtcaggtgcatttaccccacttctaccttgtttagcttgcgccgggatgcttaaggcattagttcttcttttggcgatgacgggttttgttggaaaaagcagtgactcatatattgtgttatcagctattcaaaattcttttttttattttctacctattttgcttggtgttactttaggttataagttaaatgtcaacccatacatttctgggatgattggagccgctcttttagagcctacattcatcactaaagcacttgaaaaaggaactttcgattttttcggagcgccaatcctggcattaaactactcttcttctgtttttcctattattatttcaattatactctatgctggcctttacaaaatcctgaatagaattataccaaagactatgcacataatttttgttccatttttaagtgtattaatcgttgtcccattgacttttttattttttggtccatttgggatatatgttggaaaatttctagcaagtggcattacagcgcttttagattttaatcgaataatagctgggctgattatgggatttatttggatacctgttgttttacttggtctccattgggcaattattccaattgcaatatctaatatagcttctggaggtgatcctatattcgcgatcgctacggcttgtacatttagcacgattggagctgccttaggatttctgcttaaaaccaagggaacatctttaaagcgaagaggtgtggtaattgctgggttgatacctgcaatactagctggaataacagaaccaattttatatagtatccttttgcagtacaggaaacttctttttattacaatgactgcttctgcaattggatctgggattattgcattctcaggtgtactggcttcgagtgtattctggagtatatttactcttcacacatactctcctgttattggatatattacggggggaggggtagcaacaatatttgcatttctagcagcattactcatgaactatgaggacatatcagaaaaataa

SEQ ID NO: 268798 - DNA, 897 bp, Klebsiella pneumoniae
atgcaatccaataagattaaaataaatgacacctcttatttcacgacttatttattggagtctaagatttcgatgaatacatataaaaaacggcctgcattgattgtttgtccaggaggggcgtatctgttcaaggcaacaaaggaaggtgagtcagtggccatcgaatttctttctagaggatataatacttttattctcaactattctacactgtttccagacagagaaagttttgaaatgcgatctggagaaaattccgatatactctaccctaaacaagttatcgagttactggaagtaattaacatagtcaaaaaaaatagcgatgaatgggggatagataaggataaaattttcattctgggtttttctgctggtgggcatgttgcaggctcagttgcagtacattggaataataatgctatgctacagtatttaacattcatcccagaaaatgaggaactaaaaccttctggagttatattgtgctatccaatgctgaatggagatatacttaaatatatacaaacagatgaacgaaaagaaatctccaatcaacattcatatataaaaaaagtgataggaggcttagaaaattcacaagaccataagatgcatggattggatttaagtcagttcataacatcagaaacccctcctatttttttatggcatactacagaggatagaatcacaagagcagaagatacaacattatttgttagtagattattaaaggaaggtgttccatgtgaatatcatctttttatgaaggggaagcatggtatggggctatgtaattctgtcgcagccaaaaatagctcagatataaatgagagctgttcgtattggataaatttagcagataattggatgaggggtattaaaaaatga

SEQ ID NO: 268799 - DNA, 1296 bp, Klebsiella pneumoniae
gtgatattgctgcaatttattgttgttctgttttttctctatctggggatgcgagtcggaggtattggcgtggggtttgcgggtggtgccggggttatcgtgctttgcgccatcggggctacgcccggcgacctcccgatgctggtcatcgtctttattatggtggtgatcgtcgccattgcagcaatgcaggaggctggcgggatcgactatctggtgaggttaaccgagcgagtgttgcggcgggcaccgcgtttactggttatcacggcaccgctttccacctggttgttgacgatgatggccagtacggggcaagtgtcatttgcctgtatgccgattattgtggaggttgcaaaggagaaccggcttcgccctacccgagcgttagctatttcggttatcgcctcgctgctgggcattgttgcctcgccaatttccgccgcggtgatttttttctccgggatactcgaaaaaagccatcagggatgggggtatctggaacttatctcggtgatgatacccgccactttttttgctctgctgtgtacatccgtgttttacctagtctgggataacatccgccaaaccgaccaactgagcgctgacgctcccggtgcctctacgcagaccagggttggtagtattcctccaggagccaaacgctcagtgctgatttttattgtgggcctggtcgtggtgctgttatacgccatgatcagcagcccaagatcagggctgattgcgcacccggtgttgaatagcgggcaggtccgtatttccgtcatgatggcggtcgcgctgatgatcgttattttttgtcgcatcaacgtgcataatattccggcgacgtccgtctttaaaaccggcatgacttcctgcatctgtatactcggcgtggcctggctcggttcaacatttatggacagtaatcaggtatggttgcaaagcaaggtgtccgactatctgtcagactcgccactactgttggcactgattattatgctggtatcgtgctttctttattctcaagcagcatcaacaaaaatactcttcccgctggctctgggaataggaattgctcccgccacgctgatcgcctgttttcccgcgactgcgtccctgtttattctgccgaactacccgacgttgctggcggcagtggcactggatgatacgggttcaacccgtttaggcatccgaattatcgatcatccatttattcttcccgggttgatggccacgatgctgtctatcatgttctcggcggtttttacactgctgttttacgcttaa

SEQ ID NO: 268800 - DNA, 882 bp, Klebsiella pneumoniae
atgaaactactgagtttttccgttgatggtcacgaaaagtacggtctgatcacccccgatgggattattgatttataccctttcttcccggagtgccccgacctacggtcgttcctgccccatctgcagcaactgaatcaggggatgctactggggaagaaagcggactattcgctcgatcagataggctttttgccggtgatcacccggccaaataaaatcatctgcgccgggatgaactatcaggaaaaaagagctgaatttaacgagcaggatcccgacccgacgctcttcattcgttttgccgactcccagaccgggcaccgctgcgggttgatcaagccctcccgcagtaacgagttcgactatgaaggggagctggcgctggtgattggccggcacggttcgcatattcccgcggatcaggcgcgtggctatatcgccggatacagttgctatatggatggttcggtcagggactggcagcacacctggtttaccgcaggaaaaaactggcccgcaaccggtgggttcggcccctggctggtcactccagatgagatctccgatccgcagaacctggagatcatcacccgactcaatggtcgcgaggtgcaacacgacaatacccacagcatgatccactcgatagataaactgatcgcctacatcagtacatttagcgccctgtcaccgggtgatgtcattctgaccggctcgccaggcggcgtcgggaaaaaacgtcatccgcctcttttcctgtggccgggggatgtggtggaggtcgagatatcgcagattggtagtctggtaaatcctgttattgctgaggtcgacgataccccatattcagcaaaccctgtctacaccaacgcatcctga

SEQ ID NO: 268801 - DNA, 1395 bp, Klebsiella pneumoniae
atgtcaacattggtcctgaatgccagtcgatctgccgccgatactgcgacaggtgctgccgaactggttgcccgtatagaacgcattcctgttacccgaaaattagtttttattcgtcttgttaccggtatttccactttttttgactcctacacagtgctggcgattgccttcgcaatgccagaactcatcagccaatggcatctctctcccctttttgtgggtctcattatcgccgccagctacgcaggccagcttgttggcgctattttctttgggtctctggcagagaaaacaggacgcctgagcgttctgaaaataacgattgtcatgtttgtcacgatgagtgctgcctgcctgttggcctggaatggctggtctctgctaattattcgcttccttcaggggattggcatcggtgcggaagtcccggtagccagcgcctatatcaatgaatttatcggttccaaaaaacgtggccgcttctttttattgtatgaagtgattttcccgatcggtctgatgttcgccgggatcattggctactttctggtaccagaatatggctggaaagccatgttctgggtgggcctgatcccgccgatgatcgcggccccgcttcgttggctgatgccagaatcgccacgctggctaataagtcaaaatcgaattgccgatgcagaccaaattatccgcagtctggaggatgaagtgatccgtcgcggtggtaccctggaagctccggtggtgaagacctttgcggcaccagtagatacatcaatgggatggcgagagctcttttccggtatctatctgaaacgcaccctgatgctctggggattatgggtcagcgcttatcttgttaataacggcatgattacctggctgccgaccctgtaccgtagcgcatttcacttatctatcccgctcagtctggcctatggctggataacctcggccgccggagtcgcggcgtcgtttgcctgcgcgttgttgattgaccgtaccggacgaaaacgctggtacagcaccgcattttgcctctcagccctctcactgttgattctgggagaaagtggtgcgtccagtgctattgtggtgctggttttcaccagtctggcgtacgccatcatgcagaccgtcactttttcgctctacctatactccgccgaactgtatcccactcgtctgcgcgccattggtaccggatttggcagcgcctggttgcgcgcaggatctaccctcggcaccctgctggtcgggctaattgttgcaggaccaggggtggaatacgttttcttcttatttgcggcggtcgcacttgctggtggggtcatcacgatgcttttcggtatcgaaacccgaggcgccattctggaggaactgtctccctag

SEQ ID NO: 268802 - DNA, 1032 bp, Klebsiella pneumoniae
atggaccaggaaagtgaagagcaggatcactcagaaaaaaaactgataaccatgcgggatgttgccagtgcggctggagtcagcgtgtcgaccgtctcacgtatactggatgaaagacttccgccttccagaagcgcctctgctgaaaaagttcgccaggttgcgcgtgaactgggataccgacgggattatgtcgcctccagtttacgtcgcggaggaaccggcactatcggggtgctggtcccacgtctgaccgatacggtcaccgcgatgctcttcgaagaaatcgcccgagcaaccgctcgccgtggctattttgcggtcgtggcgacctgtggagatgaccctgatcaggagcgtgaatccgtagaatctctgctggatcgccgtgtcgatggcctcattttgtcgacatgtcggctggacgatcccctgccccaaacgctgcgggaacgggatattccccacgtgctggtactgcgaacggacggtatcagcttatcttccgttggggacgacgagctgggagggtatctggcggcccgccatctgattgatttaggccataaaaatatcggtctcattggagggcctgatttcgcctccaacgccctcaaccgacgaaaaggttttgaaaaagccatgcgcgaggtgaacctgcagattcagccgcaatggtgctgctcatccgattttaacatccagtcgggtgaagacgccggggaacggatactcagcaccacgcctcctcccagtgccatttttgccgtcaatgacgaaatcgccattggcgtggtggccgccgcgcaccatcgaggtatcaccattggccaggagttgtcgctggtcggctacaatgatatcccgctggtgagtcgtttaccggtggcgctgacgtcggtgcgaaccccgctggaacatattgccagcaatgccgtcgatatgctgattaacggtgaagaccgccagcgcctgcgtgcggtggcaccgacacttatcccaagaaaatcaacaacatcatttaataaataa

SEQ ID NO: 268803 - DNA, 1398 bp, Klebsiella pneumoniae
atgtcaactcaggttattgcttctgataatattattaccagtcactctgaggctaaatcagcagagttactggccagacttgagcggttacctatcacgcggcggcttttgggcatccgtgtgatagtgggcttatcaacgttctttgatgcttacacgattattgctattgcctttgcgttacctcaactcacccaggagtgggggctgactccgacgtttgtgggccttattattgctgcaagctatgtcggacaattatgtggggcgcttttttttggttcactggcggaaaaaattggtcgtattggcgtgctacgtatcaccattattatgtttgtggtgatggatgccgcctgcctctttgcgtggaacggctggtcaatcctggtgatccgtttcctgcaagggctgggcattggcgctgaagtcccggtcgccagcgcttatatcaatgagtttgtcggggcaaaaaaacgcggccgatttttcctgttgtatgaagttatttttcccatcggtatgatgtttgctggtctggtcggcttttttctggtgccgatttatggctggaaagtcatgttcctgattgggctgattccctccgctttaacagtgcctctgcgttggctgatgccggaatcaccgcgatggttaacggccaaaggtcgtcaggcgcaggccgagaaagttgtcgctatgtttgaagatgaggccatccgccgcggcatggaattaccggagccgaccattaaaccggttgcaccacaggtatcgtcagagaccggtgtcaaagcgctgttctccgggatgtataagtcgagaacatttatgctatggggactgtggttaacggtctataccgttaataacgggatgattacctggttcccgacgatgtataaaactttattccatctgcccctggaaaccagcttagcctacggctggattacctcctcctgcggggttattgcgtcggtggtgtgtgctttcctgattgataaagttggccgtaaacgctggtattcatgggcgtttatgttagcaattattccgttaattacgctctgtgtattaggtgctaaatcggccatcgaaatattgattcttggtagcatgacctacgccattttgcagacggtcgccttttcgttgtacctctattctgccgaattgtatccgacacgtttgcgagctatcgggacagcattctccagcgcctggctgcgtgccggttcctcaatagggccactgctggttggctttatcgtctctggtttcggtgtacggtttgtgtttatcgctttcgccgtgattgccctgacgggcgggctggtgacgttactgtttgcggtggagactaaaggtaaatcactcgaggagctgtcgccgtag

SEQ ID NO: 268804 - DNA, 1353 bp, Klebsiella pneumoniae
atgatatatataaaattgcaatattattgtattttgggtttcttatgctttcctgcttcattatttgccagtgattcacctttctccgcgaccggccaacatatgaccggcgactgggggggataccgtagtgaccttaaaaataaaggctatgactttacgttagaatatggctcgatgctggcctcaaatatctccggcggatataaccgaaataaaacggtgcgttacagcgaccaatatattattggtgtcgatatggatctgcagaaaatagccggtatagccaatgggcaatttaaaatgtcggtcgtcgatcgtaacggtcgtgatttaaccaaggaccggattcaggacccgcgagcgccggttatggggtcaacggtcaacagtaactatggtcgtggccagacctggcatgccgcgcagttttggtatcgccagtcgtggttcgataacaagttggatcttaaagccggtctgataccggtgggggaggattttgataataacggctgttattttcagaacctgtcactgtgtggatcgctgacgggccacgggaatagcgcgtggtataacacccctatagggcaatgggggctgcgggttcgttacaatatgaccgcgatgaccgcgcaaacgtacctccaggccggggcctttatgtacaaccccaactacgccacccgtagcggcagcttccggttagataataccggacgcactggcaatatgtatctggttgaactgggatataccccgctgctgggtatcaagcaacttccgggagcgttcaaggtaggggcctggtataacacggcggatgccaacgatgtactgaaagacagtcatggcgatgattatgtactgagcaaacgtgcacctgcagttcgtgacggtcgctatggtggttgggtctatttacagcagcaggtgacccgagagcagggcagcacaaatcggggattatcgttattctggcacctggcaatgaacgataaagcgacggcgaccatggactatcagacacagattggcaccgtgtataaaggcctctttgacagccgtcctcaggactatatcggtcttgggtttagcaaaatgcatgcgaacgatcgggtggcggagcgagcccatttgcagaacgagctcaaaggggcggaggattatgacgatccgacctggacaccggttcgcggtgccgagtacgcggcggaactgcactacagcatcgcggtaacgccctggtttaccttacgacctaatgtgcagttcctcagcgggccgggtggtgtcaaagaagtcaaagacgcgtgggttgtgggcacgcagattaccctcaaattataa

SEQ ID NO: 268805 - DNA, 690 bp, Klebsiella pneumoniae
atgagcttgatgaaacagaatctcttctggcgtcccgcaaaaaggtggtttcaggtacgctgcgcattagtcttcccgtctcatatggccggatttgtgtcatgcctgtccttgctacgctgtgttctggaatacccggaacttaaactggatatcacgttcaccgatcgccaggtggaccttatcaaggaaaatatcgatcttgctgtgcgacttggtgacacaggaaactctgccagtcttgccgggcgaaaaatcgccactcagcgttctgtcatatgcgcttctcctgcatacattaatcgtcacggcctgcttggcagtgcagaagagctgctttcacattactgcctaggcttttcaagggatggcagagtattgccctggaaagtgctgggtgaaaatggccgtatgtcactgattgccccccctgtccgccacatcgtcagccacggggaagctctgcggaacgcggctgtcggagggatggggattgccttcctgtcaacatggctggccggagacgaaatcgctaaaggggaactgaggattatacccgtcacaacccccaattatgatgccccggttacggcgctgtggcctgtttcaagaaatctctcaccccggatctgggcggtggttgatagactgtacgctgcgtttaatgaggagatagcccggacccggtag

SEQ ID NO: 268806 - DNA, 237 bp, Klebsiella pneumoniae
atgacagcgaaacaacgcagcacgcagagtgtgaccatgacggtggaacgcgccttactggtccgggcgcgtgatgcaggcattaacctgagtgcaaccctgacaaccgccctggatgtggagctccgccgccatgaagcgaaaaaatggcaggaagagaacagggaggccatcgacgcattaaaccgttttcatgatgagcatggctgtttcagtgatgaatacaggacattttaa

SEQ ID NO: 268807 - DNA, 315 bp, Klebsiella pneumoniae
atgcagttcaccgtattcggaaacaccggtaaaagcgccgtttaccccctgttgctcgatgtcacgagcgatattattggacaactgaaccgccggatcgtgatcccgttgctgcctgttgaaaaatatccggcaggccgccgcccggatcgccttgtccccgtggtcagactgacggacggccaggaatacgcggtcatgactcacgagctggcaagtgtccctgtccgggcgctggggacggtgttctgtgatgctgctcaatatcgctctcaggtaaaggccgccatcgatttcctcattgacggcatttag

SEQ ID NO: 268808 - DNA, 753 bp, Klebsiella pneumoniae
atgcttattcataatgttgctgaaagaaatgaagccgccaaccggagaatggagacattgctgagttttcttaaggaggaaaccttctctgatttccatacattaaaaaaagttgtcggttataaaggaagacataaccatgcgatgtataacctgctgaataaagcggttgcgctgggatttctgagtaaacatgagtatccggtactgaccgggaaaaaggcattgtgggggatcaccatgccggggctggccagggtggttaatgcggatgatcctgtttttcccgcctattttgagccgggtaaactcaggcactggacgctggagcatcgtctgttaaaccagcggatcaggctggccctggaggaaaaaggcggtacaggctggctaaacggcgaccggggggcgtttatggcgcggtatccgggtgtccggcaccgaccggacggcatcattaccctgagcagcggtgccatcgttgcagtggaaaccgagcgctcgctgaaaacccgcgcccgctacatcaacattattaacagtcatctggcggccagcgacgccggacgctggcactacgccatgtacgtcatgccggacgataagacccgcgtgtcccttagcagactgtttgacagtatcaggacggtaataaggaacaatgttcccgttccgtttgatgcgaaaaaccgggaaatgtttctgttccgcacgatagccgagctggaacaggctcccggcagtcacaactaa

SEQ ID NO: 268809 - DNA, 1737 bp, Klebsiella pneumoniae
atgggaactcatctgatgcaaaggctgaatgccttttcggatgccttttctgtttttctgctctggctgcaaaacaacccggtcatattatctctgttcgccgggctgacgctgccattcatttttcatctgccacgcgaagaaagaaaaaatgcccccttctggttaaaatcggtggcgtgcgtgtctatcttcttctttatctccggcacgctgtcgccgctgaccattcaggggttgagttttttctttaccgtgctcaataatcacattctgctcagattatcactctggatactgacggtcggatttacgctggccggtctggcatttcacattaccacccgacggttattggccggagaaattgacagtttaaaacacaggatgattaaaaaaagcaaactggaaagaaatgtcagaacagatgttcgtgaagtcagggatatgttacctgacagtattgcgtataatccgctggattatattgacctgaataacggtattttcatcgggctggataaagacaatcagccgcaatatatcaccgccgaagagtttcagacccagcacgccgaccttatcggcaccaccggctccggtaaaggcgtcagcgcctgtgtcctgctttatcaggcaatactgtcaggtgaaggcgtatttgtcgaagatcccaaaaatgatgagtgggccccgcatgtcctgcgggacgcctgccagaaagcgggaaaacaatttgtctttattaacctgaatgaccttcattttcagctggatttactggctgatatttctcatgaacaactggaggagctgtttaatgccggtttcagcctgggtaaaaaaggcgaaggcgctgacttttaccgtattgccgaccgacgggccgccagaaatacggcagcgatttatgaaaaaggcatgacattacgggatttattcaataccgactttgtgaaatctctcagtgaagatgtgcctgctttttatggcgagctggaggaaatcgccctggtgaactccattaatgccagtaaggggttttcgttaaagcgcatttttgatgagggcggatgctgttacatcattggctcgatgcgtaatcagaaaatcatttcggcgcagcgcatgattttaacccgacttatccagatagccgaaacgcgggaccggataaaaaggaagccccggcccgtcgctattttcctggatgaacttaaatatcacctttcccgcccggtgcttgaggggcttggcgcggcaagagataaaggtgtgcatatcatcatggcgcatcagtcggtgaaagatttatatgactgtccggcagatctggagggtgatacggtcgctggttcggttatcgaaaactgtaaattcatgctggtttatcgccttcgcgatccagataccgccgactgggtggccaggatgaccggctctattctggttgatgatgagatgaggaaagtgaaaacggatatatccctgacggagaaaatggaaacggacaggatgatccgccaggcggaacgctattatatcgacagcaatatgctgcttaacctgccaaaatttgtcggttttgtatttacctggaatgatctggcgaaggcgacaaagctttttcatataccggcgaaaaagcaatatatcgacctgctttcatttgagcataaaaacccgctgtataccggaaaagacaatcagactcacaaaccttccattaacctgtga

SEQ ID NO: 268810 - DNA, 306 bp, Klebsiella pneumoniae
atgaataaagaagacctgtttattgccaacattcactcaacacatcaggacataatatcggtcacgtgtatctatgattccctgtcgaaagaagcgcatcagggatgcgggctttattatgagatatatgaaggccggtttatcggtttattgcggcatcatatttcactgcttaatgagccggacgcagacaagctcaggcggtatgccgaaagtcagggaacgaaggtcgatgatgaggcataccgtgcggcattaaatgcggaacgggaatgccgggctgaaatagcccgcgagcagatgtga

SEQ ID NO: 268811 - DNA, 303 bp, Klebsiella pneumoniae
atgaaatattccgctattgcggcggcagtgctgtgcattgctgccgggacgcctgtttattcatttgccgctgacccgtgcgaagtggtgctgtgtatgtacggtaaagcaaccggaaacagtggaggaagcgaatgccattctgctgaacgtgctttctttaatatcgttaaaaagaataaacacggatttttacccaatcatacgctcaatgccagaaaagcctttctgggggaatgcgtcagtgctgccccggaggcggtgaataaaatcctgtccagatttggcagagtcagagggtaa

SEQ ID NO: 268812 - DNA, 399 bp, Klebsiella pneumoniae
atgatgaaggttatcactatgctgctcttttcgctggtactttccggctgttcttcccccccgccaccggttcctgttgaatgggataaaccgggccagtccgtcaataccggtttaccgcaatggcgggacaagccggtgattattccttctccggtggttaacgatacatggttattatccattcacgcacggaattataacgaaacacgctggacacctgccgtattttacgcggtcgcccactcaacgcgtattgttgttgccgcgccatcaggcgcagatttctttacggcaaaaaactggctgcgccggtatggtgcaaaaggcattattgcatatcagcctgtctctggctgcctgacatgcagcgacacccatatttatttttcgcattaa

SEQ ID NO: 268813 - DNA, 1254 bp, Klebsiella pneumoniae
atgaacgacaaacacccgcatcctgaacctgatgaatcccggtcctccctggcgcaaccggatgacgacattgccgcactggagcgcgaggcccgtgccaggcgggaagcggcgcttctcaccgcacaggaggatgaagagaacgatccggtacaacccgccgtcaacagactgaaaaagcgcaggcgcgggaaagccaccgtctttctggcgatcgccgccgttgcgctgattacgctggcgtgggcgggtaactgggtataccgcaatctgctctggcagcccggtgaggaaaagcggcaggatgccgcgccgcagccaaaccggagcgattaccggcagcgtaccgatctggggacgcacgataccggccccgcagcaccggaaccggcggacaacagcccgcgcagtacggcagtcaccgggccggagacgccgccggaactggacaaagcccgttttctgattcgccgggacagctctgccgctgcggcccgaaacccggtccggacccggcagcaggaaatgacgcagtcagtcgctgccaggcagccgtcaggaacgccatccactggcaccgatcagcagccaggcaccacgccgccacagccagaactatccccggcagcggtccggcgtatcccttacaacccggatctgtacgtgccggaaaacaccgccattccctgttcactggattaccgctttgtctcagatcgggcggggaaaatccgctgcacggtcggcagcgatatctggagcgccagcggtaacacaaagctgattgaaaaagggaccaccgccacaggcatttaccagacgggtgcggaaaccgggatgacgcacggacagggacgcgccttcctcatcatcacgaaactgcgtacccgccagcccccttatcttgatattccgctggtcgatacccacgctgccggggaactgggcgaggccggtgttgatggctggatcgactcacatttcagcgagcgattcgggggcgcattactggtcggtatgatccccgatgttgccgcatgggcttccgacagcgcgggtcagaaagatcgtaatacggactataccgaaaacagccgccaggcaatggccgatatggcgcgcaccacgctggaaaacagcatcaatatcccgccgaccgtgcacaaaaatcagggtgagatcatcaacctgatcaccggacaggatattgatttttccggcatctatacgctgaggatgaaaaatgaccgctaa

SEQ ID NO: 268814 - DNA, 903 bp, Klebsiella pneumoniae
atgaaaagtctcatccttttcgcgctcgcgctgatgtgcggcacggcatggagtgccgccatcccgcaggcgagtcgctacgatgcgcgtgttcagcaggtagtttataacccgctgaacgtcaccgtcgtcagtacccgacccggctttatgaccacgctggtctttgacagagacgaggcggttatcagcgccagaaccggttttgaggaagcgtgggaagccacgccggacgccaaccgggtcaatatacgcccggtggcgctggttcagggcgcgcccggcgcggacggcgacaccacgcaggtggtcatcccgcccaacagccgggactggcacaccaacctgctggttgtcaccacccggcgactgtacaacgtcgagttgaacgtcatcgatgataaatcaccgcagcagcccgctttccaggtgagctaccgctatccgggcgaagaccgggagaaggaccgccgtaggacagcggccagagcacaggaacgggaacaaaaacaacagcaggccgacattgagcaggccctgaataacgcgcagacaccgcgcaactgggactaccttcgctattcagggcgcgacagcgcccggattgtcccggatttcgcgtatgacgatggccgctttacgttcgtgggcttctccccggccaaatccattccctccgtgacgaaagaactgaacggccaggagcatgtggttaacagcagtatccgcaggaaaggcaacttcaccgtcctggtgattcaggaggtcacgccccgcctcgtcctgcgttccggtaacgctgtggtcggcctggaaaaccgtggtttcggcagggtccaggtcgctgatggcgccacggtttccccgcaggtcgaacgggtggaaaaacccgcaactcgctga

SEQ ID NO: 268815 - DNA, 684 bp, Klebsiella pneumoniae
atgagtgaacagaccctcattgcggattcccgcacctttgagcagcagatgattgagcgggacaaacgcgccacaaaagccgggtttatggtgggcggcgcgggcctgctcactgccatactggcgctcatcgccgtggcgctgatgttgcccctgaaacagacggtcattgaactgtacaccgtggataatcataccgggcgggtggagcacgtcacccgtgcgtcaaaaacccacctgacggcggaagccgcttatcagaaggcgatgaccgccagctacgtcagactgcgagaacggtatgtctatccctcactccaggacgattacgccacggtccagatttacaacagcccgcaggtcaacgatgactatctggcgctgtataccggtaaagacgccccggacaaggtgtaccagaacggggcgcataccgtgcggatcgacatcctgtcaaaccagcttactgatggcactgaccccgataacgtcgccaccctgcgttacaaaaagactgtccgccgcctcgcggacaacagcacccgcaccgaatactgggatgcccgcctgacgttccactccgatcccggcaaagaaatgagcgatacggagcgggagattaacccgttcggttttaccgtaaccagctggcaggcagaccgtgaaatccggggaggtgaataa

SEQ ID NO: 268816 - DNA, 138 bp, Klebsiella pneumoniae
atgaaacgcttgattgcgctggctttgctgtgcgcgctttccggctgcgcgcagtctcctcgtcctcctgcttttagcggtcagggcgttcccgtgaacacccctcagattatggcggagttaaacagtcatgagtga

SEQ ID NO: 268817 - DNA, 1065 bp, Klebsiella pneumoniae
atgagtggtggtctttttgttggcgttgagaaatatctgataggaggcgtaaccgatacaacaaaaggactgatgatgtcatattcatcgatgatgttagggctggcggcaacgtcagccaccctctatatcctgtggcgtggataccagaccctggcgggtaagctgtccacgccaatggaggatgtcatgtgggacatcataagaatggcaattatcctgtcctttgtggcaaatgctggcggttatcttgatgggattattgatgccatcaatggcttaaaggagggcttttccggtggcgataatatatggcagttactggactcattatgggataaagcaaaggtattaggcaaaacgttacatgatatggataattcaacctatataaaagatgagggtatgaccgctcagttttatgtctggctggggatattcgtattaatgattgtaacagcctttgtttcaatgattgcggagatcatgattttacttctgagtattacggctcccatatttatcttttgccttctgtatggatttttacgccccatgtttaacaactggctgcaaaatatattttcagccatattaactgtccttttttctgcattatcattacggatcacagtgaactacctaaacctggttctgaaaaaggcaactgatgtggcaaataactcagctattgtggagttaggtgcacaggtctgcctggccggtatctgcgcggcaatactggtttatctctctgcaaaactggctggcgcgctggcgggagccagcgcgaccgtgtccatgcaggggctggcagcagtgggtattggcgcggcggcgtatggtgccgggaaactggccgcaggagccgggaagcagacagtccgcgccattcaggacacgctccagggctggagagatgccagcgcgggtaaacctggcagcggtccggggtacagcgcggcgaaagcgcgtaagtatgcgattgagcagatgatcgcccgcaacgaagcccggcggctggcgcagtcaggagaagccgccgttcagaaattccatcggtaa

SEQ ID NO: 268818 - DNA, 243 bp, Klebsiella pneumoniae
atgttatcaaaaaaaatcatttcaggctcagttcttgttttatgcttctccattatcggatgtaaagaagaagcgaaaacaacacaatggtatcatgatcatcccgatgaactgaaagttgtttatgaaaaatgccagaaaaccggcgatgcttcggaaaactgtaaaaatgccaatgaagctcatgatcaaacccggcaattaaatgccccgactcctgatttaaataatctggaggagtag

SEQ ID NO: 268819 - DNA, 708 bp, Klebsiella pneumoniae
atgaaaaggcattttcatgccctgattttcgcgtgcgtgatggtaagcccgctggcgcacgccggtattcccgttctggtggatgccgatccgttgcgtgaggccgaatggctgaaagaagcgcagcgctggatgcagaccgcgcagcattatcagagccagatccaggcgtataaagagcagctggcaacggccaccggcgtccgtgatattgctgactttgttgaccaggcaaaaagcctgaaatccgaccttgagaagctgagcaagccagggcaggcactcaatgatctgctgctttccggcggttcttccgggcagttcaacgccctgtacgaaaagtataaaattttcgacacctgcaacacagaacaatccgaaagttacgccagagtctgtaagcaacaggtcatcaataaggcgattcagtttgagcagactgacgagatccaggggctggtcagccagacgctgggggaaattaacagcctctcgaaccgtattgcactttccagagacacaaaggaatctcaggaccttgccaacagtattcagctaaaatcagtgatgctgaatacactgaccaatcaatgggagatgagtgtgaaggcagcagaaaagcgcgaaaaagtgcttgatgatgagcgcattaaacactggaatcagcaacagttaaacgcgccaacagctgaccttaataatttgtga

SEQ ID NO: 268820 - DNA, 294 bp, Klebsiella pneumoniae
atgacacgtttccgcaagctaaaggcggcggtcagccccgtttctgccggtgtgctgacggttttttctgccattccggcactggccgatggttttgaacgggcaaacaccgtgatggagaaagtctccaccggcctgcatggtctggcggccatcaccatcaccgtggccgtgatctgggtgggttacaagacgctctggaaaggcgaaagcctgtcgcagtgcgcctacatcatcatcggtgggatcctgattggcgggggcagtgagatcggcgcactgctgatgagctga

SEQ ID NO: 268821 - DNA, 711 bp, Klebsiella pneumoniae
atgctttccaccactgcctttctggcggcggccatgcagtgtgccgccagcattcatccgtccaccgcactcgatgtggcacgggtggaatccggttttaatccttatgccatcgccgagatagtccccagggccagaagagcctccggtgacaatcctgttatctcccatcttcccgccagccgggccgatgctgagcgtattatccgacaccttgccatacagggccggcgttattccgtcggactgatgcaaatcaccagcaccaatttccgtcactacggcgtgacggccaccgatctgcttgatccctgcaccaacctgtctgtttttgaacgcatcctcagcgactgctaccgccggggcggcaccctggaaagggcgctgagttgttattactccggcaatttccgtaccggacaacagccggaagccacgtttttcgggacgagctatgtgcagcgaataggtttaacaccggcatctccccgctatgccgtacccggcacccgcgaggatagttccacaaccccgccgcccctggaagccatcccagccgatcccccgtcccgcccccgcgtgatctggccggggaccgtcatgcgtggcgtccctgcgaaactccgtcaggacaacatcgccatcgcaccgctctccgtgccgtcagtgcgccggagtctctctctgttaccccgtgaggaggaagaataa

SEQ ID NO: 268822 - DNA, 279 bp, Klebsiella pneumoniae
gtgatcgaaaatgttatatctcaccatttcattaaaggggacattatgagaaaacccgtttattacgcctatgtcacccaggaaactcagccggatttgcagggcgacaaaaatacgtactggacaaaagtcggtgtggccttttcccataacggtaagcccggcctgaatattgtcctgacgcccggtattgccgtctccggcaaactggtcctgcttgaaccccgggaggataacaatccgccacagagtgcggaacccggcgaaaccacgctttaa

SEQ ID NO: 268823 - DNA, 588 bp, Klebsiella pneumoniae
atgattccgtcactgaattacgctgtattaatcgataccctgtacgcgctgaaagaagggaatattcgccactgtgaagcgctgggattcactttcgacgaaatggctgccctgaatcagctgtcgcttgatgaactgttgattgtcagcagggcctcttccttctttatctcggtcaatatccgtcatgatactttgcatcatttgctggctcaggcccgcaaggaataccgacgaaaacagcaggttaaccgggcgattcatctgggtggttctattgccttgctgaatcagtactttggccttacctccaatgaagtctgccttcgccgccggttgctgggtgtcagtgtgccttatggccggacgcctgaaccggacgaagagacagatgccgctatctggcagcaatggcaacaatgccgggtagacaaccttgagtcgcctgatgcactgaccgccatgatgcaggtgaccgaaaccctgctgccgaaaaccggagggctgtcactcaccacggtctggaagcgtattgcgcaatgtgagcaggaagccactgctcgcaggagggtcccccatgccagatga

SEQ ID NO: 268824 - DNA, 927 bp, Klebsiella pneumoniae
atgagtaaggacaaattttcctcccccacaccgggtatggttccggaatggataaccatcagggaagcggcagaaatcacacatgatctggtaacaaaaagagtcactgacagtgatatttaccgccatgcactgtatggtaacattacattatcgatttattttcagtcccccgtcattttacgaaaggtcagaacatccgaagataaagtgacactcagacccgttacaaattctttaattcaccggttatgctttcttgatcgaagcagtttcattcgtcattccagcctcatggtcagtaccggtggaaaatatatattcccgagaaaccggattattgacaccccactgagtggtcatgaatccctgctgatacagcatttactggcccgttcgctgtcactcccgctaccggaagaacatcatgttaatcatggtatttctgtcattatttccggggaactatttcagctgtttgagctgacaacatggcgggagaggatcaagaaacaaatcatgcaccttcccaaaaacatcacaccggatatttatgcgcacccttcatataaggaaatgagacgatgttctcatcataccttctttcccctgtattatcttcccgctgatgcctgctttgtcatccgctgtagtgaactggataaactcatgaaacctggtggtggagaaaatatctctccggagagcccttcacgcacacggatatctaccccactttcccgactgttctggctttcctgtcggcgtaatgacactatcagtcccctgatgaatcagccctataaacttctgtccatttttgagcagtgggcatcagaggagggtattaccgatcgcctgagtggtgacacactgaaaaccgcccttgaaagaggttctcccgataagaggaactcgcgcaaataa

SEQ ID NO: 268825 - DNA, 174 bp, Klebsiella pneumoniae
atgcattatctttctttaactctgcccgtcttttcccaaagaagtcatgatatctttttccatatcctcaccataaagggcgcccttaaaattcagctaacatcatatcacttccggttttatttcgtccttaagcataaatctactgcaaaaaaacaacatttaccacaataa

SEQ ID NO: 268826 - DNA, 1269 bp, Klebsiella pneumoniae
atgttaactgacagcaaaatccgctcagccaaatccctcacaaaatcttacaaactcaccgactcgcatggcctgtacctgacggtatcaaccagcggcgctaagctatggtatttccgctatcgccttgatggtaaagaaagccgtctggcctttggcccctatccccagactacgctggcggaagcccgcgaaaagcgcgatgcagcacgtaagttgctggcatccggcgtcagcccttctcagcttcgtaaaacgaacaattccaccgttgatgaatcccgcacctttcagtatgtcgctctggcgtggcacgccagtagtcttaaactctggtcggaagcccacgccggtaaaattctcaccagcctgaaacgctacgttttccccgctattggcgcaatggacatcactcaggttgaaacccgacacctggcgcagttggttaagaccattgacgataaaggcgtgcatgacgtcgccggacgggcgcgccagcatctgaccaaaatcatgcgccacgccgtacagcagggcgtcatcaaatataatccggcttacgatttagatggcgtcgtggccccggtagcgaatcaacatcatcccgccctgccgctgaaacgcctgcctgaactgctggcgaagattgagaactacaaaggccgggtgctgacccgtctggcgctggaacttaatctgcatgtctttctgcgctccagcgagctacggcttgcccgctgggacgagttcaacctgaaagcacatatctggaccgtacctgcccagcgtgaggccataaacggtgtgaggttctcagagcgtggcgcaaagatgaaggatgaacacctggtgccactgtcacgacaggtggtggctctgctgaaacaaattcaggcgatttccggcgaatcggtcttcgtttttccgggcgcacataccctgaacaagccgatgagtgagaacaccatcaacaaagcgctgcgtgtgattggctatgacaccaaaacagaagtctgtggccacggtttcagaaccatggcctgtagcgccctgaacgagtccggacgctggccaaaggatgccattgagcgacagatgagtcacaaagagcgaaacggtgtgcgggctgcctatgtgcacaaagcagagcatctggaagcccggatcgaaatgatgcagtggtggtcggactatctggatacctgtcgggagaggtatgtgccgtcgtatatttatgcccggcagcataaggtttcagcaggcagctaa

SEQ ID NO: 268827 - DNA, 498 bp, Klebsiella pneumoniae
atgaaaaaatgtgttgtattgaacatggcgattttatctgctatgcccctggcaggctgtgtttcacctccccaggcaccgacggtaatggttctgcccgggagcgacaaaacatatgaaagctttcaacatgacgatgtgatatgccgaaatgcggcctcccgcgggatgggcgacgaagcgaataatgccaataataatggcatcgcgacggcggcggcaggcacggcaattggcgccgcagctggagctcttattggcagtgccgcggggccccgaggtgccgcggggggggtagccgttggcgcggcaagtggattattggtcggtagcgctgtagccggtaataatagcggtggtacccgcagctcattgcaggatcagtataatgtcacctatgtgcagtgtatgtacgcgaaagggaataagatcccgcaggcatatgtctgggacgagcaggaaaacgcggaggatgtgccgcccgattatcattcatag

SEQ ID NO: 268828 - DNA, 726 bp, Klebsiella pneumoniae
atgacgaagctacccgttgacgaaaatgctccacctgttttgattgtggaggatgaattaaaactggggcaactcctcagcgattatttgctggaggcgggatttgccccaacgttgattcataggggcgatatggtgctcccctatgtccttgatactccccctcacctgattctgcttgacctgatgttgcccggtatggatggtctgtcgctttgtcgggaaattcgtcgcatttccgaggtcccgatcatcatggttacagccagaactgaggaaatcgatcggctgctggggctggagcttggtgcagatgattacatcactaaaccatacagcccacgtgaggtggtctcgcgagtcaaagctatcctgcggcgcagtaaaccctcatgcgaacgacagatgctacccaataccaacagtccgttgctcatcgatgaagaacgttttcaggcatcatggcagaatatacaactggatctgactgccgcagaattccgcctgctgaaaacgctctctcagggagccggaaaagtcttttcacgcgagcaactgttgaatcatctttacgatgattatcgcgcggtaaccgatcgtacgatcgatagccatatcaaaaacctgcgccgtaaactacagatgctggatgccagtaggacatttatccgcgcagtatacggcgttggttaccgctgggaagccgatggttgccatcttgtgtaa

SEQ ID NO: 268829 - DNA, 1335 bp, Klebsiella pneumoniae
atgaaaatgtcgttatcaatgacttcggtcatctgtctattattgcttagcggttgcaccgtaggcccggattatcagcgcccgacgatgacgatgccgttgcattataaagaagcccgcggctggcgccaggcggcgccgcaggatagcgtcggcaaaggcgagtggtgggcggtctatcgcgacccgcagcttgacagcctgctgcgccaggtcagcatctccaaccagaacgtggccaattataccgccctgtatcgccaggctcaggcgctggcggcggggtcgcgcgccgacctcttcccgacgctcggttatgacgccagttcgacccgtagcggcagccgcagcagcgggcaacgcaccaccggcaatacccaccaggcagagctgagcgccagctgggaactggatttgtggggcaaactgcgccgcactctcgaagagaaccgcgccagcgccgaggccagcgccgccgagcttgccaacatcaccctcagcgcgcagtccgaactggcgcaggactattttcaactgcgggtgatggatgaacagatcgccctgtatcagcgcagcgtcgccgcttatgaaggctatctgcgggtgataaacaataaatatcaggcgggcagcgaatcgcgggctacgctggcgcaggcgcagatgcagctggagcatgccatcgcgctgctgatcggcagggcgccggcgcagttcagtctgccggcggcgaagctgaccgcgacgctgccggcgatcccacaggcgctgccggcccagctactgcaacggcgcccggacattgccgaagcggaacgcaatgtggcagcggcaaacgccgcggtgggcgtggcgatcgccggttactacccggatctgaccttaagcgccagcggcggcgtcagctcctcggcgttgcacaatttactgtcgttgccgaatcgcgtctggtccctcggtccgtcactaagcggcactgtgctggactttggcgccacctcggcggaagtcgaacaggcccgcgccgcctatgacgcgaaggtggccagctaccggcaaacggtgctggaagcgttgcaggaggtggaaaattatcttgtcgagctgaacaccctgcagggcgaggtcgcctcacagcagcgggccaccgtcgccgcgcaggagtcagcgcggatcacccgtaatcagtatgacgcgggaatgattgattatcttgatgtcgccaccaccgagaacagcagactgagcgaacaacaaaatttattggctctgcaaagcacccaatgggtcgccagcgttaagctgatcgtcgcgctgggcggctcctggggttaa

SEQ ID NO: 268830 - DNA, 1152 bp, Klebsiella pneumoniae
atggcggcgcaggatctacacatcggcgggcgcagcgcaaacgccagctatcagtatagcctgcaggccgacgatctcggtctgctgcgcacctggacgccgaaagtccaggcggcgctggcggcgattccgcagctcaatagcgtggactccgattcgcaaaccgggggacaggaggtggttatccagatcgatcgcgaccgcgccacccgcctcggcgttaacgtcaacatgcttgacaccatgctgaacaacgctttcagccaacgacagatcgccaccctgtatcaccccctcaaccagtaccatgtggtgatgacccttgcggatagctacacccgcgatccggcgatattgcaggagctgtatgtcgtcaacgacgatggcgaccgggtaccgctttcggcattctccagctttgtcggcggcaatgccccgctctcggtggcgcaccaggggcagtcggccaccagcacggtggcgtttaaccttaacgacggcgtatcgctggagcaggcgcaggcgttgattaaaaatgcgatggccaaaattggcctgccttcctcagtgcaggccgggtttcagggcacagcgaaagcctatgaggagctgacggcgaccatgccgtggctgatcgtcgcggcgctggcggcgatttatatcgtgttgggggtgctgtatgaaagctatgtccacccgctgacgatcctgtcgacgctgccctcggcgggcgtcggcgccctgttgctattgctgttgaccaatacccagcttacggtgatcgcgctgatcggcattatcctgctgatcggcatcgtcaagaaaaacgccatcatgatgattgatttcgcccttgatgcggaaaggcggctgggaatgacaccgcagcaagcgatcatgcaggcctgcctgattcgtttccggccgatcatgatgaccaccctcgccgccttctttggcgccttgcccctcgctttaagcagcggcggcgatgccgatttacgcagcccactggggctggcgatcgccggcggtctggccctcagccagctgctcaccctgttcaccacgccggtagtttatctctggctcgatagacttagtcgcgcgacccgccgtcagtggcagcgcttacgccatgcaggatcctga

SEQ ID NO: 268831 - DNA, 720 bp, Klebsiella pneumoniae
gtgagcttcaccgtcctgtcgatgaccgtctcgctggtggcggtgtttattccgatcctgctgatgggcggtattgtcgggcgcctgttccgcgaattcgccatcacgcttagcgtgtcgttattgatctccatgtttgtctccctgagcctgacgccgatgctctgttcgcggctgctgaagaaaaaaccgccggtccgccagcggcggcatccgctttatcaacgcatcgagaatcagcttaaccacctgctgagcggctattcgcgcggactgaactgggtgatggggcatcagaaactggtgatgctgagcctgatgctgaccgtgatgctgaacatttttctctatagcgtggtgcaaaaagggttcttccccaatcaggataccggtctgctgatgggggcgctgcgcgccgatcagaatatctccttccaggcgatggcgcccaaagtgcaggcattcaccaaaatcatcgaagccgatccggcggtggatagcgtgatgtcgtcgatgggcagcggcatgttcggttcgcgcaacagcgccaacttcttcgtccggctgaaggatctcagcgagcgaagcgccaccgcaaccgaagtcgccaaccggctgaggcatgaaaaccagccatttccccggggggcagatgttcctgatggcggcgcaggatctacacatcggcgggcgcagcgcaaacgccagctatcagtatag

SEQ ID NO: 268832 - DNA, 450 bp, Klebsiella pneumoniae
atgatcggcattatgcgccaggccggcgccaatatgctggaaaccatcgatgcgattaaagcgcagctgccggcgctggagaaaaacctgcccgccgatacccagcttaaagtggtggtggaccgttcaactacggtacgcgaatcgctgtacgacaccgaagagactctgctgatcgcggtcctgctggtgatcgccgtggttttcgtgttcctgcgcaacgtgcaggcggtggtgatcccggcgctggcattgccggtatcgctgatcggcacctgcgcggtgatgtacctcctcggctatagcctggataacctgtcgctgatggcgctgattatttccaccggctttgtcgtcgatgacgccatcgtcgtgctggagaatatcgcccgtcatatcgaagaggggctcagtccgctgcgcgccgcgctgcgggggggcgcgaggtga

SEQ ID NO: 268833 - DNA, 300 bp, Klebsiella pneumoniae
atgacaaagccagcatcaaccacaaagaagacgcgtaagcagcacacgcctgaattccgcaatgaagcccttagactcgctgagcgtatcggcgtggccgcagccgcccgcgagctcagcctgtatgaatcgcagctctacaactggcgcagtaaacaacagcagcaaatgacatcctcagaacgggagaacgaactggctgctgaaaatgcccgcctcaaacggcaactggctgagcaggcagaggagctggccattatccaaaaggcagcgacatacttcgcgaagcgcctgaaatga

SEQ ID NO: 268834 - DNA, 867 bp, Klebsiella pneumoniae
atgaagtatgtcttcatcgaaaagcatcaggctgagttcagcgtcaaagccatgtgccgcgtcctccgggtggcccgaagcggctggtatgcgtggctcaaacgtcgccatcaacccggtccacgccagcagttccggctcatcagtgatgctgctgtcagtcaggcattcgctgaggccaaacagcgctacggtgcgccgcgcctggcagatgaactccgggagcagggtctgacgtataacattaaaaccatcgcatccagcctgcgccgtcaggggttgcgggcgagagccgcacgccggttcagcccggtcagctaccgtgagcacggtctaccggtgtcagagaacctgctgaagcaggacttcagcgccagcggtccaaaccagaaatggtgcggtgacatcacttacctgcgcactgatgaaggctggctgtatcttgctgtggtcattgacctgtggtcacgggcagttatcggctggtcaatgtcgtcacggatgacagcacagcttgcctgcgatgcgctgcagatggctctctggcgtcgtaaacggccgcagaatgttatcgttcataccgaccgaggaggacagtattgctcagcggattatcaggcattgctcaaacgatatcatctgcgcggcagcatgagcggccgtggcaactgctatgacaacgcctgcgcagagagcttcttccattcaatgaaagtggaatgtgtccacggagaacgttttgccagccgggaaataatgcggacaacggtgtttaattatatcgagtgtgattacaatcgctggcgtcgccacagtacctgcggcggcctcagcccggaacagttcgaaaaccagaccctcgcttag

SEQ ID NO: 268835 - DNA, 411 bp, Klebsiella pneumoniae
atgcctgataaagacgagatcactaaaaaattatctaaggctctggatattatcactttgaaataccctcaaagaaccgcttttggcgtgcttctgggttttgtattaatggtactcatgcacacagcaagatttgctcttattgcaaagggaatttttattgactggatgcactatgtattctgtgaagtattaggcgtgttggctatgaattctaagtctttatatgaggcatttaatggaaccgctcttgatgaaagagttgggaatttaatgaatcatattgatacaagaacagacttgtctaagcatcaaaaagagttattgatcctggaaattcttagaaaagagattgattctttgtccgatcagcaggtagggcaggtaggtaaaaacgtagttgataaataa

SEQ ID NO: 268836 - DNA, 735 bp, Klebsiella pneumoniae
atgaataataaatttatttacattgttattgctgtaatcgcaacgactttaatttcggtgcttatttttatatcaaactttactgatatctcattatcaactatagcgagcggtttttcatcaatgactgctattgcagctgggggggccgccttaaaatctttaaaacaaattcatagtctgcaaaaggaaattctcaatacatccctagggagatacgtaaaggagattttggagcgagcagacaatattaataaaacaaatttgcggttgttaagcatcttcttatttcctattctggaatttatcggattagattcaaataaaaaaaacgaggataaaaaagataatgtcaatacaaaacagaaaaccgttgttgatttattccttttgaatgaaaagaaaaaattactacaaggaaaagttattggacttatcctttttgtattcgctgtaggtttcaatttttatacaggttcttctttgtggtttattcttccagggatgttactgtttgtgatatatgagattaaagaccaagtcgtcacttatagagtaaagaaaggattcttcggtcgagatagagacgaggcatgccagctactaaagttcattcatgaaaatatagatgacttgaataatgacggcaatggtggatcacgtaaaatatggaacgagaaagaaagagaattgaaggaatacattaatggatgggtaggtgagcaaaatgcctga

SEQ ID NO: 268837 - DNA, 891 bp, Klebsiella pneumoniae
atgagtaatccaattaaaaacacgactaaacatcatagttttgacttagagcttatagataaagtaggcccttggctaaaaggcatgggcatcaaatatgatgtaacaagattcggcaccacagccaaattatacaaaaagtggcttgagggtggccccacacctacatttcgcgagttatggggcatagctgaatttatagatctaatagaattatataattcctttcactcatcagacgaaaatatagaagatctgtttcattctatcaaagctggcagtaatactctcgaaaaatcacaaaactgctctgcacgagactacgcttttgagttgaaaatcgcatctagatttaaaagagcaggatttaatgtaatcaatgataagtctcatgatgtagtagttgaaaaagatgatataaaattatttcttgaatgtaaaagacctcgaaaagaagagacaattatcagactcatccgttatgcatatgataagcaatttaaagatattgaaaacagatctgagaaagcaataatttgtattgacctaagcaatgttctatacaatgtattcacaaaatcatttgaagaaaagggttctgaagaaattattacaaattggaaagttttagaaaaatatagagatgatactgacagatattttaaaaaattgttggaaagtaaagctccggacatagcacatggagtgagaatggtaatccttttttattccttccctgtttttgttgaagaaccagttggaagcgggatagtacgctttgtaaaatttaaccatttcacacgcataactaaccacgctgatgagattgatagaatcatctccaaggcattagtacacagcactggccttcaactaggggaaggggtttaa

SEQ ID NO: 268838 - DNA, 627 bp, Klebsiella pneumoniae
atgtcaattcaaaaaatcacaaaacgccatataccccaaaaactgcgaaacgagatcatgcagaataaaggcgggcaaccggtcattgagcgtatcctgaaagcttacgggttcactactcgccaggcgctctgtaatcaccttgggatatctcaaagcactatggctaacaggtacgcccggaacacgtttccttcggattggacagtgatttgtagccttgaaacaggcgcttctctcttatggctagctaccggtgatggcgtgatgtttgaggatgaggatgaagctgaggtggccactaagacgctcagacacttaacaatcacaaatggggttataacttcacaaaatgaagttgtttatgacagcagcctaatcccatcaggcctatcagctccttttttagtgacctttgaaaactcagtttatttagtagataaccatgacggtgaaataaatgatgggtggtggctgatcgaaattgacggtttaaccagtattagagaggttttcaggttccctggtgggcgcatacgcattgagaatgggcgggcatcctttgaatgccaatctcaggaaattaaagtgctcggcaaagtgctttcacatacacagagcttgtaa

SEQ ID NO: 268839 - DNA, 351 bp, Klebsiella pneumoniae
atggctggtaaagaacaacaatggctgctcacccatgacagccacgaacttaaaaagggcgaagtttacaaaggtgaaactctcccgctttggctggttggtaaggcaatccccgtgggagatcaggtgctggaggtagcgaccccggccgatctgcaaaagctgcaggctgacctcgacgaggctaacggcaaagtagaatcgctaaccgctggtaatgccaagctgcaggctgaactcgacgaggctaacggcaaagtagaatcgctaaccgctggtaatgccaagctgcaggctgaactcgacgaggctcagaaacaaatcgacgagctgaagaaaaaggcgaaataa

SEQ ID NO: 268840 - DNA, 258 bp, Klebsiella pneumoniae
atgaatgcgacctgtgagcgatttaaccggacacttagagaacaatttattgaattcaatgaattgttgctttttgaggacctgaatttgtttaatcaaagaatggctgaatatctggtgctgtataacagcaaaaggccacataaatcactcgaactgatgacgccagtggactatattttacgtgagagtaaaaattgcaatatgtggtggacccatacaggggctttacagcctctgcggaaggtggaagaatga

SEQ ID NO: 268841 - DNA, 477 bp, Klebsiella pneumoniae
atgcacgcacaaacaacaaaaactaaacgattcgaaaacctattaaactggtgccaggggcaggtgagagagatgggattcatccttgaggatgcctatctgagcgaagaagaaaaaatctcagcacttgaggaacttctggataactccacctcatacaacactctgcaatctgtcctacaaacctatcacgataattacgccatccctatgctgaagatattgaacgaaacacagcgcgacagaacgcctgagagccttatggcggcgattaacgcgcaaaacctggcacaggcaatgctggagcatgttggcgacgtagcgagccgtatagccagcctggaacactccacactaacgcaggaggaggctgacgttatttctgaggaaatctccgatgccctgctgctgctattgtcgtgtatcgaggaaacctgcgaaatggcgctcgaactggcacctaacaacaaccactag

SEQ ID NO: 268842 - DNA, 411 bp, Klebsiella pneumoniae
atgatgagcagaaaagaacgaaacgtactggcccgtattgaacgacaatccaatactctcccccccgctaaatcgctagccagccgcagagagtttcgagagctatctcgcctctccagagaatataacgccacccctggcgaatacaaaacagaaatcatcgaacatgatagccctccattatcagaggaagaggaaggtattattaacgacattctctcctcctgtgatggtggtgtgtatttcaatcctcgtaaacgaaaagaatacatcatcgatagttcagatttgaagaagtggcaggttatgggatttgaatgctataccagctttaccggatacctcagcgtcaacgggcttaataacctagtcaaagacttcgacgcagtatacggcgataaggaagaataa

SEQ ID NO: 268843 - DNA, 159 bp, Klebsiella pneumoniae
atgagaaagacaacagatgccctaatcagggatttaaaccataaccgctgcctacttgatcgcatgaagcgtgagggaatggataaggttagcgatacggtcattgtggaacgagcgatgatagcaatcattgccgaagtttatatccgaggaaattga

SEQ ID NO: 268844 - DNA, 645 bp, Klebsiella pneumoniae
atgttcagatattttattttgcgtattgagcagcaattattctgttatttgtacgggggcatgctggcgctgtttctgatactcctgtctccgtcttttttcacaggaggggggctgcttctggtgatgctgtcagttgcgttgttctggggcggtctgtccctctatacgcggcatactgaccggatgagaaagcctgacgtttctccactcgtcagtgtccgggatggtatccaggttgtggccatgctgccgcggcatgagaaagcgcggattgaatgggacattctgcaggacgacgaggtataccgccggcagatccaggagttgattaacctgacggtgcgggttgtcagtcgggggattatttatgcacctgcggtgatactggcaggtgtgggggggcttgcctggggatttccgcaggacgctgcccggttgttcaccgctctgcgggagataccggtcacagaccttgtgcatcagaccggttttgtcctgcgctacgttctgctgatttccgccatatcggttctgattgctgatctggtcgccggtcagggactgccaaatgccttccggcgggcgttactggatcgaatgccggctgcggcctggtgcatcagaagagggacagagcgatga

SEQ ID NO: 268845 - DNA, 240 bp, Klebsiella pneumoniae; identical to SEQ ID NO: 130256

SEQ ID NO: 268846 - DNA, 174 bp, Klebsiella pneumoniae
atgctgccggccggcatgaacgaggacggtgtcatcgaggatatgcaggcgtatgacgcctggctggcagatgagcagacacagcgggatatgcagcggcgtgaggaagtcaatatcaaccacagccaccgccacgatgagcaggatgatgtcgagattggggggaacttctga

SEQ ID NO: 268847 - DNA, 171 bp, Klebsiella pneumoniae
atgcttccggccggcatgaacgaggacggtgtgattgaagatatgcaggcgtatgacgcctgggcagatgagcagacacagcgggatatgcagcggcgtgaagaggtcaatatcaaccacagccaccgccacgatgaacaggatgatgtcgagattggggggaacttctga

SEQ ID NO: 268848 - DNA, 180 bp, Klebsiella pneumoniae; identical to SEQ ID NO: 97072

SEQ ID NO: 268849 - DNA, 786 bp, Klebsiella pneumoniae
atggctaaagactcaaagcttgtatacggcgccaacggcaaaaccaacgttctgatgttcgaaccggaaaagctgcatcttgttaccgacaaaacccatcttctctacgatgaacgtatcaacctgccgatcgacgaagggatggtactgaacatcaaggagctgggtgtactggagcctatcatcgtctggaaagacccagaaacagggctcacctgcgtagttgcaggccgtcagcgcgttaagcatacgctggaggcaaataagctccttttgaaagagggtaaagccccacggcttgttcctggagtcgttaagcgcggttcagcaaatcagatggctaaatacatggtcagcgaaaacgaaattcgacgacctgatacaccgcttggccgggctaaaaaaatgtcagacgcgctcgaccgtgggctcgatgaggacgacattgcggtgttgtttggctgcagcgttcagaccgtgcgtgcaacactatccctgttggatgccacacaagccgtccgggaagcggtggaggctggaactgtcaccgttacccaggcgcgtcagcttggtgccctcccacctgaagaacagcggacaaaagtggcagaaatcgagctggcgacagctggtaccaaaggccacgaaaaagcccgtcggcaacgtcagatactcggtgaagcaaagccgcgtatcaaatcacgcaaggaaattgcaaaagccctcgaagatgcaagcggtgaatatgccgaggctctgcgctgggtgctcggggaggcgcaatga

SEQ ID NO: 268850 - DNA, 135 bp, Klebsiella pneumoniae
atgaattttgaacctgagaattacagcaaatacaccctgcgtcggtttgccgccattttggatgtgatctgctgggtgctgattgccgtagtaactgttggtatctgcatgtttattgaatggtggacagcatga

SEQ ID NO: 268851 - DNA, 270 bp, Klebsiella pneumoniae; identical to SEQ ID NO: 223340

SEQ ID NO: 268852 - DNA, 2331 bp, Klebsiella pneumoniae
atgatgaatgattcgctctgccgcattattgcgggtgaacttcaggccagagccgaacaggtagaagctgccgttcgcctgcttgatgaagggaacaccgtgccgtttattgcacgttatcgtaaagaagtcaccggcggtctggatgacacgcagctgcgtaatctggaaactcgcctcggctatctgcgcgaactcgaagaccgtcgtcaggcgatcctcaaatccatcgctgaacagggcaaactgaccgacgcgctggaaaaagccatcaacaccacgctcagcaaaaccgaactggaagatctctacctgccgtacaagccgaagcgccgtacacgcgggcagatcgctatcgaagccgggctcgaaccgctggctgacctgctgtggaacgaaccggcccacgatccggaagcggaggccgcaaaatatattgatgccgataagggcgtagccgacagcaaagcggccctggacggcgcgcgctatattctgatggagcggtttgccgaagacgccgcgctgctggcgaaggtccgtgactatctgtggaaaaacgcccacctggtctccaccgtcgtcagcggtaaagaagaggaaggtgctaaattccgcgactacttcgatcaccatgaaccgatcgccaccgtgccgtcgcatcgcgcgctggcgatgttccgcggtcgcaacgaaggcgtcctgcagctctctttaaacgctgacccgcagtttgacgagccgccgaaagagagccacggcgagcaaattattatcgaccacctgggcctgcgcctgaataacgccccggcggacagctggcgtaaaggcgtcgtcagctggacctggcggatcaaagtcctgatgcatctcgaaaccgagctgatgggcaccgtgcgcgaacgcgcggaggacgaggcaatcaacgtcttcgcccgcaacctgcacgatctgctgatggccgcgcccgccgggctgcgcgccaccatgggactcgatccgggcctgcgcaccggggtgaaagtggccgtcgtcgacgccaccggtaaactggtcgccaccgataccatctatccccacaccggccaggccgccaaagcggccgtcgccgtcgccgcgctgtgtgagaagtacaacgttgagctggtggccatcggcaacggtaccgcctcgcgtgaaaccgagcgtttcttcctcgacgtgcagaagcagttcccgaaggtcaccgcccagaaggtgatcgtcagcgaagccggggcttccgtttactccgcctccgagctggcggcgcaggagtttccggacctcgacgtgtcgctgcgcggcgcggtctccatcgcccgccgtctgcaggatcccctggccgagctggtgaaaatcgacccgaaatccattggcgtcggccagtatcagcacgacgtcagccagacccagctggcgcgtaagctggacgcggtggtggaagactgtgtgaacgccgtcggcgttgacctgaacaccgcctccgttccgctgctgacccgcgtcgccggcctgacccgcatgatggcgcagaacatcgtcgcctggcgcgacgagaatggtcagttccagaaccgccagcagctgctgaaagtcagccgtctggggccgaaagcctttgaacagtgcgcgggcttcctgcgtatcaaccacggcgacaacccgctggatgcctccaccgttcacccggaagcttacccggtggtcgaacgtattctggccgccacccagcaggcgctaaaagatctgatgggcaatagcagtgcgctgcgccacctgaaggcagtggacttcaccgatgagaagtttggcgtcccgacggtcaccgacattatcaaagagctggaaaaaccgggccgcgatccgcgtccggagtttaagaccgcgaagttcgccgatggtgtggagaccatgaatgacctgctgccgggaatgattctggaaggtgccgtcaccaacgtcaccaacttcggcgcgtttgttgatatcggcgttcatcaggacggactggtacacatttcgtcgctttctgaccggtttgttgaggatccgcacaccgtggtgaaagcgggcgacatcgtcaaggtcaaagtgatggaagtcgatctgccgcgtaagcgtatcgccctgaccatgcgtctcgacgagcagccgggcgacagcaacgcccgccgcggcggtggtcaggagcgcccgcagggaaatcgcccggccgcgaaagccgccaaaccccgcggtcgcgaggcgcagcctgccggcaacagcgcgatgatggatgccctcgccgcagcgatgggtaaaaaacgctaa

SEQ ID NO: 268853 - DNA, 711 bp, Klebsiella pneumoniae
gtgatactgcgtaaatcagccttccagagcaagggcctctcactggctggcctgtcaggagatataagctgtaatagctcagttatggataataaatttctctctttttattttggagtgaaacgggatcctaccgtagcaggttttgccccatcgactttagcgaccagtacgcgcacgcgcgaaggtgagttttgcgagtccataaaaaagggcttgccgactatcgccaacccggtttatggttatagcgcacctgcaaaatcaggcgccgggatttgcaccccgaacacactcagggcgacacagacgccgaaagcgtctttttttgtgtccagtcactacgcacatcaaatcagcggcctcgtccgtactgtatctatggtggcgttagtggggctacgttcgcgtaggccggtttcctttgtgtccggtagtgcaaaccctgctaacgtcaccgccaatcatgacatttgcacgtcaggcggtgactccttaaacacaaaggaggctgccataatggctactacccctacccaaaatccgcaatttatctggattatcgccgctgttcgccgcgatatgccgacaattaccgcaaaaattcaccatatcgccgcagagactgagcaggaagcccgccgcactctggcgcgggatcacgtctgtttctttgcgggccgtatccgtcaggaggtggctcatgcgtaa

SEQ ID NO: 268854 - DNA, 174 bp, Klebsiella pneumoniae
gtggaaagagatgaatatatttcaccgaaatggggtaccggaagtaaggttcacaactggctgaattatgccgaacctgaactgattgctatctgggacacattcagcgatgagcaaaagagagttatcgcactgaccctggatgaagccgccggtaaggaagagtgggattaa

SEQ ID NO: 268855 - DNA, 750 bp, Klebsiella pneumoniae
atgggtattactcttttcactaataatgcgttttcgtctgtttcagaccctgacgaatattcgccaggttttgatgtgacgtcccttcgtcgcgccgaaatattcacttatacggggattggtaaaaaccttatgccaggtgagggcggccccactgtagttggatcaccgacgtttatcaccgattcgccatttgtcgaattctcaaataacgcgaacgtggcacatttgaacctgggcattaaagatactgaccaacaaacgtggtttttactctttgacccgaataatgactcgacgcaacgaatgatcgcagggagtttttctggaataactgcatctgcacctcctggggtatctgtgattgtagatgaatcgggagcgctctcatttacacagggtgtgcactacacggacactgatacttacggaaccatgcgcgcaatcctgagcttgttcaacaaaacgaagccgatgcttctttgctttacccttgacgggcagaccaccaggctgaccgacatgaccaacaatgtttcagcgtctcttaccctggcagaatcccgtggtcgcgccccggccaccattcgcgtgggtaaggggggcgctacctggggttctcaatccgcggtcagccgcatcggggcttatatggttttcgatcgcgtattatctgatgctgagaaaagtacggttcacgattatctactgagctgcattcaggctaaattcccgacaataattttttag

SEQ ID NO: 268856 - DNA, 735 bp, Klebsiella pneumoniae
atggacgctatctttgacagagtcgtaagggaattttttccaaatacaaccatacctttttggaaaaaatggctgttcaggacggcatttggcaataaggtattttctcgcttaatatataacgagcgactcgttaataaaaatggggtcgagtgggttaatgcagttgttgaactccttgagttgaaatgtgaaagcgaacaccaccaatttaacaacatacctgagcatggggctacggttgttatttcaaatcatccgacggttatcgatggacttagcttaatacatacggtctcccgagtcaggagtgatataaaaataatagctaatcacgttttgccaattatattcccccaggtatcggaacttaccattggaattgagaatatggccggtaagatgagccataaaaaattccgcgagatgaacgatcacctgcgaaaaggaggcgtattgattatatgtcctgcgggtaagctagctaactggtctctttccgggttacaggagcataagtggaaccccggttttttacagcttgctatgagaaataatgcagcattggtaccaattcatattacgggagcaaacagtaagatttattatcttactgcaacattctggcggcaactgtcgaacatgatggttattcgtgaagctctccgccatcatggcaagaccatgaaaatcaatataggacagcaaatagccttatcctcgtttaaagaataa

SEQ ID NO: 268857 - DNA, 2205 bp, Klebsiella pneumoniae
atgccaatggaatcacctgaaattcagctcaaggctctgaataatgctttgcgacgtttacgtggggcttgttccgcacttgacggtgaggagcttgatgaaaagttacttgaggtcatgcgacgactgctgcttgctgaggtgctcgccgatacctggattgtggcgataggtggctcgcagggggcaggtaaaacgacgctgatggcgagcctgtataacctacatcatgacaatagcagctggttacgcagtaatgaaggacgcggcgagaaaatgccgatactgatcctcgagagtaatgagactaaagtagcacagggttgtgtccgtcgcctagtcgaaactggaaatggtttgacgctggaggatgtcagcgtcgatgtcaacgtgtttcagcgcgtggtctgcgatcctgatgctggggatttactgccgatactgaaagtaccgcagcgttattttacccgaaataaccaggcctggttactgctgcctggctatgaaaaacaagagcgcgaaaatcgtgaatggcaggaactgatgcgtcaggcgatgatagcggcaggcggttgtataatcgtgaccgatgagacgcgactggcaaaccagcagcagctcgaaatcgtcaaagatatgttggaaaaagagcttaagaattgtaaaccttatattgttatctccaagacagaagcgtatcgccacaatccgcaacgtcaagctgaattaagaaaaagcgcggctgaaaccttcaatgtcgctgccgaatataaggataacaacattattttaaccggcaccgacgatccggaatacgtaacagaatggatgccgcaccttcgccgggccattgacgaccttaacttttccggacaaaccaaccgttatctccagttaacccaccttactggaattgttagtaaggatctgccgcgcgtcatgaatatgctccgcacccagtcgcgtctgtattaccacagtgacaaaggcggccaggacgatggcagtcaggtgctggccgaagctctggaagtatttgacactgctgtgcaggaactgcgggatgagcataccaaaaaggtaaaaatgtgcatcgctaaaacttttgaggcggcgaaggctaatatggaccgcaggctggtcaaggagcatgagggatttgccaactggatatcgaatgcatttgataccaccagtgagacaaaaggcaaattgcagcaactggttcaggattcatggcaggacgcatcagctgatttcttcgacgactatgtgaacagtctgcaacaattgacggcggcgaaactcaagcccattccaaacggcaacgatcgcccaaacttgcctgcatcaccgaagctggagaagctggtagcacttggctatatgaatagcgccgggcagcccgtacaacacgaacagttggatgcggaaaaaataagtaatatcaaaatgttgctaaatcatggtgccgcgtcgaatgcggaaaaaaccccagtggtgaataaacagttgaggaaaagcgtggaattgatcccggtgatctcgctagagtatacccgtcttgtgtacgccatgcctgagatttgcaaagagctgcggccttacgtcacgcttgagcaggacgatggcgagacatccgcgggtaacgtcgcggcagaaggggttcaaactctcaacgcaggggttgatcttggcaagaccgcaataaaatcactggcggcggtgctggcgattgacgttgtcagcgacggcgattccgatatcctcggcgcgctctttggccaggatcagccttctgctgacccgacaggttcacctcttccccccgcaccggtgatgatgcatcctgctgccgttgcggtaaccgccgttgtggcggcggcctacgtgaccgcggctgcagtaacgcgaatgcgtacttttgagaaaaaagcgagcagccaggcacacgtcatgcttgccagtgttcatgaccaccatattgagcatttacgcaatcagttcgatgacacgatgagcgcggcacgtaagcggattagcgaaacgttacgtgcgcgttatcacatggacgaaatgctgatgcgcaaggatcggctcgcgaaagccatcgccgatgtgaattcccttatcgacgacctgcgcactgagctggggtcatcagctatgggcctgcaagtattaatcaccagccgtggtgagtga

SEQ ID NO: 268858 - DNA, 1932 bp, Klebsiella pneumoniae
atgacgtccgggaaagttcttgattattggcagcggttagagtcacggcagtcggagtgggcttttcgcgcctacgatcggctgattaagacattaagtcatgacgttcaggaaaggatacaatttaaggaaagcgatgccgaaccgtacgtggtcatatttggcaagacgcaggtcggcaaaaccaccctactgctcgacctgatggatatcgatctgcagcagatggcaaccctatcgcacgtgctgcgcggcggacgggaagccggaaaatcatccaccgccaccgccatggaatatcgtcgttcaacggaccagcgctggggattgtttgtgcaatcgaaaacgcactggtttgcctctgacgacgatatgacagaggccttagcgcagctaagaaagcagatggaacgaggtgaactggttgttgattctccctgtattgtgcatattccgtggcgttttttcatgataaaaacctcgggagcgcccggcgtgcgtattctggatctgcctggtgataatcccgccaatatggaagagcaaaagcatgtaaatcagatggcgaagacctatcttcctttcgctgatttggtcctactgattgggcgtggcgacgatttgagcttcctgcagccacaggttatcaccctgccgggtattgaggactggcaggcgatgccgcatcggtttcgtatcgtgacgacctattcttactcagcgcagtcggtgaagacgctgattcgcaacgatccggctttcgatatcgcgcagttacgtcagcgccttattgaacagattgaacgctttagcaacctgagcgacgcggcgaaagatcggaacctctactttccgctcgagtttggcagcagttggctgagtatggccgaaaacgataccgccctttatgcccgggttgcccccatggtaagccgcttgcgtagtgaactgttggaacaaattgccacatcgacaagccccctcggacggctgcgaagtaccctggatacccacctcagcgttaaatatatccaggaggaaaaaacggcggcaatcgaaaaagaactgctggggctaaaaaaacagcaacaagagacaaaagataaactgacggtttggaaaaacgctattactcagacacagcagaaattaaaaaaaacggagcggttattaaaagataacgctttacctgtcagtcgacggcttatcgataaagctgcggaagaggccgcaaagtttaaattgaagggaagttacagcagcgaaaaatgttccactttacatagtatgatcgccgactattgctttaagattaaggatatccagctggatgtgaaaaataagacggtctactggcaaaaagtggcccgcaacaaagttgaacctacgagacaggcgattcaggatattcttgatgaaaaattcagtgctattcgctataggctcaatgactattggatcgacacctatcttagttctgcgaattatttatcggataaaaacagcgtcatccatgccgctgataatgccaaaatggaagtcattcggctgtggacttcacaatggatggctgccgcagagaacgtccataatcaatacaaaagcgaactcaccaaagagggggtaattctcgaggagttgcgggtagagcagaataaatcactgcagaaacaggtatcacttaagcaacaggccgtatcgtgcgaagacgagttaaagaaaattgccgttgaatcacaagaggatcttgtccgctgcgagcagtttgttcactttcttgatgaagagtatctcaaaacattaagtacgcgtctggattcagcctttcaggaacgtgatgattgtgatgcgttattacaatttttatcctgcgttgcgttgaaaaatcagcgggaagacttattgaatttaactgaaaagtattctggataa

SEQ ID NO: 268859 - DNA, 978 bp, Klebsiella pneumoniae
atgaacgtgaccagtgaaataaaaaataaagaaaaatcgctcgccgagttaatggtaaaaatactcaaggagccgctcaatccccttgagagtactttaaaaaaaatcaacacagaagttctagacaccaaagataaggttgaagaaatctatgatgccattaatgcggtaggtgcaaacaccgaagaaatcattaatccactgaaaaaatcgttacgtgagctacaagatgacgatgtccctggagcgataagtaagctgagagaatttatttcgactcaggttgaagaaaaaaaacagaatattagtgccgcgcttagccaacaatcggcacactatgatagcctgctgaaagccgcgaccggtgaggtctttgaaaaactgtcggatattcttggtcagcaaaatgagagtgtccaggcagccatacagcagtatcagcaaacgggtatcgacagtgcagaggccttattgcagcaactgctgaatgccaaccgcttcctggtggaaacctgcgccgcgaatgccagcgagcaacagtcgacgcgagagcgggaccagcggttggctgaacggctggaaagtatcatgcaggcccagcagcaaataaagcagtcgataagcgaacttgaccagcagctcaagggcgtgagtcaaggagtgcaaacgacgcgaaccatgctcgcggaagggcaggaaagcgatcggagggaagtgttaagcagccttgaaacgttgtctaccgacgtcccggcagcactggtgcagcatttgaccccactaaccatggctattgagactctgcaaaccagccagcaggcgttgaccgaggcagtgagccagcaagagagccatctggaggcgcaaattaccgcaagtcaggggagattccgctacgttgttatcatttttgccctgtttgctacctcaacgttagcgtatatcggctatgacatctggagaaatttaactccctga

SEQ ID NO: 268860 - DNA, 201 bp, Klebsiella pneumoniae
atgactgcgactaatcaatttgctgcacacgttggtctggactgggcagataaaaaacacgatgtctgtgttcagtttaagaacggcgaacgtgtattccatgtgattgaacatacagcagaagcgcttgacgtctggcttaccgagttacatcagaaggtaaaaggcaggatcgctatagctctcgaacggctttgttga

SEQ ID NO: 268861 - DNA, 600 bp, Klebsiella pneumoniae
atgcttaaatcaatactggaaacgcacgaattaataaacacgtataaaattgacttgagcattaatattaattcgaacgatctgttttctgcgttatttaaagaagatctagtaaaagccaccaatttatataaaattagccctagcaccattactcttgaactaacagagagacagtcggcaaatatatctttaattaaggagcatttggtgaacttaagatctctaggatacaaaatagcccttgacgattttggtactgggcattccaatttagactggttgtctaacctagaagttgataaaatcaaaattgacaggttcataacaaactcaattggcaaaaactcaattaactctcgtattcttaataaaattatatcaatacttagcgaaatgcataatcaaataatattcgaaggtattgaaacagagggacaacactcatacttagaggctaacattcctaacgcgtatgctcagggatatttttatgccaaacccatgaatattgaagagttaagaaaatatttagataaaaaacttaatctaagttcaagaaagaaactgacatatgcaactattaataaaatcggatga

SEQ ID NO: 268862 - DNA, 825 bp, Klebsiella pneumoniae
atgtttcactacacagacgtatatgcattgaggtctatccttgaaaataaaaaaataaggatgactgattatagatttttaaatgatagagatgaatataataaaggaataacatttatctgccgagcatttaagttgttcgatgaataccccgacaaatttcctttagagatgagagagtccgtaaaaacagccctggatatttttgagtctcaggggcttggtggtggttattttgaaaggagtatttttgttgcatcatttagtaagactaaaaactctctaagccaatggagaaactatgggtcatactcaatagagtttgatgtcgataatcttcgccgcgaacgtaatcaccctgagataacagctacccttgattgttactactaccattcagaaagcgatggtgttgatcatgcagtatcaattataaaggaaaaaataattccatctttgatggaatgtaatgtcgacgatttaggtttcgctgtggaatttttaattttggatcttatgatctcttacgcgctatgctttaaagattcttcatttgaacatgaaaatgaagttaggattatttcattgaggtttttaagttacttccctgatgttttttttcgagagcggcagggtgcattagttccgtacgttgagcttgattttgatttgacagcaattaagggggtgatgttggggccgtctgataatcaggagtcatcattgatatcattgtcgatgcttatattgaaattgaattcaagtggtgaatctaaaccatttaaaattactgtcgatagttcgaaactaccttaccgaggttga

SEQ ID NO: 268863 - DNA, 1035 bp, Klebsiella pneumoniae
gtggtgtatgctcttcaaaaatatccgtttatcaccgttttccctgtccacgctttgtccctagctcgttaccggcaggccttctcacccagcggcgcaaaagatgacccacaggatgctgagctggcattagagttaatgctgcgctatccccaaaagataaaggccattgaacccgataatgcggatattcgcttacttcagcaactggtagagcagcgtcgtcagctggttgaagataaacgccgttttgtgaaccggctaatcaacacgcttaaacagtattatcctcagcccctggagtggttctcacatcggggtagcttgctattgtgtgaactgattatgcgatggcccagtctgcaacaactaaaacgagccaggcacgacacgatccgcaactttctcaatgccaaaggaggccgcgcaatggcccttaccgagcagcgtgttgtgagtattgataattccatcccgttgacgacggatccgagtgttatagaggctaatgctttgatggcaacagcactggcgacacaaattaaagtcgtgagtgaaattattaaaacctatgacgaacgaatcgaaacgctgtttgactcattgccaggtgctgggctgttcaaatcacttccgggtatggggccgtgtatgggcccacgaatgcttgctgcacttggtgataaccgtgatcggtttaacagcgccgaagaaattcaaaattacgcgggtattgcaccggtgacagaacgaagtggccagaaatcctgggtacactggcgttggcagtgcgcgaagttcgtccgacagacattcgtggaatggactgcgaagacggttaactcatcgtactgggccagactttattaccagggccagcgagaaaaagggaaatctcatcagtcagcgatccgggctctggcatttaaatggataaggatcatttatcgctgctggaagaccagaacccggtacgacgaagcgaaatatctgctggctctggaagcgcgaaagtcgcccttactgaagccataa

SEQ ID NO: 268864 - DNA, 882 bp, Klebsiella pneumoniae; identical to SEQ ID NO: 204411

SEQ ID NO: 268865 - DNA, 183 bp, Klebsiella pneumoniae; identical to SEQ ID NO: 227816

SEQ ID NO: 268866 - DNA, 186 bp, Klebsiella pneumoniae
atggctgacttacagcatacccaaactcgcccggaatttacatggagatttctctccgcttctgagcgctacctcaacgcatccagcgaacaggaggcccgcgacagtatgccgggtgtaaacctcattttcgctgcacgtctcccattccatgcctttcaggctatggaggtacgccatgcgtga

SEQ ID NO: 268867 - DNA, 387 bp, Klebsiella pneumoniae
gtgcttaacgtcggcttcgcgtcgcgcctgctcatcggctttacgtttttcctccgccaggcgggcctgttcgcgctgctctgcctcgcgacggatgcgatcggcttcttcctgtgctttgcggcgttcagcttccacagcggcctgcttttcgcgctccgcacgctcagctgcttctcgctgttcacgctcggctcgctctttggccaaaatcgcttcgcgctctctggtggccgcagcgtcaatttcacgctgtgccttttctgctgcctcacgtttggctttttcttccgcctggcgcttaatctcttcttcgcgggcaatgcgctggcgttcggcttctgctttcttctcggcctgttcgcggtcaaaatctttattcattag

SEQ ID NO: 268868 - DNA, 1221 bp, Klebsiella pneumoniae
atgacattttcagtagaacaggttcgcgccgattttccggtactgaaccgggaggtcaacggtcagccgctggtctatctcgacagcgccgccagcgcccagaagccggaggcagtgatcggcgcagaagcggaattctatcgccacggctacgcggcggtgcaccgcggcatccataccctcagcgcggaagccaccgcgcggatggaagccgtgcgtcagcaggcggccaccttccttaacgccggatcggcggaggaagtggtgttcgtccgcggcaccaccgagggtatcaacctggtggccaacagctggggaaacgccaacgtcggcgccggggataacatcatcatcagcgaaatggagcaccacgccaatattgtgccgtggcagatgctctgcgcccgcgtcggggctgagctgcgggtgatccccctgaacccggacggtacgctgcaactggatgttgtcccgggactgtttgacccgcgcacccgcctgctggcgataaccgaggtctccaacgtgctggggacggaaaacccgctggcggcgctgattgctcttgcgcatcagcatggcgcgaaagtgctggtggatggcgcccaggcggtgatgcaccacccggtggacgtccaggcgctgggctgcgatttttatgttttctccgcccacaagctgtatgggccgaccgggatcggcgtgctctacgcccggtccgagctgctgcagacgatggcgccttgggaagggggcgggtcgatgatcgccaccgtcagcctgacggagggcaccacctggaatcaggcgccgtggcgctttgaggccggcacgccgaataccggggggatcattggcctcggcgcggcgctgacctacgtcagccagctgggactgacgcagattgccgagtatgagcagacgctgatgcgctacgcgctcgatgccctgcgcgcggtaccggatctgatcctttacggcccggcgcagcgtaaaggggtaattgctttcaacctcggtcagcatcacgcctatgacgtcggcagcttcctcgataactacgggatcgccgtgcgcaccggacaccactgcgcgatgccgttgatggcccggtatcaggtaccggctatgtgtcgggcatcgctggcgatgtacaataccacggaagaggtggaccgcctggtggccggcctccagcggatccgcaaactgttagggtaa

SEQ ID NO: 268869 - DNA, 666 bp, Klebsiella pneumoniae
gtgcttaacgtcggcttcgcgtcgcgcctgctcatcggctttacgtttctcctcagccaggcgggcctgttcgcgttgctctgcctcgcgacggacgcgatcggcttcttcctgtgctttgcggcgttccgcttcaacagcggcctgcttttcgcgctccgcacgctcagctgcttctctctgttcacgttcggctcgctccttggccaaaatcgcttcgcgctccctggcggctgcggcgtgaatttcacgctgcgcctgttctgccgcttcacgcttcgctttctcttctgccaggcgcttaatctcttcttcgcgggcaatgcgctgacgttcggcttctgctttcttctcagcctgctcacgatcgaaagcgtcattcatcagcagggccatttcgtggtcagactcaatccgagcagccagctgccgatcgaactcttcattcatggccagagcttcggcatgcagtacgttcatggcttcttctgccttaatgcgttcctgttcggcttcccattcagtcagcggcttacgtgtcgcatcgcgcagctcgtcacatgcgtcaacgaaccgcttaatttccgcctcagcagggcgcacagcctctttaaggcgtttcaggtactcgcggcccggcttttcgattgccgtcttactgcgtga

SEQ ID NO: 268870 - DNA, 204 bp, Klebsiella pneumoniae
atggggtatgaggatgagtttttcgtggagatgcacccgcaaatagcgcaggttatcgggatagcggttttgcagctactggttaaaaagcaagagccgtcaagagaggctctgatagagatgattcaggtatcgtggcaggaagaccaggtcgatctggctgtggagttggctattgacgttctgtcgcgaccaaaagagtag

SEQ ID NO: 268871 - DNA, 378 bp, Klebsiella pneumoniae
atgaaagttttattatccattaagccagaattcgcagaaaaaattttggacggtactaaacgatttgagtttcgaaaaggtatttttaaaaatcaagagatcagcattgttgtaatctatgccacaatgcctcttggtaaagtcgttggtcagttccaaatagaaactatcctttccggagagccagagtctttatggaaagaaacgaaaaaatatgctggtatatcaaaacagttttttgatagttactactcgggcagagacaaggcatacgctataaagatcggtgaggtcgaacgctatcaggagcctctccccatctctgacttaggcggaaacattaaaccgccacaatcgtatctctacttacccgcttaa

SEQ ID NO: 268872 - DNA, 1062 bp, Klebsiella pneumoniae
atggatagcttaaggtatgaaagtttctctcaatttgatcataacgacccattttttgattcattgaagagcgattacaaagagttccccgattggctcaagaaaaaagccgacgctaatgaatccgcctacattctctacgatgaaaatcacaaaattgaaggattcatgtaccttaaggaaaatgatgatgccaacgacataagccccaaattgcctcacggccgtcatttaaagataggtacatttaagttcgagtcaaaaggaacactcaggggacagcgtttcttaaaaaaagcctttgaccatgctttttcatctggttctgatgacatatacgtcacagtgtttgataaacatgcccacctaataaaactcttccaaacctatggtttttatgttcatggtgaaaaagaaacgcataatggaaaagagtatgtatatgctcgctccttgcgtgatgtctacggtgatatcctgttggattatcccagaatattaacagcgaaagtaaataaataccttcttgctatatatccagattatcatacaagactattccctgactccaagcttattaacgaatcaccagatattgttaaagacatctctcacgcaaacagcatacataaaatatacatttgtgggatgccaacagttacccgcatgaacaggggcgatattattgttatctatcgcacaggagatggacaaggcccagcgcactaccgtgcagtcgcatccacggtttgtgtcgtcgagtcagtaaaaaccattgatgattttcgaaatgaagatagctttgtcgaatactgccttcgctttagcgtcttctctgaagaggaactcagaggtttttacaaagataagcgttacccctatgttatacgcttttcctataacatatctttacctaaacgtccaaatcgtgctagtctgattgatcaggtcggtttaaatggtgctcgtggatttagatggagtcattttcaacttactgatgagcagttttttaagatcatagagttaggtcgtataaatgaaagttttattatccattaa

SEQ ID NO: 268873 - DNA, 633 bp, Klebsiella pneumoniae; identical to SEQ ID NO: 52831

SEQ ID NO: 268874 - DNA, 303 bp, Klebsiella pneumoniae
atgctggcgcgggatgtttacgagcaactttttatacaaatgcctggagcggagcagctggtagtcacacatggcgacgcctgtcccgagaacttcatcttccaaggtaatgccttcgtcggcttcatagactgcggtcgggtcgggcttgccgataagtatcaagacctggcgcttgcatcgagaaacattgacgcggtatttggaccagaactcactaaccagttcttcatcgagtatggagagccaaatccgaacatagctaagattgagtactaccggatcttggatgagttcttctaa

SEQ ID NO: 268875 - DNA, 801 bp, Klebsiella pneumoniae
atgttaaaagttattagtagtttattggtctacatgaccgcgtctgtcatggctgtcgcaagtccgttagcccattccggggagccgagtggtgagtatccgacagtcaacgaaattccggtcggagaggtccgactttaccagattgccgatggtgtttggtcgcatatcgcaacgcagtcgtttgatggcgcggtctacccgtccaatggtctcattgtccgtgatggtgatgagttgcttttgattgatacagcgtggggtgcgaaaaacacagcggcacttctcgcggagattgaaaagcaaattggacttcccgtaacgcgtgcagtctccacgcactttcatgacgaccgcgtcggcggcgttgatgtccttcgggcggctggggtggcaacgtacgcatcaccgtcgacacgccggctagccgaggcagaggggaacgagattcccacgcattctctagaaggactctcatcgagcggggacgcagtgcgcttcggtccagtagagctcttctatcctggtgctgcgcattcgaccgacaatctggttgtatacgtcccgtcagcgaacgtgctatacggtggttgtgccgttcatgagttgtcaagcacgtctgcggggaacgtggccgatgccgatctggctgaatggcccacctccgttgagcggattcaaaaacactacccggaagcagaggtcgtcattcccgggcacggtctaccgggcggtctagacttgctccagcacacagcgaacgttgtcaaagcacacaaaaatcgctcagtcgccgagtag

SEQ ID NO: 268876 - DNA, 537 bp, Klebsiella pneumoniae; identical to SEQ ID NO: 149246

SEQ ID NO: 268877 - DNA, 396 bp, Klebsiella pneumoniae; identical to SEQ ID NO: 149247

SEQ ID NO: 268878 - DNA, 252 bp, Klebsiella pneumoniae; identical to SEQ ID NO: 149248

SEQ ID NO: 268879 - DNA, 156 bp, Klebsiella pneumoniae; identical to SEQ ID NO: 217076

SEQ ID NO: 268880 - DNA, 1617 bp, Klebsiella pneumoniae
atgaacaggatgagcatcgttatcctctgggcgctggcgctgctggtgctccagccggcgctggccgccgaaccgcgacagcagccaaccgcgcgcgagcaggcacgcacggtcacgattttccaccaacctgtcgtcatgttgcaggccacctttggccagaccacgcccgaagagcgcgttttgcgcacccgtagcgccctgcgcgccttcaccgaagatgatattcgccagccgctgcgggtcgtgccggttatccgctatggtcagccaggcagactgtttctgatgaacggcaaaccggtgctgctgctgagccaggcggatctcgacgagggcgatgatttaaccctcgaccaggcagcccagcgggtgctggcgcgtatggaagcccagcgcaccagcctccaggagcagttcaacaaccgctatctgttcatctccgccggtaaagccctggccggggcgctgctgctggcgctgttttactacggcgccttccgcgcctggcggcgggtgcgacgttttttcctgctgcggatcctcgaaaaacgtagcgccataccgcagcactggcggcgctatctcggcaatattgaagttcgactctatgctgtgctggtcatccttctcggcatgctggcctgttatctctggctgagctgggccttcagcctgtttccctggacgcgggtgtggagcgaatcgctgggcgactggtcgctgggggtgatccgcgacctctctctgtcgattgtcgcctccctgccggggctgatgatcgtggtgcttattttccttctcacctggcttatcattcgcctggtgaaagtggttctcgaccaggtcgccgccggccgcattcaggttcccggcattcatccggagaccgttagcgccacccgtcgacttatctcggtggtcatctggttgtttgccctctccgccgcctacccgttccttcccggcgccaactctctcgccttcaaaggcattagcgtgttcttcggcctgatgctgaccctcgggtcaaccggagtgatgacccatgcgatgagcggcctggtgctgatctactctcgggcgctgcgcaaaggcgactggatccgcctcgccgataatgagggtcaggtcagcgagattggcgtgctggcgaccaaaattctcacccgcgaaaattacatcgttaccgtcccgaacgcggtggtggtgagcgggaaaattattaatctcagcgccgaaagcgccgacggtggagtcaacctcaccaccagcgtcaccatcggctacgatacgccgtggcgtcaggtccatgcgctgctggagctggcggcgagacgcaccccggggatcgatcagcaaattgcgccggtggtgcgtaagctgggattgcttgactggtacacctcgtatgagctgcaggtgcgcttactccccacaaccaagctgccggatggccgcaacgcattgcatagcagcattattgatgtgtttaacgaattcggcgtgcagattatgtcgccgaacttcgtgatgcagccaaaggcggcggtagtggtgccgcaggaagcctggtacgccgccccggccgtcgcgccgcaggagcctgagaaataa

SEQ ID NO: 268881 - DNA, 198 bp, Klebsiella pneumoniae; identical to SEQ ID NO: 152560

SEQ ID NO: 268882 - DNA, 450 bp, Klebsiella pneumoniae
atggctgcactaaaaccagaggtgaaagccgccatcgttcaaatgcttgcgtgctatgacacgccttcgcaggtggtcgaggctgtccagaaagatttcggtatcaccatcactaggcagcaggttgaaacacacgatccgacaaaggttagcgggaagactctcgccaaaaaatgggtcgacctttttaaccttacccgcgaccgcttcctcaacgaaatttccgacattccgatcgccaataaagcctatcgtctccgtgcgcttgaccggatgatgaccaaggccgagagcatgcgaaacatggcgttggctgcctcgctgatggagcaggcagccaaagagtgcggggatgcatacacgaataagcataaggttgaacactcaggcgcccttgccgtgagctcagtttcatctgtcatggacgagataggagatgaagacctgtaa

SEQ ID NO: 268883 - DNA, 1065 bp, Klebsiella pneumoniae
gtgcctttgtttgcatctgccttcctcctgtttccaatcaggcctatacaatgccaagcattaccacttgctaaaacctattcattggctaaaatggttgacatgaaaattactatttgggaaggctgtgacctcacagttgcagctgcaattaaattatttgtagagcatagttctccgtactccatattttcacggaggtatccaatactgcgtctcatacaggaagttattgatccagcagtaactgcttatgtaaattccctgccaccaagtcataaagactacatttctggagcaaatctaggttttagtgaagtacttaaaaaagtgggtttaaacgtcgtagtacaggcacaaagacttcttttgcgtaatttcgttctgactttagatcaacaaacttctcttgataaatgctttaccgctacgattgagtctcttattgaattagtcaatgagtgcgcatccaagcggccgaagaaatcctctcctgcaaaaggagtaactataaattcacagcgtaaactcggtttttgcgagttctgcggtaaccagactgaatactctcactttattagtgaaatatcagaatatgctgctagcgatattgagtttaccgatcatgaaaaattggtccttagccatcgatattgctcgaaccataggcctagactgaccgatagtcaatggaatcccaagtacagacaaggaaagcgttcttccgaacagtttaataaagaactaataaggctgagacggcaatgcgctaaaccatgcaagactaacgccaattccggagatatgttaattgattactacttttctcattggatgcttagtcaaacttttaccccagcagatatttcagaaatccgtaatattgcacgacgtatgactgattctaagctctctgatattaagaaaaagatcctcgctttaaaacatcagggacttaatcaatctgaaattgcagatattctcacaaagattcatcgcatacctatgacacgccaagcagtatccaaggctttagtatctgttcgtgaagaattttatatttaa

SEQ ID NO: 268884 - DNA, 540 bp, Klebsiella pneumoniae
atgttaaagaacagtgtggaaatagaatcctgcaggtttgttttagaaccatcttacaaaaaagatggttctattcattcttgggaaattctcacgaaaagtgttaaaaaaaagaacgctaatgattatcatgctaatgaaggtcttttttgcttcagttcgctaagcgataaagaaaaaatcgatgtgtttaagagacagatattgacaattgaaaagcttgatgcatcaaaattgaagttcaagccagtttcgttgaatgttgacagtcttattagcgattgtattttgaacgataaatatattggtgattacttaaaaaaccaaaaaaacattgcttttgagattaaagattatttctgggaaatacagagtgagagcgaattctttaaaagaataaataaaataaaatcatactgcaatttcgtgattgttgagggagttgagacaatagaacaaaaaaataaagtacattctgttgttgattgcgcttgccagggaaggttgtggatgagtgattactattatgttgagatttaa

SEQ ID NO: 268885 - DNA, 591 bp, Klebsiella pneumoniae
atggccaggaacgccgccgtatctggcgtaagctgcatctcgccgttgacagtaaaacacatgaaatcatctgcgctgacctgtcgcgtggttattggttttgcattgcgcttcaacccgctgctggtggtcgtggtaacggggctggcgacgggtttgctggtcggtatggatttcggcatgctgctggaaaccttcggtgagaagttcgtgaagagccgttcgctggccaccttcattctgatcctacctgacattggtctgctggagtattacgggcttaaggagcgcgcccaggcctgggtggcgaagatcgctagtgccacttcggcgcgtattctgatgctttattttgttgcgcgtgaagccacggccgcgctggggctgatgtcgttgggcggccatgtccagacggtgcgtccgctgctggcctcgatggccgaaggagcggcgctgaacgaatacggcgaagtcccacagcatattcgcgacaaaatcaaagcccatgccgccgcgtgtgacaacatcgcagttttcttcggagaagatatctttattgcttttggcgcagtgctgctaattgacgcgtaa

SEQ ID NO: 268886 - DNA, 1383 bp, Klebsiella pneumoniae
ttggcctctctgcgaccctctgcatataatcagcgcgaccgtgaagatggtggcccttttctaattattcagtctgctgagtcggaagagggggttgatgttttttttacagatgtacctccagaacaattctcctctgattctctgattgctctgttaatgaacatcagccctgataaaatgacaatttggccgattaatgttcgccaggacactgatgagtacctctctccaaaatatgacagacttgaacgcattgttatcacccgatctatagttgagccttatcctttacccgaatcagaggatgacgtagtcggccttctggaacagctacccgatggttttgcaaaagattatcgatttggcttaggccttctctgggaatatcggcacatttgtgatgctgtaacaagcagagatgatgtaagtgttctgattatacaggggggtgataaggctatcatagacccaccatttttcttgcttggcattaaacgttttaatcgtcttcgaagggaactcaactccattacttcccgataccagagagatgcgagaagtgaaaaaaaattccaaacttatcaatccattttacatgcggcagatcccgagcaatatcctgcattaataaagaagttacggtcaggtactatcgctgagaaaacaaatggtggacgtgataatacagcactagggcctcaagatagacgtgccgttgttcaactggtgaaagataatgttaaggccttagctaaaactgaatctcgctctttgctagcactgagaagtgatattgagcttgtcactctcgaccagctgatagctcgttacagtgaaatgcttggttgtaagcttactgaaagtaaatggcaaaacttttttatggacaatccatttattctgagccttgcctttgctattccagtttttttggtccaaggacaagcatatgctggaggaaaaaagttgaatgggcgcgagggaaaatataccgattttgtttatgcgtcagctgcctcgggtaaccttgctctggtagaaattaaaagacctgaaacggagcttttgagtaagaaaccctatcgaggtggtgatgtctatgctgcttccggagagttgagtggagcacttactcaattactcgatcagcgatttaaactacagatgacacttcctgtcctgaaaatggatgctaatctgaataatatccatggctttgctatacgctgtataattatagctggcgcatcacccactgaaaatgagcataagaaatcatttgaattggttcggaacgcattttctgaagtcgtggtcattacttttgatgagcttcttcaacgcttaattgaaataagaaaggcgctttctccaagttaa

SEQ ID NO: 268887 - DNA, 273 bp, Klebsiella pneumoniae
atgaagattatggcaatttgttactctggcataggtacaagttttattattgaagaaactgtaaaaaaaattttaaaacgcaatggtaaggatgcagaggtagggcattgcgctctttctgaaatcccttcaacagacgcagacttatttatcatgcaaaaaatatttgctttaaatctgaatatcccacctcataaactcttaatcatagagaactttagtgatatagctcagatagaagaaaaacttaaaccctacatcgataaaatttag

SEQ ID NO: 268888 - DNA, 957 bp, Klebsiella pneumoniae
atgatcttaactatttccctcaacccaggccttgatattacatacagctttactcatttccatttaaataatatcaatcgagtaagtcataataaaatacttaaagtagcgggtgggaaaactttgaatgttaccagggtaataaaacaaagcggtacaaatgttttatcaactggcatagttggtgggctagtcggtgaagaaatcattcaattattgaatgcacatggagttagaaatgatttctatcggatttcaggcaactccagaaataacattactatagcgactgaagggaaaagtaccgagattctagagcaaggtccatgcatatcagaaaatgaatctaaagaattcctaaagcatttaacaactgttttagagaacaataaaaatattagatttgttgttatgtccggaagtttaccgccaggtttatccagcaattattacactgagattttaaagatagctaaaagttttgatgtcctctctattgttgacacttccggtggagcattaaaagaagttataaattgtaaatataaaccatattgtataaaaccaaatgaaactgaattaaaagagcttttttcaatagagaatggatatctacttagtgtagatgagtgtctcaatttattgtcatcagagactcttaatggcattgagtggataatttatactcaaggttctgagggggctattattaaacacggcaaacgtttttataaagcaaatattccacaaaagttagaaattataaatcctacgggttctggcgactcaactattgccggtttctgtgtaggacttttaacaaaacaggatgacactcacatcatcaagcacgccatggcatatggcattcttaatgccatggaggataaaacaggttatattaatattgataatctttctaagatagaacaacaaattgaaattataaatttataa

SEQ ID NO: 268889 - DNA, 1506 bp, Klebsiella pneumoniae
atggaattattattaggaatagatataggtacctcttcatgcaagattgatgcttttgatagtaatggtaacagtattatgcatgaatctcatatctataagattcataaaccacatatgaattgggctgaacaagatcctgaagactggtggttcgccgtttgctcattattaaagaaaatgacagcgtttctttatggtaaagggcatacaattgttggcattggtatagatggccaaggttggtcaatggtacctattgataaaatgggtacagttttacataattcaccaatatggatggatcatcgggcgcaggacatatgcacacgctttaaacaggaaataggtgaagataatatctttgccatttctggaaacccaatggaaccaacatattccttgccaaaattactctggttgaaagagcataaacctgagatatacgaaaaaacagataaagtgcttcaggcaagcagttatattgtctataagcttacacaatcaatcacacaagatatttctcagggatatgctctgcaatgcttcgatataaaaaatggcaaatggcatgatgatttaattaaagcatttggtatttctcgctcatatttacccgagattgtgaactctgatgaaattgttggccatatcacacaagatgccagtgtccagaccggtttgaaaacaggaattccagtagtagctggaggattagatgctgcttgtggtacattaggggttggcgtttttcaacatggagatgtacaagagcaaggagggcaagccgaagggatgagtatctgcttagactcctgtatcgcagacccgaaattaatattaggtttccatgtagtacctggtaaatggttattacagggcggaactgtcggtggcggcggagtccatgattgggttaaaaataacatttgcttatcggaagaacatattaccagcaatgataatatataccagcagatggattcgctagcacaggctattcctcctggttctgatggtgttgttttcttgccttatatggctggtgagagatctcctatttgggatcctcatgcaaaggctgtttactatgggttagattatagtaaaacaaaaggacatctgattcgagcgactcaggaagcggtggctttctcactcaagcacaatttagatcatgcggagcgctcaggagcgaaggtagatattttatatgcaatgggcggttctgcaaatagtagtttctggacacaaatgaaagctgatattaccggaaagaaaatcattgtatcagcatccgactctgctactacattaggtgcagcaatcttagctggcattgcaataggcatgtataaaaattataatgatgctaaaaatcaaacatttaaagttcaaaaagaatatatccctaataaagaacattgttcagactatgagaaaagctatgttaaatatcttcaactttacaaaacattgaataagtttatgtatgaatatgcctaa

SEQ ID NO: 268890 - DNA, 1047 bp, Klebsiella pneumoniae
atgaaggcattagcagttacagcaaaacagcaaatggaattaataaacgtcgctgagcccaaaatagcgaccccggatgaggtaatcatcaaagtttcttactgtggtatatgtggttcagatttaccccgttattttgatggtgcggttcattcttttcctcaaattttaggtcatgaattttctggagtagttactgaaactggtgcaggtgttgaaaatgtcaaacctggagacagagtagtcattgcaccattaataccttgttgctcttgtgaagaatgtatatccttattgcctccaggtatgtgtagccagtatggttttattggttcacgtaatccaggagctatggcagaattcgtaaaagtaccgtcgaaatgtgtaataaaattacccgagcgcctctcattgaagaaagctgcattagtcgaaccttttaccgttgcattacatgcaattgaacgagtttcgcttaaagccaatgaaactgcaatggttttaggatgtggtagcattggcattgcgttaattaagcttttaaaggtaagaggagtctgcgatatcatcgcgatagatttgaatcaagacagactaaaaaatgcaaatagttctggagctactattaccatcaatccaacgattgaagatgttgatacaattttaaaaaacagcaataaaccatctattgtttttgaaactgccggatcaccagttactcagaaagatgctcttcgctatgttaataagaagggaagcattgtttatgttgggacaagtaagaaagatattattttttctcctgaattgtttgaactgatttttagaaaagaaatcgttataactggctctatgatgtcctattcgaatccgttcccaggttatgaatgggatgtaataataaactatctgaatcaaggattacttgacacttctgattttgttaccggaacattcaaacttgaagacaaggaaaaagctttccatgaactattaaacaagcctgcgcatttaaaattactatatgaaatcaatccagaaaaatga

SEQ ID NO: 268891 - DNA, 1266 bp, Klebsiella pneumoniae
atgatagaataccttaattatgcagttacatggttcattaatctaggaggaacatactttgttcctatcgttatgctggttataggattggcctgtaaaacgggacttgctaaaagtttcaaaagtgcgttatttattggtattggattatcagggttaagtttgataattgatttctcgataaatgcaatgcaaccagtaacagaagcgttatcagaaaggtttggttcggatttttcgatcctggatattggatatggaatgtgttcgctagcctggagttggcccggggttcctctggttattttaggagtggttgcagtaaatataatattagtatcactaaagttaacaaaaactttatgggtggatatgtggaatatctggcatggccaggcattaggggttatgttctgggctttaacaggtagcctgaccgctggtattattatgggtattggtgttttagtgttatcaatgtttcttgcagatttccatgcaaaagagtttcaaaaatttaatgatttgaaaggtattacggtaccggccccagcggctacatttgcagctacatatgctttttttgcaatgaaattgattaattgcattcctcttttaaaggatgtaaaagcatcctctacagatattaaagataaatttggtatttttggggagagcagcattattggggcagtcttaggtgccataatgtccttaataagtggattatcgatatcccagacaattcagatatcaatacaaatagctgcagttttggttattttacccattatgttacagattgtagcagatggaattatacctattactgaaaacttatcggtgtttatgcaaagcaaatttaaaaaccgagaattaaacattgcagttgatccagttttattattaaaagatccatctgtaatgtcaacagttgtaattatgtatccaatttcattatttattgcagccatcattccaggaaatcattttttaccagttgcaagtctggccgctttaccattttggattggcgggattgccccttatactaaaggaaacataatccataatgtaatattgacttctatttggattattcccacaacgctcgcagccacttatcttgcgccattgacaacagaagctaataaactagcaggcgtcctttctaataatggtcctattaactcttgggatgagggtggtaatttattaatgtggggagtaacttacttatacaattttctagggtttaatggataa

SEQ ID NO: 268892 - DNA, 210 bp, Klebsiella pneumoniae
atgagcccttcttcgtgggggttgtcactggatgccactcagtcagcccagcgtcggaccgttatagctccgctggcgggaacgggcttccgccagctctttttcgtgctggcgctgctcgtatgcccgttcggcggccaccgccatttcatgccgctgcactactggctcaaacgctgtaactgcctgctcaagttcgccacctgctga

SEQ ID NO: 268893 - DNA, 513 bp, Klebsiella pneumoniae
atgtcagtaagggcaaaaaggtcaggaagaagaaaccaatcagaaaggcgtctggaactgattgaagcactatggggagatgaaaagatcgaaacgtggcaccgccttgagaacgatggttactccacagttccacggtatctgccgctgataggagcgcttatggatggtctatcaaaaggatctccactatccacaacctatttagctttgtggttccgggtttctgacgaggggctaattgaaatccgagacaaaactgtgttggctttcgaatctggttttgccagtgacagaggcgtaacaacatggtcaggaagaatgaagaaattaaaagaattggggtttatttcctgtcgtgaagggagttcaggtgagtttcataacgtattgattgttcacccattagttgcaattaaaaaactaagggatgcgggggacctttctaaagggaaggcttacaacatattagttgaacgtgttattgaggtgggagcctcatgggaggattaa

SEQ ID NO: 268894 - DNA, 495 bp, Klebsiella pneumoniae
atggccggtacagtatggcgtgatataaaaatagaggatgtcagttttcctatggggcatttacatcctcgatggtattcaatcgatgtaaacggcataaaaatagacattgaaattagtcatggttttcacgtttttactgatgaaaagcaggctgggccattgatgaagttcaaggaagaacagcggtatttttgtagagagcgttacgaaggcagcaaaacgattgtgactagaatccttgccgcgatagagaaaggtgaatacatcacagcctttatctcgaaggggcagggacaaagatattatcacctgagtcaccatgatgattttatcctgatggagattcgaaagccccaggacaaacaaaatgcactccgtatccatgtagttacggcgtacacacttgatgaatggggaaacgtcaacaaaggacgtaacctgcgatttagatatgtgcttgaacagcgattgcagggcaagaagattgtgtaa

SEQ ID NO: 268895 - DNA, 180 bp, Klebsiella pneumoniae
atgaggaacttgttcctgaacttgaagacccagatgagcttggtgagctgtatgtttttggataatagggagtgctgccaccatagtacccgccacctgatgatgaacggtgagaactatggctccgatgggagctatgactgcgatgccctgcaatgtagaatggaacttcggtgttaa

SEQ ID NO: 268896 - DNA, 237 bp, Klebsiella pneumoniae
gtggcggtgaacaatttccataaaggcatccatttccgcccgggccaccccttcgacaccctgtgtgcccaggaacattaccggcttttcctgttttgggttttgcatggcatgacgggcttcgttggtatcataaaggcgcagcaggaagggacgcagcccggccattgcctgttcacgcataatcgccaggcccgcttcgacggagggaagctcaagagaatcgaaaagacgtga

SEQ ID NO: 268897 - DNA, 2004 bp, Klebsiella pneumoniae
atggcagaagtaccgttaccaactcccacagataacactgttccgagcacggatatccgggacgcagtttatgctggcgccatgctggataaggttgtcaccagtaccgatctgaaatacaccgatcgcctaggcggcgagcactacaccgtagacggaattaaggctgaaggggataaggtcgttgaggaaacgcggcagaacctgatccccctaagtcgccagtacatgacgctggccgatgctcaggcagatattgcaaatattcctgaaggcagtgctacttatgttcgtagtcaggatggcagttcactggctgatgagtatataaacaatggcggaactctggtcgctactggacgtaaaatgccgtctcaggattacattgatcaaaaaacatcagggtttgacgttgatataaaatcattaaatgaaacaagaactgaggaggcaagctcattttataacacatatgttgatacaagaggtgatacacgagagttagttatagcagcagataaggaattaaggaagatagcaaaaattgaccttatccaacgtaaactagtaatttttggtaataacaccccgtatcaatcagaagtagatgaagcaaaaatggctggcggggaaatatggcagtataatggtaatgactctaatattattattcttttggccgatgctgctggaaggttggtaaggtatttaaatctcacggagcaaacggaatatttatttgggaagaaggttggttccgataccatttcctatactcccccagagtcatggccagaattcatagataaccgttcatatggacagagtttatcagtcagtttcaatcctggtaattcaggccctggaatacctactgatactaatggcgcgttaatgtggaatgttgggattcaaacatataactcaacaaatattaattcatttatcactataccaactacagcatcaagacaatatcaggaacagagttatattcatcaattgcagtttcttggtgtgagtgatagccatattcactttgcagcagcatcaggtgttcctggttactcaatggcacaacttaagccaggtactgagccatggagccaattgatgtcgaatattgagcaaactgcgttattagcacaaagtcaagggatgcaatatggcatgccagtcattgacttcaatcaaggtgaagctgatgcattccttggtcgatctatatctgagtattcttcagatcaggttatcatccaggatggaataaatagaaaagttaaggaggtggcaagaacagattatgatgtggcaatgttcatttaccaaatggcatcacatgggcggtacgaagggcaggttcattcaagctctcaaattccattagcacaactagcctcggcacagagcaatccacttatacagcttattacccctatgtatatattcccatatgcagacggagttcacttaacaaaccatggatatcgctggtttggcgtttatcgcgcgaaagctgttaaatactggatggatactggaaaaccatggaagcctctttatccaacaaaggtattcaaggttggtgataaaactgtagtggccgagtttaatgtccccgttggtcctctgcaatttagatatgatattgtgccagagcacccttctggcgcgaaaggttttgagctatgggaagctgacacggacggaaaccttacgagacttaatataaactctgttcaattagttggtggtgataaagtaaaggtaataagcgagagttcatttaatggcgcagtatatctggcttatgggtttactcctattaatcgaggtgattctgatggtgcaggaagatacccatcatggaatgctggagtaaactcaggagtttgtggaaacctgtgtgattcagacaatacaattacggatttacttgatgccaatggcgaaccataccagttaaaaaactattgttgcattttctatatcgaggctatctaa

SEQ ID NO: 268898 - DNA, 1437 bp, Klebsiella pneumoniae
ttgaacgtcacctccgccgtacgccaggctgtcgaacggacatcctggtttaaaaaacgtcagcgttatcgtgtgctgtactggcgcgaaatcagccctctcgctgtgcccattctgctggaaaatgcctgtgtgctgctgatgggggtgttgagcaccttccttgtcagctggctgggaaaagaggccatggccggtgtggggctggccgatagctttaacatggtcatcatgtccttctttgccgccatcgatctgggtaccacggtggtggtggcctttagcctcggcaagcgcgatcggcggcgggcgagggcggccgcgcgccagtcgctggccattatgaccctgttttccattttgctggcgggggtgatccatgcctttggccaggagattattgattttgtcgccggcgatgccaccgcccaggtcaaggacctggcgctgacctatctggaactgacggcgctgagctacccggcggcggcgattgcgctgatcggcagcggggcgctgcgcggcgccggcaccaccaaaatcccgctgctgatcaacggcgggatgaacatcctcaatatcttaatcagcagcgtgctcatctacggcatcttctcctggccggggctggggttcgtcggcgccgggcttgggctgaccattgcccgctatattggcgcgatagccacgatctgggtgctgatggtgggcctcaatccggcgctgcggctgtcgctgaagggctacttcaaaccctttaacttcgccattatctgggaggtgatggggatcggcattccggccagtatcgaatcggtcctgttcaatggcggcaagctgctgacccagatgtttgtcgccgggatgggcaccaacgttatcgccggcaactttatcgccttttcggtggcctcgctaattaacctgccgggcaacgccctcggctctgcctcgacgatcattaccggcaagcggctgggaaaagggcagattggtcaggctgaattccaggcctggcacgtattttggctgtcgacgattattctgacgctgatcgcctggggcagcgcccccttcgccggctttatcgcctcgttctacacccatgaagaagatgtaaaagaagtggttaaacagctgctgtggctcaacgccctgtttatgccgatctggtcgctgtcgtggactttaccctgcgcttttaaaggcgcccgtgacgtacgcttcaccatgtgggtgtcgatgctcggcatgtggggctgccgggtggtggcgggctataccctgggcatcgtgctggggatgggggtgattggcgtctggttagggatggtgctcgactgggcggtgcgcggcgtgctgttttatttccgcatggtgagcggccgctggctgtggaaatacccgcgcgtgaaggcttcgtcggaggaaagctga

SEQ ID NO: 268899 - DNA, 1521 bp, Klebsiella pneumoniae
atggcgttcgattggggatactttttttcattgtttagcattggggcattctggcaggcgtgcgtgaccgtcatcgtaatcagcaccttgtcctgggggatcggcctggtggtcggttttctgttagcctgcgcgaagctctcggcgccgcgctgggtcaagatccccgtcgaactctatatctggttttttcgcagcgtgccgctgatggtgctgctggtgtttgtctacaacctgccgcagctgtttccggtgacccagccgctgctcggggtgccgtttatcgccgggctggtgtcgatgaccgtcaccgaggcggcctatatggcggagatccaccgcggcgggctgctgtcggtggccaaggggcagagcgaggcaggccatgcgctgagcttcagctttatcggcatccagcggctgatcgtgatccctcaggcgtttcgcatctcgctaccgacgctgatcaatgaatacatcaccatcattaagctgagctcgattctgtcggtggtctccttacccgagctgctgctcaccggccagcgcttgtatgcgcagaatttccttgtgatggagaccctgctggcggtagcggtgtactacgtgatggtggttaccgtcttcacctggctgttccgggcgctggaaaatcgtctcgatattcagcgtaagcgtccgcaaaccctcagcgaggcggaatgccaggcgctgcgccagagcctgccggcgctgagcgaagagagcaacaccccggccgtcaacggcgcgccgccggcgctcgatctgcggggcattcgcaaatcctgggggcagcatgaggtgctgaaaggcatcgatctgcaggtggagaacggggaggtgatcagtatcatcggcccgtccggctccggcaaaaccaccctgatccgcaccatcaacgccctcgaaagccttgatggcggggagatcattctctacggcgaggactatcttaagggcggagctatcgtcgacaaacgccagatgcgcgccggggtacggcgcatcggcatggtcttccagagcttcaacctgttcccccaccgcacggtgctcgacaacgtgatgctggccccgcgctatcaccagctgctggaccagccggtcgcccgcgagcaggccctggcgctgctcgaccgcgtcggcctgctggcccatgcccacaagtaccccggacagctctccggcggccagcagcagcgcgtggcgatcgcccgggcgctggcgctgaagccggacatcatgctgtttgacgaaccgacctcggcgctggatcccgagctggtaggcgaagtgctgaaggtcattcagtcgctggcccgcgaaggcatgaccatgctgattgtcactcacgagatggacttcgccctgtcgatttccgaccgcgtggtgctgatggagaacggcgtggtgcaggccgatatcgccccgcaggtgatccgcagcccgctggaggcgccttctctgcaacgaatccgtgaatttatgggagtacgctaa

SEQ ID NO: 268900 - DNA, 1488 bp, Klebsiella pneumoniae
atgctgtttattttttgcgttggcgtagaagccgggcccaactttttttctatttttttccgcgacgggaaaaactacctgatgctggcgctggtgatggtcggcagcgcgatgctgatcgccatgatgctgggtaaagtgttcggctgggatatcgggctcaccgccggtatgctggcaggcgccatgacctccaccccggtgctggtgggcgcgggcgacaccctgcgccatttcggcctgcccagcgatcagctggcgcagtcgcttgaccatctgagcctcggctatgccctgacctatctggttggtctggtgagcctgatcgtcggcgcccgctatatgcccaagctgcagcatcaggatctgcagaccagcgcccagcaaatcgcccgcgagcgcggcctcgataccgattccaaacgtaaagtctacctgccggtgatccgcgcctaccgcgtcggcccggagctggtggcctgggcggatggcaaaaatctgcgcgaactgggtatttaccgccagaccggctgctatattgaacgcattcgtcgcaacggcattctggccaacccggacggcgacgcggtgctgcagatgggtgacgatattgcgctggtgggttacccggacgcccacgcccgcctcgacccgagcttccgcaacggtaaagaggtgttcgaccgcgatctgctcgacatgcgcatcgtcactgaagagattgtggtcaaaaaccacaacgccgtcggccgccgcctggcgcagctcaagcttaccgaccacggctgcttcttaaaccgggttattcgcagccagatcgagatgcctatcgacgataacgtcgtactgaacaaaggcgacgtgctgcaggtcagtggcgacgcccgccgcgtaaaaaccgtggccgaccgcatcggctttatctccattcacagccaggtgaccgatctgctggccttctgcgccttctttatcgttggcctgatgatcggcatgatcaccttccagttcagctccttcagcttcggcatcggcaacgccgccggcctgctgttcgccggcatcatgcttggcttcctgcgcgccaaccacccaaccttcggctatatcccgcagggggcgctgaacatggtgaaagagtttggtctgatggtgtttatggccggggtcggtctcagcgccggggccgggatcaataacgggctgggcgccgtcggcggccagatgctggcggcagggcttatcgtcagcctggtgccggtggtgatctgcttcctgttcggcgcctacgtgctgcgcatgaaccgggcgatgctgttcggcgccatgatgggagcccgcacctgcgccccggcgatggagatcatcagcgataccgcgcgcagcaatattccagcgctcggctacgcaggcacctacgccatcgccaacgtgctgcttacccttgccgggacgctcatcgtgatcatctggccagggctacaataa

SEQ ID NO: 268901 - DNA, 1053 bp, Klebsiella pneumoniae
atgaaaaagaaaacacgttttgcctttaacgcctatctgcagcagctggcgcgcctgaatggcgtagaagttgaggagctgtccagcaagttcaccgttgagccgtcggtgcagcagacgctggaagaccagatccagcagtccgccgcattcctgaccatgattaacatcattggggtgaatgaacagtcaggccagctgctgggtctgggcgtcggtagcaccattgccgggacgactgacacgaccacgcaggagcgcgaacccaccgatccgacggtcatggtggatgttgagtacaagtgcgagcagaccaactttgatacggtgctgacctacgcaaaactggacctgtgggcgaaattccaggatttccaggtgcgcatccgaaacgccatcgtcaagcgccaggcgctggaccgcatcatgatcgggtttaacggtgtgaagcgtgccaaaacctcaaaccgtgtcgctaacccgctgctgcaggacgttaacaaaggctggctgcagaaggtccgagaagatgcggcagattgcgtaatgggcagcaccacggcagaagatggcaccaccaccgcagacccggtgaaagtcggcaaaggcggtaaatatgccaacctggatgcactggtgatggatgccgtcaatgagctgattgacccgattttccaggatgatgctgatctggtcgtgatctgtggccgcgagctgctgtccgacaaatatttcccgctggtcaataaggaccaggaaaacagcgaaaagctggccgctgatctgattatcagccagaaacgcatgggtggcctgcaggccgtccgcgccccgtcattcccggctaacgccgtgctgatcacccgtctggataacctgtccatctactggcaggaagatacccgccgccgttcggtcattgataacccgaaacgcgatcgcatcgaaaacttcgaatccgtcaacgaggcgtatgtggtggaggattaccgctgcgtggcactggtggaaaacatcaccatcggtgacttcagcgccggagcaggggagtaa

SEQ ID NO: 268902 - DNA, 192 bp, Klebsiella pneumoniae; identical to SEQ ID NO: 38528

SEQ ID NO: 268903 - DNA, 180 bp, Klebsiella pneumoniae
atggcttaccggtccactgacccgtaccaggtcctgagcatcgaagtgctgcccgttccagactttctgcgggatgcggactttgatggtaccggttgggtcgcggaacgtataccactcgtcctgctgctggctgacaacattgccttccagtgtgatccacgccccttcgtgcattga

SEQ ID NO: 268904 - DNA, 189 bp, Klebsiella pneumoniae
atggaaatcaacatcattactttgatgaaagctatcattggcggtgctggattaggattcgcacttcctggcggcttatctttcgttattcctgcgtttaccgtaacggcaggaattgcctatggttttgctttagctggtgctgttgctctgccagctatctatgctgccaggaaatttgctaactaa

SEQ ID NO: 268905 - DNA, 330 bp, Klebsiella pneumoniae; identical to SEQ ID NO: 120908

SEQ ID NO: 268906 - DNA, 732 bp, Klebsiella pneumoniae
atggctgactggtttattgcgaccgaaggcgtgaaggtggtgaaggacggcgccagtctggcacctcaaatcatcacggcagtaacgtcgattggcgcggccctcgggggcgtcgcgctgacgcattacttcacccgcaagcgtgaggaaagagcggcagaagcgaaacaggccagtgaacgactttttattgccacagagcttgtctttttgctcgaacaatttgccgaagcctgcgccggggtcgcaaccgatcatggctactcaaatcaggacaggattaccgtaccggaaaccactgttccgaatctcagttactccgcagtcacaggcgactggcgggttttaccggcgaagctgatgtaccacatccgggaattgccggttattcagggagaggccgatcgcgccatcgccgctgctgaagcttaccctcctggttacgacgaattttttgaggcacggcagtaccagtacacccgcctcggcctcaaagccatcatccagtcgcgccgtttgcgacagttcgcaggcttacctgacactcgcctcgatgcttctccctggtcggcgcagaatgtgctctggaaggagtggcgtcttgaaagaaagcggcgacatgcgcatgcggtgctgatggctcagtctctggcgacgttcagaattgtgaataagctgcgagatgacaagaggaaaggccctcaagccgttgaaggtgataatgaggaataa

SEQ ID NO: 268907 - DNA, 348 bp, Klebsiella pneumoniae; identical to SEQ ID NO: 120905

SEQ ID NO: 268908 - DNA, 279 bp, Klebsiella pneumoniae; identical to SEQ ID NO: 120904

SEQ ID NO: 268909 - DNA, 639 bp, Klebsiella pneumoniae; identical to SEQ ID NO: 120903

SEQ ID NO: 268910 - DNA, 972 bp, Klebsiella pneumoniae; identical to SEQ ID NO: 120902

SEQ ID NO: 268911 - DNA, 1272 bp, Klebsiella pneumoniae; identical to SEQ ID NO: 120900

SEQ ID NO: 268912 - DNA, 429 bp, Klebsiella pneumoniae; identical to SEQ ID NO: 120899

SEQ ID NO: 268913 - DNA, 774 bp, Klebsiella pneumoniae; identical to SEQ ID NO: 120898

SEQ ID NO: 268914 - DNA, 582 bp, Klebsiella pneumoniae; identical to SEQ ID NO: 208241

SEQ ID NO: 268915 - DNA, 468 bp, Klebsiella pneumoniae; identical to SEQ ID NO: 120896

SEQ ID NO: 268916 - DNA, 423 bp, Klebsiella pneumoniae; identical to SEQ ID NO: 120893

SEQ ID NO: 268917 - DNA, 780 bp, Klebsiella pneumoniae; identical to SEQ ID NO: 120892

SEQ ID NO: 268918 - DNA, 501 bp, Klebsiella pneumoniae; identical to SEQ ID NO: 120891

SEQ ID NO: 268919 - DNA, 255 bp, Klebsiella pneumoniae; identical to SEQ ID NO: 120889

SEQ ID NO: 268920 - DNA, 330 bp, Klebsiella pneumoniae; identical to SEQ ID NO: 120888

SEQ ID NO: 268921 - DNA, 1986 bp, Klebsiella pneumoniae
atgacagttgcagatgttaaatcaaaagcaccaaaaaaaaccagtaagaataaaactgccggaaacgaggcgctgaaagctgccctcgatgcggcagtcattgaatatgttccgctgaccgatctcattaaatcaccgctgaacgtgcgcacgattccctacaccaccgagagcgttaagcgactggctaactccattgaaagcctcggactgcttcacaatctggttgtccatgccctgcccgagggaaaatacggtgtggcagcaggtggtcggcgtctgactacgctgacgctcatgtctgaaatggggcgtatcaaaccggattatcaggttccggttaaacgtgtcagcgacgagcttgctgttgaggcttcttacgccgagaacaacgagcttgaaaccatgcaccctgccgagcagatcacagcgtttggtacgctggcggcacagggaaaaacccccgcgcagattggtgaggtgcttgggtacggttcccgccacgtccagcgcatgctcaaacttgccagtcttgcaccgtcactgcttgcacttctggcagaaggtcagcttgatgttgaacagtgtcaggtgttgtgtcttgaaagcgatcctgagcgtcaggttgctgtttacgaaagcgtaaaggaggaatggggacgcactaccgtaaacgcacttaaaaatcgtattacggaacgtgaaatttctgtctcgcatccacgtttcgcatttatcgggcgggaagtttatgaagccgcaggcggaattgtccgtgaagatctgttcagtgagcaggaaggagacggaacagtagacagtctgcttgttgaacgtctggtactggaaaaacttgaattgatcgctcaggaaatccatcaaaaagagggctggatgtggggtaccggacgtctggctgcaattaacctttacggacctgacggaaaggactaccgcattctgccggagccagatgcaatctacagcgaagatgacagccgccgtatcgatgaactgtccgacaaatttaacgctctggatcctgacagtgatgaagccgaggtcattagcagcgaaatatccctcattgaacatgccgctgagcttcgtgggtggacaaaagatctaaaagcaaaatcaggcgtggtagtgagcttcatgcacggtgcgcttcgtattcagcgtggtatatgccgcatgtctgatttacctgaccatgacagtaacggggaggattccgcgcagtctcctgccgtgactcatatgcatcgacctgatgcagcagaagggatcagcatcccgctgctcaccaaaatgtcatccgagcgcactctggcggtacaggccgcgctgatgcagcaacctgaaaaggctgtggcgcttatggtctggcgtatgtgtacctgcgtctttgctggatgtgtgaccacgccgcatccgttccgtatcaacctgaccgtttctcacagcagcctcactgagaacgccccgtccggtaaagaaggcgcagcgtttgaagtcctgatgaccgaaaaagagcgcctgaaaaccctgctgccagcaggatgggagaaggacttcacgaccttcttcgccctgaacggagaggtactgatgtcattgctggccttctgtgcggcttgttccgtagatggtgtacagacgcgtgataatggacacacatcacgcagccctctcgatacggttgaggccgcgataggttttcaccttcgcgactggtggcagcctacaaaagagaactacttcggtagcctgaaacattcacagatagtcacttcacttaaagatgcaggtctgactggtgccgctgctgacgcagaaaaaatgaagaaaggcgacgcggcagtgcatgcggagttctttatgaagcagaaccgttgggttcctgcatggttacagtcaccgcagcctgatgcaaaagacagcaccgataccgacactgacaacgcggcaattgccgcttga

SEQ ID NO: 268922 - DNA, 423 bp, Klebsiella pneumoniae; identical to SEQ ID NO: 120886

SEQ ID NO: 268923 - DNA, 732 bp, Klebsiella pneumoniae; identical to SEQ ID NO: 94600

SEQ ID NO: 268924 - DNA, 231 bp, Klebsiella pneumoniae; identical to SEQ ID NO: 94599

SEQ ID NO: 268925 - DNA, 360 bp, Klebsiella pneumoniae; identical to SEQ ID NO: 94596

SEQ ID NO: 268926 - DNA, 264 bp, Klebsiella pneumoniae; identical to SEQ ID NO: 94595

SEQ ID NO: 268927 - DNA, 831 bp, Klebsiella pneumoniae; identical to SEQ ID NO: 94594

SEQ ID NO: 268928 - DNA, 267 bp, Klebsiella pneumoniae; identical to SEQ ID NO: 94593

SEQ ID NO: 268929 - DNA, 243 bp, Klebsiella pneumoniae; identical to SEQ ID NO: 120873

SEQ ID NO: 268930 - DNA, 567 bp, Klebsiella pneumoniae; identical to SEQ ID NO: 120872

SEQ ID NO: 268931 - DNA, 336 bp, Klebsiella pneumoniae; identical to SEQ ID NO: 94589

SEQ ID NO: 268932 - DNA, 2700 bp, Klebsiella pneumoniae
atgatcccggttattccaccgaaacgacaagacggcaagtcctcctttggggacctggtgtcgtacgtttctgttcgtgatgaaccgcgcgatgatgatttaatggaagccgtgaaagcttccggaacaaagccagaaatgccgcacagcagtcgcttttcccgtctggttgactacgctactaaactgcgcgatgagtcgtttatctcgctggttgacgtgatgcctgacggcggggaatgggtgaatttttacggtgtgacctgtttccacaattgcacatcaattgaaagtgcagctgaagaaatggagttctccgcacgtaaagcgaagtttgcccacaacaaaagcgaccctgtattccactatattctgagctggcaatcgcacgaaagcccgcgtcctgaacagatttacgattcggtcagccatacactttcccgtctcggtttagcgggccatcagttcgttgctgccgttcacactgacacggataacctccacgttcacatcgctgtaaatcgcgtacatccggagactggttatcttaaccgtcttgcttacagccaggaaaaactgagtaaggcctgtcgtgaactggagctcaaacatgggttttcacctgacaatggttgctatgtgattgcccctgataatcgtattgttcgtcgtacttctgttgaacgcgatcgtcaaagtgcctggaaacgtggccgtaatcagagcctgagagaatatatcgctgacacggcaatagctggtttacgggagtcaccggtgaccgactggccttctctccatcagcgatttgcgaaagaaggtctgttcctgacaaaggagagcggcgagctaaaagtgaaggacggctgggaacgtgaacgtcctggcgttacgctttctgcgtttggacacgcctttgataccgataaacttattcgtaaactgggtgagtttattcctcctgcacaggacattttctcgcaagttccggctgtcggccgctatgaaccagacaagattattatgccgtctcgccctgaacggatgacagagaaagaatccttatcggactatgcgatcgcacgtttacgggcgccgctgattgcacttgatcaggatccaacgcagcgaaccatacagtcagtgcatacgcttctggcacagtctggactgtatctgaaagaacagcatgaccgtctggtaatctgtgacgggtatgactcaacgcgtacacctgtcagggcggaacgtgtgtggcctgcgctaacgaaggctattctggactcgtataaaggaggctggcagccggtaccgaaagacattttccagcaggttccccctgcggaacagttcaccggcggcggtctggaagccaccccagtttccgatcgggaatggcgaaaactgcgaacaggttcgggcccacagggggcgctgaaacgtgagattttctctgataaggaaagcctctggggctatgcggtttcacactgccgtcaggatattgagacgcttatcagtagtggtgaatttacctgggcacgctgtcatgagctactggcgcgtcaggggctgttgctgatgcgcgagcagcagggcctggttgtgatggatgcttacaatcacgaacagacccctgtaaaggccaaccacgttcatcctgatctgacgcttgcgcgtgcggaacctcatgctggttcgtttgtttcggtgtcggcagacatctttgaacgtgttaagccggtcagccgttacaatccggaactggccgtgagcgaccgcgatattccgggtatgaaacgtgatcctgaattgcgtcgccagcgtcgcgaagcgcgcgcagctgcgcgagaagatctgaaagcccgttatgcagcctggcgggctaactggcagcgccctgatttgcatggccgtgaacgttaccaggcgattcatgacgaatgcaggatgcgtaaagcgcgcatccgcatcgaacatcgtgaccctctggtgaggaagctgcattatcatattgcagagcttcagcgcatgcaggcactgattgcgctgaaagaaaccatgaaggctgaacgagctgagcttatcgggcaggggaaatggtatccgccgtcttaccggcagtgggttgaagctgaagcggtgaaaggtgacaaggctgcgatatcgcagctgagaggatgggattaccgggatcgtcgtggtaatgcggtgaaatccacaacagacaaccgatgtgtcgttatctgtgagccaggcggaacgccgatgtattctggtgttcctggcctgcgggcttcactgaagaagaacggtcgcgtccagttccgcgatccggatacaggccgccatatttgtaccgactatggtgacagggttattttccggaacagtggcgattacgatgcgcttaagcgggatatggtcaaagtcgcgccagttctcttcagccgttctccgagcgtcgcgatggcgccagaagggaataatgaacagttcaatacagcttttgccaaaatggtggcatggcacaatgtgaaccatggcgatgatggtgaataccatatcgcgcggccggatgtagaccagctgcgtgttgagcatgagcaacaattcacaaatgtgttgaatcaaagcagttatgctccggatgccaaagcttcacatcagaatacctgggaacctccgacaccaagatag

SEQ ID NO: 268933 - DNA, 492 bp, Klebsiella pneumoniae
atgcaattctacacagtcagcgattcatacattgcacatctaaaaggtgtcgaagcccgcgtgcctgataactatggtggtagcagggcatttgtcggtattgttcttgagatcaatggccttaaatatctagccccattgacttctcacaaacccaaacaggatcggattccttcttctgcaccaagtgctttcaagctgcacgaacgtaccgacccgaccaacaagcttggaatgatatgcctcaacaacatgctgcctgttactgatgacgttatcgagctactggatatttctgctcagcctgcgcgctatcaaaggatgctatataagcaatacgagtatattaaagtgaatatcacagaaatagaatcccgcgcgcagaatttgtacaaaattgtgacagttgatcagaataagttctttacaagtatttgttgcgatttcaaggtccttgaagaggcttgtaatagttttaatcgtcccacttga

SEQ ID NO: 268934 - DNA, 750 bp, Klebsiella pneumoniae
ttgaaatcggttgagaattttttttggaagatttttcgcgtttttttcccagaacaacgtaaatgggcctccagggtgctgataaccgcagggatatcgatgttgtcggggccactctgggttccctatgtgaacgcatttttgtccagatacgtacgcattgatataccagatgcgagcacgactggatgggtatgtctggtgctggggctgctctgtttgatagcgaacgaagcactggaccgctggccatttaaacagaagatgactgcagaggacaaggaagacaagaacacactttatgagttattcagccagatgcatttgcctacttatgactggtttttccatcatgggaaatcatcaatggtttatattccggccctgcattaccaccatggcgttgaggggtatattcaggcaacccagttccaccttcatgatcagaaaatcagagaatctgtcgagttgttttaccaatcatgctcgcgtgcattttcttatggattttactttgctgaaaccagtaaccccaatttgcagaagttcagcaatcagcacaatgttcatactgatccgaacgcaaaggctgctcacgatgatttcctgaatgcggtatatgaagcagaagggcatctgaaagacctgtacaaagcggttaaaactaaatatccggactttgatatggaggcaacgagtaaggccgccagggatgagcagcgggctctatccgaaacaactgggttttga

SEQ ID NO: 268935 - DNA, 270 bp, Klebsiella pneumoniae; identical to SEQ ID NO: 94585

SEQ ID NO: 268936 - DNA, 2301 bp, Klebsiella pneumoniae; identical to SEQ ID NO: 120865

SEQ ID NO: 268937 - DNA, 1185 bp, Klebsiella pneumoniae; identical to SEQ ID NO: 94583

SEQ ID NO: 268938 - DNA, 1209 bp, Klebsiella pneumoniae; identical to SEQ ID NO: 94582

SEQ ID NO: 268939 - DNA, 633 bp, Klebsiella pneumoniae; identical to SEQ ID NO: 94581

SEQ ID NO: 268940 - DNA, 2160 bp, Klebsiella pneumoniae; identical to SEQ ID NO: 120861

SEQ ID NO: 268941 - DNA, 543 bp, Klebsiella pneumoniae; identical to SEQ ID NO: 94579

SEQ ID NO: 268942 - DNA, 1203 bp, Klebsiella pneumoniae; identical to SEQ ID NO: 94578

SEQ ID NO: 268943 - DNA, 3054 bp, Klebsiella pneumoniae; identical to SEQ ID NO: 120858

SEQ ID NO: 268944 - DNA, 864 bp, Klebsiella pneumoniae; identical to SEQ ID NO: 94575

SEQ ID NO: 268945 - DNA, 405 bp, Klebsiella pneumoniae; identical to SEQ ID NO: 94574

SEQ ID NO: 268946 - DNA, 525 bp, Klebsiella pneumoniae; identical to SEQ ID NO: 94573

SEQ ID NO: 268947 - DNA, 771 bp, Klebsiella pneumoniae; identical to SEQ ID NO: 94572

SEQ ID NO: 268948 - DNA, 1308 bp, Klebsiella pneumoniae; identical to SEQ ID NO: 94571

SEQ ID NO: 268949 - DNA, 981 bp, Klebsiella pneumoniae; identical to SEQ ID NO: 94570

SEQ ID NO: 268950 - DNA, 702 bp, Klebsiella pneumoniae
atgacaaaacagacacaatcagccccccctgcaaaggggcgggccccctcccctgcggaggatccgctgaaaaacgccgtgaacatgatgaaaacggcagaaaaacgccagaaaatggcaccagagctgatgaagagtaacctcctgctggggagtggcctgcttatcagcatcatcctcaatgctggcctgacctgggctttgatacaacagccacgggattactttgccaccgacagtgggcgcctggttcgcctggctcccacttccgaaccagcatggagccaggacgatgccatcgcctttggcagcaaggctctgatgcgggcctttaacctggacttcgttcattatcgtgaacaggtatcctctacagcatcgctgttctctgaagcaggacacgccagttacatccaggcgctaaccaactccaatatctacgatgccctgaaacgcgagcgtatgaatcttaccggctccgtaggggctggtgtcgtcatccggcgtgggcgtctgtctgacggaacctggttctggacaatgcagtatccggtacgtttgcgcctggttgggcagaccaccagcaagcctgaacaaccgtttgttttcgaaattaccatccagcgcgtagatccacgacagaaacccgtcgggatggaaatccgccagatgatctcacgcaacgctccccgcaacctctga

SEQ ID NO: 268951 - DNA, 351 bp, Klebsiella pneumoniae; identical to SEQ ID NO: 94568

SEQ ID NO: 268952 - DNA, 3543 bp, Klebsiella pneumoniae; identical to SEQ ID NO: 94567

SEQ ID NO: 268953 - DNA, 288 bp, Klebsiella pneumoniae; identical to SEQ ID NO: 94566

SEQ ID NO: 268954 - DNA, 1161 bp, Klebsiella pneumoniae; identical to SEQ ID NO: 94565

SEQ ID NO: 268955 - DNA, 807 bp, Klebsiella pneumoniae; identical to SEQ ID NO: 94564

SEQ ID NO: 268956 - DNA, 474 bp, Klebsiella pneumoniae; identical to SEQ ID NO: 94563

SEQ ID NO: 268957 - DNA, 726 bp, Klebsiella pneumoniae; identical to SEQ ID NO: 120844

SEQ ID NO: 268958 - DNA, 492 bp, Klebsiella pneumoniae; identical to SEQ ID NO: 120843

SEQ ID NO: 268959 - DNA, 837 bp, Klebsiella pneumoniae; identical to SEQ ID NO: 94561

SEQ ID NO: 268960 - DNA, 1161 bp, Klebsiella pneumoniae
atgtcttctgttgcgcgtttaagaaaaatgtccctcagtcggggactcgataaatattacgagtcggtatcagttcacaaaaagggccatcttcaggaattttaccgggtcaatgtgattaaacggcacccactggccagccggaacatggatgagatcaccacagttgatattgcagcctaccgtgatgaaaggctgacgcagtgcaaccccaggactgggaaccctatctctggcaatacagtaaggcttgaactggcgctgttatcatcactttttggaattgcacgagtggaatgggggacatgtcgtagcaatccggtcgaactggtgcgtaaacctaaagtatccaaaggtcgcgatcgccgcctgacatccagtgaagagcgcagactgtcccgttatttccgcgaacgaaacttaatgctgtatataatttttcatctcgcgcttgagacagccatgcgccagggtgaaatccttaacctgcaatgggaatacattgacctgcagcacggcgtagcacatctgcccgataccaagaatggctcatcgcgagatgttcctctctcacgtaaggctcgtaacatccttcagatgatgccggcccagctaaaaggtaagttgttttcctatacgtcatccggtttcaaaaacgcctggcgaaatgctctcaaggaactctctatcgaaaatctgcattttcatgatcttcggcacgaggccatcagccgtttcttcgaactcggtacgctgaacgttatggaggtcgcagctatatcaggccaccgctcgctgaatatgctaaagcgctacacccatctgagagcttaccagctggtcagcaagctggacgcgcgacggcgccagactcaaaagatcgccccctacttcgtgccctatcctgcccaggttgagcaggacagcgaagagtcaggtgacatcaaggtaatgctatgcgatttcgaaaatctgacggtatcagcgcctactcgcgaacttgcattggcccgcgccagcgaactgctactgcggacactggctcttgcagcccagcgcggcgaacgagtccccgcgccgggggagcttcctgtcaggacaaacaatcacatcatgatatgtccgcttaaccccgaccaggcactgtcggccctggtataa

SEQ ID NO: 268961 - DNA, 228 bp, Klebsiella pneumoniae
atgactaacagcaaccgtattaagctcacatggatcagcttcttctcctacgccctgaccggcgcgttggtgatcgtcaccgggatggtgatgggtaacattgcggattatttccatctgcccgtttccagtatgagcaacacctttacaccgtattctgcaagaacggtgatatcacgaatcccgagctgtctggcggtaaaatgccggacgccggaaggaatatga

SEQ ID NO: 268962 - DNA, 1197 bp, Klebsiella pneumoniae; identical to SEQ ID NO: 94664

SEQ ID NO: 268963 - DNA, 675 bp, Klebsiella pneumoniae; identical to SEQ ID NO: 94663

SEQ ID NO: 268964 - DNA, 558 bp, Klebsiella pneumoniae; identical to SEQ ID NO: 94662

SEQ ID NO: 268965 - DNA, 615 bp, Klebsiella pneumoniae; identical to SEQ ID NO: 120933

SEQ ID NO: 268966 - DNA, 1095 bp, Klebsiella pneumoniae
atgcgtgaaatgcacttcctgaaacgactccgatataacctggttcgtaagacgttcagcggtcagtatcgtgttcagttctatgatgcgctgcggtttctgattgaaaaccggcagaaactaaagccttcactggagaaaatgcgcaatgcatggacgaacttcggccagaactggcatccctacgttgagctgacggacgactgtattgatgcgttaagggaaaacagcggcgaaaaaacgctggagcgtacactcacccggtggctacctgccgcagaagcatccgttataagcgccggcatacgcagtgagtcacttccacgctcactaagatacgcctgtgccctgacccacgcgggtaagcgtattcgcgcagctgtatggcagatggccatctatccgattggttttgccatcatgttgtccagttccatctatgtactgaatgccgagctacttcccacgctgacagaaatcagcccgccagagaactggaccggggcgctagggtttctttacgggatctcagtgtatttcagtgagtatggagtgataaccggcatcgccgccaccgctttaattatctggacggtctggtcactcccgcgctggcatcgccctgacaggcttcgtcgtatattcgacgggctgatgccatggtcggtttataaggatattcagggcgcgaccttcctgttgaacatcggtgcactgctacagtccggcgtaagaaccaaagacgcgctggagatcctgctggaaacggcatccccctggcttgctgtgcatattgatgcgattaccgaacatgtgcgtgaaggtaaacatttcggactggctctgaaggactgtggttacgattttccgtcgcaggaagcggccaacttcctctcccttttgcagggtgatggagacgatgaaatcatcattaactacggacagcgctggcttgaacaaaccctggagcgcgtagcaaagcgcgctgttgtaatccgcggactcatgttcctggcaatgatcctgatgcttctgcttctggtccttgtcgttatggatattaatgcccttaacagctcgtcgggctctttttaa

SEQ ID NO: 268967 - DNA, 1560 bp, Klebsiella pneumoniae; identical to SEQ ID NO: 94659

SEQ ID NO: 268968 - DNA, 516 bp, Klebsiella pneumoniae; identical to SEQ ID NO: 94658

SEQ ID NO: 268969 - DNA, 1305 bp, Klebsiella pneumoniae
atgaaggatgaggattacctgtttacaatccgggatggaaaatcccgcagccgttactggctggcggggatggactgggcgccaacggaaaaacagaaatttcggctgccgtcatttcaactaagaaaatcacgttccggaagaacagacggcgttggcgtccacacctcaaccggacaattcaatacacgggaaaaagggcaatcagtcgcagggagtggcagattgcccgtccgttatcgacgtcaccagctcttttcgctggcactcgcgttctgtgccagcacacgaaatggatacggcatttatcggctgagtagtaccgacttcgtgtttctggccagtattaatggtgtgcctgccgtcactgccgataaaacagggagtgcggacaaaatgcaggagctgctgacactgttcctgagcatgaacgaaccgcccccagaaggctgggactgtctggcatcagtggaaaccccccttgatgctaacagtctctttgccggactatctgcacgcaggcgacagcaatgccgtgtgcatgtagatgggctccggagacagcgctggttactggcttgcgcgatactgctgctcggctcaggcgccattgcctggtggcagacgaccacaccaccggaggaaccggtactcaccgctgaagaaatacaggccagggcgcgcgcaatgttcgccagtcaggcaaaacctaaggttttgcctcatccctgggcacgcgaggtaacagcccaggctctgatcgaggattgtcagagaaagaccgatccggcgctacatgttctggggagctggaaactggcatccgggacctgctctcctgacgggataacccttttgtaccagattatgcccggtggcacagttgaagggtttctcgctcgcagtcaggaggtcttcggtgtcacgccattattcaatctcaaggagggggggcgggaagcccgaatttcattaccgcccccggacagaccactcagagatgaagcagtgcctgacagttcattgcagctcatccccatcctctcctggttccagcgtcagcaaatcacactcaacatcatcgatgtagccatgcctccagtcctgccggggtcgaacggagaaccgcctcctgtgcaggactggcaggaatacgcgtttagtttttccgcgcccctccccgccatcatcttattcgacggtctggatgaaactggtatccgacttacccgtttaacattcgagctgaacggaagtgcgttcagctataccactgaaggtaaaatttatgcgtcagcaaagtaa

SEQ ID NO: 268970 - DNA, 1677 bp, Klebsiella pneumoniae; identical to SEQ ID NO: 94656

SEQ ID NO: 268971 - DNA, 438 bp, Klebsiella pneumoniae; identical to SEQ ID NO: 94655

SEQ ID NO: 268972 - DNA, 1098 bp, Klebsiella pneumoniae; identical to SEQ ID NO: 208319

SEQ ID NO: 268973 - DNA, 507 bp, Klebsiella pneumoniae; identical to SEQ ID NO: 94653

SEQ ID NO: 268974 - DNA, 627 bp, Klebsiella pneumoniae; identical to SEQ ID NO: 94652

SEQ ID NO: 268975 - DNA, 672 bp, Klebsiella pneumoniae
atgcaatccacccaggaacaggtcagccatctcttgtggtgcattctcgtagccttacgtacggcagtcgaaaaccatcacataacctcagagcgtggcaaacgtagattcatcacagaatggctaagcggagcacgaagaataccaacattcaaagggatgggtagcgagtttatgactatccggcagttgctcgaaaccgaacggaatcgtcccattgatgacgtcctgactgcgctctggaccaacgctgtttcaaccgggaactgtgatctgtttcgttttcgggctgtccttaattcacttctcgaccttggctggaagcactgcctttgcccctggcctgagcaggttgtaactgaaatcatggaacgccagcggaatcgtaagaaccacatcctacagttcacccgtatggaagaagcatttaccgcgacaggctcaatgacttcccccgtcacgcttcaactcctcctgaaaaaaaatgaagatgatgaggtagaaaagtctttctatctcgatcgtttctctgttgtccgtggccgcgatatctcactacccaaagccactcttcgcacactctatatcggacatcacacactgccggagtcagcatggggtgcacgtgaaggtgtccgctacggggatgtatggcgccctgaccttcattaa

SEQ ID NO: 268976 - DNA, 540 bp, Klebsiella pneumoniae; identical to SEQ ID NO: 120922

SEQ ID NO: 268977 - DNA, 261 bp, Klebsiella pneumoniae; identical to SEQ ID NO: 94649

SEQ ID NO: 268978 - DNA, 201 bp, Klebsiella pneumoniae; identical to SEQ ID NO: 94648

SEQ ID NO: 268979 - DNA, 249 bp, Klebsiella pneumoniae
atgcatgcgaaggctgatctgcccggtctctttatcttttttaacaaggcgattgtaggcataacccagttgccctcccagcgctttataatgtgccggtcggaaccatactggtttctcgcattttgcttttgtgggatgctcgccacggcgacgcctggtttgcttcttttctgcgggaaccaggaaagagctgttgttgccgttatcaacatcctgccagaatcgaatttgttcctggggatctaa

SEQ ID NO: 268980 - DNA, 537 bp, Klebsiella pneumoniae
gtgatccctgaaacggaagtcaccgtatcccgtttgtcccgtctcatcgacgagcaggtcaggtttggtacgctgggcgtttcagaagaaaaacaatgggaccgtgaaagcaaatcctggctgccaaaatatgtctatatcacgcttgttggttttcagatgctgggcgttgatctcgttaaactggaagaacagcagcagaagaaactcaaagaaagtgaggaacgccgcgcacttatccgggaggggttactgcgtgaggatgaagagctgtccgtacatgcggccagaaaacgctggtatgaacagaaaagtcttgaggccctgcgctaccgccggcagcaggctgcggcgcgcaagcgtgcaaaccgtctcgaaaggttgccgcgcgatcagcaaatagaagatatctcacagtggcttctgaagaccatgccggcagatgaagcctattactgttcaagtgaacgccttgaaaaactggctgttcagcatctttaccagctgagactggcgctggaggccccgcctccctga

SEQ ID NO: 268981 - DNA, 330 bp, Klebsiella pneumoniae
gtggatgaactctacaccatgccccttttgcttttcttctatatatacgtctatgacacggttatagacccggactcagcccaagtagatcaaatgcgtcattgtgaaatcatgcaagctctatggctcagtactggcaatattagaaaagaagatatgcataagttcagtactaaagaattcgattcacttggattgcttagtaataaaactcgtgcagaacaggcagaagaaaggatagagaaggagaagcagatcgcagaagaacaagcaaaacaacagcgtgcaagtatgctcgcatggatgggagtaaagccagatggcaaataa

SEQ ID NO: 268982 - DNA, 381 bp, Klebsiella pneumoniae
atgtgcatatcaataatcctacacttcccaaaaggctctacaaccatcacagacggcattatgtcaggctatgactattcacgtgatgatgtactaatatcggctcacatagcgattgatgaagcctacagcctattcattgatgactattcaataacagccaaacataaatatatcagtataaactacaagcatagctacacaataggccgatggtggtatcactggaatagtattgataactatgaaggtagtgaacgtacacatctggattatctacacggactaataaaagaactattagaacatgaatctttaaacggtagacctatcaatagctacagagtgtcagtactactcaataaaataaaagatgagtaa

SEQ ID NO: 268983 - DNA, 198 bp, Klebsiella pneumoniae; identical to SEQ ID NO: 94790

SEQ ID NO: 268984 - DNA, 198 bp, Klebsiella pneumoniae; identical to SEQ ID NO: 94790

SEQ ID NO: 268985 - DNA, 198 bp, Klebsiella pneumoniae; identical to SEQ ID NO: 94790

SEQ ID NO: 268986 - DNA, 198 bp, Klebsiella pneumoniae; identical to SEQ ID NO: 94790

SEQ ID NO: 268987 - DNA, 753 bp, Klebsiella pneumoniae
atgcccgtagcactaaactcccagctaggtagtaaagagcaggctgatgcgcggctggcacaggcaatcatgtctgcaatgcgcgtttccatgcctggcatcatccagtcgtttgatccggatgccgtcactgctgtagttcagcccgcaattaaaggcgtagaacaggacgaatcaggcgcagatgtgtctgttaacattccgctgctggtggatgtgcctgtcgtattccctcgcggtggaggctgcacgctgacgtttcctgttaaggctggtgatgaatgccttgttatctttgcggaccgctgtattgatttctggtggcagagtggcggggtacaggaaccagtagacgggcgcatgcacgatttatcggatgccttctgtattgtcggcccacagtcgcaggcgaagaaaatcagtggcatcaatactacagccgctcagtttagaagtgatgacggcagtacttatctggaaattgacccaactacgcagaagataaaaatagtcgcacccggtggccttgatgtcattacgccgatggccgacttttcagaacaggttactattcgtggcctgctgtcctggatgggcggcatggtaggttctgttgcatcaggaatcgcatccaaaattactggcgctgttgagtttattggctccgttaaagctaacggtaaaacgatcgatgatacgcacactcacggcggggtacagcatggcaccgacgacacagacgaggtgaactga

SEQ ID NO: 268988 - DNA, 678 bp, Klebsiella pneumoniae
atgaaagagcgcgggatgattttcaactctgaaatggtacgcgccattctttccaatcggaagacgcagaccaggcgggttatgcaggtacagccggaatccaaccagcttggcttgctgcttatcactgactcaactaagcacagtgacattggcaaataccactgggcggaatctaacgctactggtaaccacgtgcgttcaaagctcttctcgtgcccgtttggtgctgtaggcgatcgtatctgggtgcgtgaaacgttcaattctttttgggtcacggatgaagaaatagaggaaattcaggaggacatttcaaaagctgcagacctttgcgactacaaggccgattatccggatagcagccagccagcggaaggctggactccatctatccacatgccgcgctgggccagccgcattctgctggaaatcaccgacgtgcgagttgagcggttgaacgctatcagcgaagaggatgcgcgagcagaaggcattattgacggtggctgtcttaattgcggagaacctgagccatgcggatgcgccaacccagagcctgatgctacagatgcgtttgtctacctttggcaatcgatctacgggcaggaaagctggaatgctaacccctgggtttgggttattgagtttgaacgcgttgaaggcggtgcagcatga

SEQ ID NO: 268989 - DNA, 450 bp, Klebsiella pneumoniae
atgaccccggcggcactcggcaatgctggcggcaatatcctgttctctctgctgaataacacggcgctgaaatacgttggtttcggtctgggcgcggctgacagctccaatgcgttccagtccctggctgcgcataacattaacaccggtagcacgctggcgggcattccgtttacagggaaaatgttttcacagtatggcgaatatgcactgatgatcaccctgaacaacggcgttctcaaggtctattccggtatgactgataacccggaaactctgctgaccggatgtccggcatttgattacgtcatgctgggcagaaacagctcggtttctggctctacggtgtcaaactcaggtttctggggaggatggctgcagaaagccgtactgttcgattcggcgctgagtgacgcagatatgatcgcgcagtttgacctgctcgcataa

SEQ ID NO: 268990 - DNA, 705 bp, Klebsiella pneumoniae
atgaccccgattaaagaattaggcgaatgcattatcggtaccggtgaccgggaattttttttccgtccgtcgtttcgcaacatggcgcgaatcggtgagccagaggaaattgtccaggcgttctatgacttgtgcaatgacgaagcgacgccgttgcttcagcgagcggcagaggcctatatccgcgacgagtacagcagactgccatcttgcgtaacgcagtacatccagagcgggctacttgcgagaaaggcaatcatggcggctcacactgttatgtctgcctgctgcgatgacgatatcggcgaactgataggctggatgaaaccggctaaggccagtaagcgtagtttcgtctggcgtcgcggctctatgccaccggagaatatggtaatcgtcgcgcaaagcctgatgatgcatggcattgtaggaaaggcgaaggtgcgaaaactacagcgctacgaaacgaacgagaccacatcagaattccgcgcagccgactacatcatggcggcccgcaaccatttcggcataagccgggaagaggccgagaacctcacgatgacagagttcgcaatgatgattaacgccaaataccccaatcagagcggcttcacgcgcgatgagtacgatacggttatgaacgaagacgatcgccgctggcaggcgatgatggagcaggaacaagccagcaaaaccaaataa

SEQ ID NO: 268991 - DNA, 648 bp, Klebsiella pneumoniae
gtggccaccgccgatctgagcggcgcgacgaaagggcaactggtagcttttgcagagaacgcgcaattcaccgctacggcgcgcagccggggtagaaagaaagtttatagcgaggtcaaacaacgcatggttaacccggacgggccgccaatgagtggcagccagtcccgcgctaagggttcatcaatcgctctcgttcttcccgttgagtattcgacggccagttggcgccgggctctgctgtcgctggaagaccaccagaaagcctggctgctgtggaattacagcgacaatatccgctgggagcaccaggagacgatcacccggtgggcatgggagcaattcagcaagaagctggccggcgtacgcattgcgaagaagactgtcgatcgccttcgtcaacttatctggctggccgcgcaggatgtcaaagccgagctggcaggacgggagacgtatgaataccagtcgctggcggagctggttggtgtagcaaagtccacatggacagaaacctacctccctcattggctggcgctgcgcagcagttttgtgaagcttgatagcgacgctctcatggcgttaacgcgatcacgttcacaacaaaaggcgtcaaatttagatgtaagtcttgcaaaaccgaactga

SEQ ID NO: 268992 - DNA, 450 bp, Klebsiella pneumoniae
atgacaccggcggcactcggcaatgccggtggcaatatcctgttctctctgctgaataacacggcactgaaatacgttggtttcggactgggcgcggctgacagctccaatgcgttccagtcactagctgcgcataacattaacgccggtagcacgctggcgggcattccgtttacagggaaaatgttttcacagtatggcgaatatgcgctgatgatcaccctgaacaacggcgttctcaaggtctattctggtatgactgataacccggaaactctgctgaccggatgtccggcatttgattacgtcatgctgggcagaaacagctcggtttctggatctacggtgtcaaactcaggtttctggggcggctggctgcagaaagccgtactgttcgattcggcgctgagtgacgcggatatgattgcgcagtttgaattgttgtcttaa

SEQ ID NO: 268993 - DNA, 141 bp, Klebsiella pneumoniae; identical to SEQ ID NO: 259631

SEQ ID NO: 268994 - DNA, 942 bp, Klebsiella pneumoniae
atgttcctgcgctgtaacgttcacgataccggggccaccggtatcggtaatgattatcctgacaggtcttttgttctggactgccagacggataactgcggacgcctggcacctgacggcagcggcggtgcttccggtatcgggatcggcctgggtgccatgcaggacgaagccctgatagtggcacgcaccattaaccgaaacagcaaaaacttcggcattttctttgagcagcagcgcctgtcagggcccggtcagccttacgtttcccggcagattatcgtatccgatgccgtgtgtaccggaaacgggcatggcttcggcgactgtggcgcatccggactggtggtggtcaacggccagttcaatgacaacctcaaaaccggtatcagcattgacgctgggacgctggctaacaacggtatcgctccccgcccgggtaagaacgggctgatgctgaactgtcaggcggagcgtaacggggtgaccgggctccattatgactcgaccaaaattcaggccgatggcggctattcattctccgacatgcacatcaacgataacgcccaggatgcgattttaatcgaggctggcgctaacaccctggcggatgttcgcttcgacaatatggatatcaaaaataacggtcgttatccggtgaatgttgccagcggcacctttaccgacctcgacttcacgaatcttcgcatgctgcgaaatggcggtgataccgcgtttaagctggacggcaatatcacgcggggcacgattcatgattgtaagcttcgctcacagaatggcgccgcagcaattaccggcggaggtaatatcagcaatttcgacattgccgaaaaccagtacaccgacactaacagcaaccccatcaatcttaccggcacactgactaatgtcacttatggccgcaacccaggactggagtaa

SEQ ID NO: 268995 - DNA, 942 bp, Klebsiella pneumoniae
atgttcctgcgctgtaacgttcacgacaccggtgccaccggtatcggtaatgattatcctgaccggtcttttattctgggctgccagacggataactgcggccgcctggcgcctgatggtagcggtggtgcgtcaggaattggtatcggcctgggtgctattcaggatgaagctctcattgtggcccagtcgatcaccaggaactgcaaaaacttcgggatgtttttcgagcagcaaagactgtcaggcccgggccagccttacgttgcaaggcagatcatagtctctgatgtcgtcagcacgggtaacggccacggcttcggggattgcggcgcctctggtctggtggtggtgaacggccagttcaatgacaatctcaaaaccggtatcagcattgatgcagggacgctggctaacaacggtatagctccccgcccgggtaagaatggctcgatggtgaactgtcatgcagagcgtaacggggtaaccgggctccattatgactcgaccaaaatccaggccgatggcggctactcgttctccgatatgcatattcacgagaacggtcaggacgcaattttgattgaagctggtagcaatactcttgcagacataagttttgaaacacttaagattaatgataacggacgttatccggtgaatgtcgccagcggcacctttaccgacctcgatttcacggatcttcgcatgctgcgaaatggcggcgataccgcgtttaagttggacggcaatatcacgcggggcacgattcatgcctgtaagctgcgctcgcagaatggcgcagcagcgataacaggcggaggtaatatcagcattttcgacatcgccgaaaaccagtacaccgacaccaacagcaaccccatcaatctcaccggcacactgactaacgtcacctacggccgcaacccaggactggagtaa

SEQ ID NO: 268996 - DNA, 255 bp, Klebsiella pneumoniae
atggagcccggtcaccccgttacgctccgcctgacagttcagcatcagcccgttcttacccgggcggggagcgataccgttgttagccagcgtcccagcgtcaatgctgataccggttttgaggttgtcattgaactggccgttgaccaccaccagtccggatgcgccacagtcgccgaagccatgcccgtttccggtacacacggcatcggatacgataatctgccgggaaacgtaaggctgaccgggccctga

SEQ ID NO: 268997 - DNA, 195 bp, Klebsiella pneumoniae
atgaatcgagccccgcgtgatattgccgtccagcttaaacgcggtatcgccgccatttcgcagcatgcgaagattcgtgaagtcgaggtcggtaaatacgccgctggcaacattcaccggataacgaccgttatttttgatgtccatattgtcgaaacgaatatccgccagggcgttatcgccagcctcaattaa

SEQ ID NO: 268998 - DNA, 294 bp, Klebsiella pneumoniae
atgataaacgtgacgttcttcagccatgtactgcgccagcaactgagcgcgaaaggggagttctgccacgttaaaaagcgcgctggaatcgtcctggtattcatcactaccgaaagtttccacggtctcatcttgtaccaagtcgataggcgtattggcatcaaccagctcgccagtaacggcctcagaggttactccggcattatcgccgtgatgaacatcagcaggcgccagtcctggcttaagagtccaggtgcggccatcgtcgccgagctggtagcgttcgcaccatga

SEQ ID NO: 268999 - DNA, 327 bp, Klebsiella pneumoniae
atgggtgtagtcaggattgcgatcggttttattaccgccgccagcattcgtacctgcatctgttttcataaccgaagaaatgcagttaccggcagcccattccctggtgagtatgccgcggtcgatcgcgttagtagcgaaccacagctttgcaaactggatacgcttgccgagctcatgccgtttcccttcggggaagacttttttattggcactggtgaatttccagagcgccggcatatcgtattttttgatttcaggtatattctcggcggccagaatcagatcctggacggctgcgttatcagtgtccatttcaagaactga

SEQ ID NO: 269000 - DNA, 255 bp, Klebsiella pneumoniae
atggagcccggtcaccccgttacgctccacctgacagttcaccatcgagccattcttacccgggcggggagctataccgttgttagccagcgtccctgcatcaatgctgataccggttttgaggttgtcattgaactggccgttgaccaccaacagtccggatgcgccacagtcgccgaacccgtggccatttccagtgctcacaacgtcggaaacgattatctgtcgcgcgacgtatggctgaccaggccctga

SEQ ID NO: 269001 - DNA, 204 bp, Klebsiella pneumoniae
atgatgcttacccttgaacgctgcgaaccctgcgaaggggccggggtggcctgttattcggggtcgaccgtcacccacgtagggatcgtggtcagtatcggtggtctgttgcatgtggcggaatgcaacccgggtacgaacgtcacctttctgccgttgccgcggtttaagcgccgatttgtcaaagtggagttctggcaatga

SEQ ID NO: 269002 - DNA, 477 bp, Klebsiella pneumoniae
atggcgaataacaatgcggcgatggggtctactgaccactccctgtcgtcaactgcgtggaaggcagtgagcggcgtcgacggctccctgctgacgcctaccggtacggggacagccgggaccgattcctgggtgccgaccacgaccaactccgtgcggatcgacatatcgggaacagggaattacacactggtttatggtgagaatacgctgtttacgagcgcccgaaatccgggtgctacgccggtagcagaagcggcgctaagagtgctgcgcagactgatgctgttcccgctggcgggcctggtttccgatgattcgctgtcgtactcaaaaggaggcgaggtgatgacactgcggggcggtgcatattcgaacggtacaggcggcggtatcaacgcgctactcgctaaccgtggacgtacttcagttggtcaatctaactctggtgtccgtcctgtttactacaagccttga

SEQ ID NO: 269003 - DNA, 2622 bp, Klebsiella pneumoniae
atgtatcccgtatttgagaatggctcatgctgggtcaaggtggattttcacctgcatacccgggcagataaggaatttcgctatgccggcgaaagcgaccgatttattaccgactatgtgaatacccttaaagcggcggaagtgggactgggggttatcaccaatcacaataaatttgaccccggagagtttattgctctgcgtaaagcggcgcgccgtgaaggtatagggctgcttcccggcgtggagttatctgtcaatgatggtcaggccggcgtgcacacgctcgtggtctttgccgatgactggttcatcaatcctcagagaacgaaccatattcaaaacttcctgacggcctcctttgcgggaattgataattttgaaaacgaaaatgcccgctccattgaaaatattgtacagaccattcagcggctcgatcggtatgagcgggactactttatcgtgtttgcccatgttgaagcacctaacgggctgtggggaggaatgatcccaggcagaatacgggagctgtttgataatgaatctgttcgcagccggattctgggctttcaaaaggttatgacccgcgacctgcgctccaaaattcacgacattctcggagcccattatcctgcagaagtccagggatgcgatgccaaaacgctggagcacattggtgccagaaaagtcgccagctatctgaaactgggtgattacagttttgacgctgtccggtttgccctgcaggattttccgcaccgcgtcagcggggataagcctcacctgactcacagtcatatccgccagatagggtttgagggagccggttcgctcggcggaaccgtggtgaaattatctccggagctgaacaccctgattgggatccgcggcagcggtaaatcatccatacttgaggggatccgctatgccctgggcattgagtttggcgataaggcctctgaccgcgactacaaagaaaatctggtcagtaatttactgaaaagcggggggaaaatcaccgttgatgcggtgtgccgtcatggccggacctatcagataacgcgcatcttcggtcaggagccgcaggtcatttttgacggccaggcccggcacggggtggcgctacgggaaacggttctgcacaaacctgtgtattttggccagaaagacttgtccaataccggcgcgggatttgaacacgatctgattgaaaaaatggtcggtgagcgactggtccccgtacgtaacaaaatccggcagcagaatgccatcgtggtagacaagttacgcgagtttcgtcgtctgaaaacttcgggagaagcactctccgaatggcaggcgaaagagaaggatacgcagttccgcctgcgcttttatgcccagcacgggatggaagaaaaactggagcgtcagaccaccttcgggcgggatgagcgttatctcagcagcagcacttccctggcaaccctagcgctggacagtctgcagaacagtatcagggagacactggatgagctgaagcaggagcagagacatgagtcagcgcataaccaggcagacattgatgattaccgtggtgcgtatgatcgctttaccgcccatctctgctcaattaactctgacttggatggcgcccgcaatattctcacagaactcgatacgaaacagcaggccttcctgcagaaaaagcaggcgctgacggaagaatttgcggagattgagcgaggtcttgcggaggagctgcgactggcaggagtggaaaacgccgatccggatgactttctgaagctgaaggccgggctggaaaccacggaactgaaaatcgccgagctgacccgggccgaaaccagtcaggcgttactggagaagagcctgacagaagcattgagccaactgtccggactctggatggaagaatatcacgagattgaaaccgtgctggccgccatcagtcaggcggattctcccctgaaaatcgtgccggcctttgcgaacgataaaaaagcgatgcagactgttctgaaagaagcgtttaccggcagtcggttgcgggaaagtacttatcaaaccgtggctgacaccttcaaggactttggtgagctatggctgaaccgggacaaactcccggagctcatcaacggttctgctgataatttcattgtatacctggaacaaaagatagaatcgctgattgcctggcaaacacccaatacctacacgattgagttccgtggcaaaccactggaacaacattcgctgggtcagcgcgcctccgctttaatgctgtttgtactgaatcagcaggagaatgacgtggtgatcatcgatcagcctgaagacgacctggacaatcagacgatttatgacgatgtgattaaaatcatccgggtaatgaaaccccgtacgcaatttatctttgccactcacaatgccaatatcccggtgctgggagatgcggagaatgtctgtacctgtgaatattcagacggaaagatccaggctgccggtggaggcgtggatgaccctcatgtacaacagcacatcatttcggtgatggaggggggacgggaagccttcgagcgtcgcagggccgtttacggctcatggctcaataaaaagtga

SEQ ID NO: 269004 - DNA, 342 bp, Klebsiella pneumoniae
atggacgctccggactatgggaaacaggtcaacttcgcggacggcccggactatgggaaacaggtcaacttcgcgggcggccgggactgtgggggacaggtcaactttacggaccgcccggactgtggcaaacaggtcaactccgcggacggcccggactgtgggaaacaggtcaactccgcggacggcccggactatgggaaacaggtcaactttgcagacgaccgggactgtaggaaacaggtcaactccgcggacggcccggactatgggaaacaggtcaactccgcggacggccagggctgcgggaaacaccacatgtacaggcacacacacggatag

SEQ ID NO: 269005 - DNA, 720 bp, Klebsiella pneumoniae
atgctggtcacacgggatttcttcagaatgcagcttgaatttgctgcttatatagcttctgtcacaaatgcgtctctgggtgctgcaatcatggattatacgaatatttatattcggctgggatttggacgggatttcgatgccgctaacccggagtgggtagaatacgttgacggcctacaaagcagcccagccaggaatgcgatatatactcatgaagtctggcagtcgagagccgaagtccaaccgccaggggtgatagcgatcgcgggctgtttttcatgtggatatgagtccgggaacactgcaaggattcatttcgaaagtcgagaaaatgaaaaagagtcaccactgagctatagccagcgggaaatgagatatgcagaattacggaaactcttccggtttacactgatatctcatcctgaaattgaaaacgtttgcgggctttcatggttatataatataagtgcataccgcagactttttcctccgcaatatatagcttcttcgaagtctgttactggtaagtaccggaatatgcccctctggggacagtttttgtatagaaatggggaagtaagaactgacaaggctgattttttttatgaaaaactcagtcgaaatccttcattaagtgaaatctcagggtgtttcccacttcagcctctggcagttaaagctcctgttacggtgtttcgacatttcttcgatatatag

SEQ ID NO: 269006 - DNA, 279 bp, Klebsiella pneumoniae; identical to SEQ ID NO: 207472

SEQ ID NO: 269007 - DNA, 723 bp, Klebsiella pneumoniae; identical to SEQ ID NO: 207473

SEQ ID NO: 269008 - DNA, 435 bp, Klebsiella pneumoniae
atgaatctgcaacaggtaacagagctactgcccccggtagtcattcagatagctgacctcatcggcttcccggccaccgagcgcttgctgtccgcgttcggtggcaccaccttcccgatcggaaaaggtctccgtgcccttggcgctcaacgcgccgctctcctccgcgataccatcggtgacaacaacgcccagatattgtttaaaaactttggtgggttcccgctttatctgccccgttgcgagctggcattgcgcgagttgcgtaacctgcagttcctggcagacttcgacgaggccagccggaacggtgtttcttcgttaatggccatgacgttactgtgtccgaaatacggatttggtgatcgcaccggttggcgtctactggcgcagcggaaaagtgtggctgaatacaatcaagactcgttgttttaa

SEQ ID NO: 269009 - DNA, 492 bp, Klebsiella pneumoniae
atgagatatatagctttacttcttctggttacgagctcttgttcagttgcaaaaatggtgtccaatgctaaggcagttgaaacctatcaaatgcagttagaacaaactaaaaaaatgctgaatgaggttcagcaaacgcttatagcatccgatgcagtgatcgcgatgtacaaaaatctcggatacacaacacccgaggttagagcgatgagtcgacatttgattatccttggagaagatatccagcatttgtatggtgatatctcacttaagccaaccccattttatgcatgtacttctgtaccgtcagctgcctataatttctggtcacagagactaagcagtgtttctaaagacgatcctgaagctcttaaggttgctgcaaatcactacatcaagcaggcgaatgattgtgtgtatgcaataaacaatcctccgccaaaagagattgaagaaagcgaacagcttcaaatcattgacgttacgccataa

SEQ ID NO: 269010 - DNA, 489 bp, Klebsiella pneumoniae; identical to SEQ ID NO: 181881

SEQ ID NO: 269011 - DNA, 204 bp, Klebsiella pneumoniae; identical to SEQ ID NO: 181882

SEQ ID NO: 269012 - DNA, 399 bp, Klebsiella pneumoniae; identical to SEQ ID NO: 207475

SEQ ID NO: 269013 - DNA, 429 bp, Klebsiella pneumoniae
atgtacgccacccgggccgatatggtcctgcagtttggcgagggggagtgtatctccctctccgacagggatttcaccggtcagattgatgatgctgtgcttaacggtggccttcaacgggcctccgccgaaatcgacagctacctgtccggccgttatccggtgccttggccagatacgcccgggatcctcgtggataaatgttgcgacatcgcccggtacaagctgaccggggcggagacgcagaacaccgaagagatcagggagcgttatgaacgtgcgattcgttatctggagcaggttgctaagggaaatatcacacttggccgtctgccagacggttcagtggctcagggcgggagtctgtcccgcttttcctcgaatggccgggttttcgggcgcgatgagacgggtggaggtgcattttga

SEQ ID NO: 269014 - DNA, 123 bp, Klebsiella pneumoniae; identical to SEQ ID NO: 187713

SEQ ID NO: 269015 - DNA, 2178 bp, Klebsiella pneumoniae
atgcgttctcttcagcttgccatgaccctgctggccagagaccagggctctaaggtactgcgtcaggctctgtcagatatcttaaaacagaccaatgccaacaagaaagccgaggaagacgccggccgcgcccgcgagcagtcggcgcagagtggcatccgtgcatcccgcacgctgcagcaggaatatcagcgggccgcgagtgctcgctcaacattaggcatccgttccgagcgtgatattcagcgtgagatagcgcaaacacagggtgcctacaatcgcctgctacgaaccggcatgctcaccgccaatgaacagacccgcgcctttcgggcgatgaccaatcaggttgcgcaactgcgtactgagcttaacggtgccggtcagtcaatgtcccgaatggaacgtgcccgtatgtggggtggaaatctgacggcgatcgccgggggcgttactgcagcggccatgattattaaagaccccgtacaacggcaaatggcttatgaagataaaaatgctgacattgccaataccggctacaaccaattgcctcccgaagatcgtctgaaaaaagttccggtattaaatgcggccataaggacagccgtcagattcggtggcggtttacctgagcaggctcagggtaccttgcaatcattgtttgccggtggtcaggtaagcaatgaagttgctatgggaattttgccagatgttatgcggtattcaacagcatcaggcgccaatcccgaagacctggctaagattgcttctgcagctatcgctaactttggggtcaagcctgaagaaatcccaatgcttttcgacaagctgatacgttcaggggagaacggtagctatgagctggccgatatggctcgctccatgccaacaactatgaccaaggctaagtcgattggtatgtctggccttgcggacgtcgataaacttgcagcctggtatcaggcgaactcacttacagcgggtgataacagtcaggccgcaacaaacgtcaatgcatttcttgataaaatcaccagcgctgatactcagaacgcgatgaaaaactataaattccgggtgaacggcaaagtaatgaactacaccgattacctggcccaacagcgcatgaatggagtcagtactcctgatgcatttatgggagcagtctcaggaatagtgtcgggcgataaacgggtccagtcgctcagggctgatgcgcaaaagtataaaggtacagacagggaaaaagagattaacgcggcgctggatgtcgtagtcgcttcgatcatcgcgaaaatcgttgctgatcagcaagctcagatgggactcaaaaccagcattctttaccgtgaatttatcaaagaacagcaggatggtactcgggatgcctcaggttctggcgcagcctcatttaaagtgaagtcgtccacgaatgctttcaaatcacaacaacttgagtctgagaaagtgtttgctgaacaggacgctatgaagcccctggcagatctttatggagatttatcaaccaagcttgttgattacgccaaagagtaccctcaattaaccactgccctgtcaggtgccactacaggcattaaagcgatgactgctgctgcggtcgcctttgccacgctcaattttctcaccggtggtaaaatcagcccgtcgtcttctccggtaccacccggtaaattaccgacagggggttctggtgcatggggatggggggctaaattgctgggcgcgggtatgtcggcaaccgcgatcgccacatttaccacgcgagaagaggatgcggaaatcgcgaatggtccggctaagtggtctgccttacgatctcgttatagtcaggaacgtattgataaagcgagaaagctttatcagccctggtatcagattggcaaggggtatgccagtgagaacgaagagtggttatcccgtctggataaggatgaggctaacggaacggtgccttcctggtggactccaccaacagacattcgcattccacagtcagcgaacggctacccggtgccgccgttcgcccaaacgcctgcgcagcagccccccatcaatatcaccaccaaacttgaactggatggccgggtcattgctgaggctgtgaatgaggttaacaaccagtccgccacccgtggcccacagggaggaccgcactga

SEQ ID NO: 269016 - DNA, 624 bp, Klebsiella pneumoniae
atgtctggtgatattaaagcaatatttgacagcaatctgattgcaactcaggcaggtaccgttcaggtatttcattttgatatggcttcccgtgagtttatcggtgccgaggagacttatattcatattggggttggccttcctgcattttcatgccttgaagagccgccggtacaaagtgaatatcaggttgccgttcgttctgaagataattcgtcctggtctgttaccgatgattttcgcggtatcactgtctatgacattcagacgctggccagccacgttattaccgagcccggccccatacctgacactgtaacgacctctgcaccatcaaccccatacgacaaatgggacggttctgcctgggtaacagacgcagatgcgcagcatgcggctgatgttgccgttgctgacatgcagaaaaaagagctgattactcaggcatcggcggatatttccattcttcaagatgcagtggctcttaatatggcaactgaagaagaaaaaactcgcctgtcttctttacaggcatatcgtgtattgcttaaccgggttgatacatcccttgcgccgaatattatttggcctgttacgacgatcagggagaatgatgatgtctaa

SEQ ID NO: 269017 - DNA, 2637 bp, Klebsiella pneumoniae
atggcagaagtaccgttaccaactccaaccgacaacccggtgcccagtactgatatccgggacgcagtttatgccggcgccatgctggataaggttgtcaccagtaccgacctgacatacaccgatcgcctgggcggcgagcactacaccgtagacggaatgaaggcggaaggggataaagttgttgaggaaacccggcagaacctgatccctctcagtcgtcagtatatgacattggctgatgctcaggcagacatcgcgaatattccagaaggcagcagcacctatgttcgcagtcaggacggaagctctctggccgatgagtacatcaacaatggtggcaccttacagcctaccggacggaagatgccatccggggccgcagttgaactcatgtcagataccgtccagcgtttaatgacggcgctgcacgttatggcggagggcggcacaagctctggttcaggtattgaaagcagcgacacagtgcagaatctgatgaccggatttaacgtgctggctgagtcaattaataatctgtcagtgggaaaccagcaaaatgccagcggattatcaaggctggtctcatcagtccagatttgcactgaaatgctgaacactctcgcggctgagatcgtaacccctgacggcgcatcacagtatggctatgcggcattttccgtgcccggcacagtcagcgcatccaatggatcatttggcaccgatacacgctaccgcaggactggtctgatcccggttcgcaagggtgacgttgtgcgcctcacggtgtacaccacatcggcaaccgcaggtcacgcagctgcgctgtacgatgcatccggagcatatgtgggtccgctggggatcatgtgcgcgtcatatgcggggtatcaggcacggcattaccagtgcgaaatttcgcaggacggctttgttgtcgcgaacacgctggaccagagcgcatcttcttctgctgatgtgactggtgcggccctgacgattgaccaccgcttccgtggccgggcagcggatgcggttattaaactgacgaaggcggatttaatcccagtccgtctggacaacggcaacattaacgccagctcaatcacacaggacgggatcgttaactattccaccgggctgtattcctgcaccggcggcaggctcctgttcagtggtctgcctgtagcctcatcgccggggcagagcagtagtctgtataacgttgttttctacgatgcaaacaaggcgcttattgcgtatcgtcctgtattctccagttcggggtatgtggtcattcccgaagaggccgcgtactgggcgcagcagataatcaccgacagaacaccggactggtctgctgtctcaatcgtttattacaattatgtctataaagacgagctgcataagttgctgtcgtcagagcgcgatcgcctcggactggaatatccgaatgaatactggctgcaggatttcagcggcgctacggatatcgaatggatccagaacgcgatggactgggtgcatgacgcgggcggtggctggctaatcctgtcctctgactatgtgaaaaagcagttcatcatctccgaagccgtcatccaccgcagtaacgtatgggttgtactggatggcgttgaaattaaattgcaggacggcgtgcatgacaacctgtttcgcgctgccggtgttattgtcaatcctgacgaccccttcggtctgtgcctggacctggaaataacgaacaacgtccgcttaattggcacaggctatccgaaactcagtggcgctgatgtggcgtattacgccgatattccggcaggtgccgggccgcgctactggattggtgacgaatatgggtggcgtggcacagggctgatttactacggtgcgcagaacttagagatcggcggctttaagctccagaacgtaaaaaactggggggccgatttcgggtacggtgccaagtacggctatatccacgatatcgacctgtggcagccgaacaaaaacggcgacggcatccacttcactaacggggccagtcatatgcgcgtccgtcagattttcggctatgcgcgcgatgactgcctagctatggtcaatagtgatgactccctggtttacggccctgacaaaatcccgacaccggggtcaattcgccagtggatctacccaacctgtcctttctggtacgggtgggcaggaaatgaggccgtgggaaccgacaacgatattcacgatatcactgctacgaatatcgggttaaccggtaacgagcaggtcagcaccattctgaccacgcagtttaaaatctacaacgtgacaatcagcggtatcagcagcgtcaactatatgactccaggccgtggctgggatgaagttaatgcgattctgaaatcgtatgccgggtttggggatgcttcccgctataaggcaggtaatgtcagcaatatcagcattaataacatcattgagtgtgcgtcgaaaaattacagtatcgatataacgctggaggggaggaatatccgcgtcaatcgttatatgaaactggacacccgcgcgaaaacaaaaggtgcgctgaacatcagcagttcagccgccccgtatgtaacgacctctaatattgtggaataa

SEQ ID NO: 269018 - DNA, 177 bp, Klebsiella pneumoniae
atgctttgcttctttgttggggtcaaaggttacaattgtaccttcagggaagctgaatgggccactagaggccatcgagtcgccattaattatcagggcaaagaggtcctctccgtcgcgaattggggactggataaagtcgattacggaaggctctccgttaatgagtggatctaa

SEQ ID NO: 269019 - DNA, 225 bp, Klebsiella pneumoniae
atgccttatgaggagtggcgctcgggtcgacatgccaagggcgccgggcttggggagttcccccaccatgaagaggatataaataagctaaggcatgccatacaagttcagcaggaaatgattcaaaaacaggatgatatgcttgaaaaagtatctagcattgttgaaaagctaatcaatacaaaagtcatcattgaagatagagataagaaaaaacccacctga

SEQ ID NO: 269020 - DNA, 852 bp, Klebsiella pneumoniae
gtgttgtgcaatggattcttgatgaacatatggcaaatagaaatggaaagatcaccttattcaaatacgttattgtttaatcgcaacacgaaactctcgctatcaatcggcttgcttttgctcttcccggcgctggttcagggagcggattcactctatgaccagcaaatcttgcaagcgcgccaaggtcagtacgccccctttctcagttaccttcagcagtaccagctgcggcatgccttaaccccttctcaggtggcggactggctgcaggtggccctctgggccggtcaggacgatgaagtggtgaaagtctggcgacgctaccaggtctatatgccgcttcccgcacggggcaccgccgccgcggcgcaggccctgcgcaaccagaagcagtggcaaacctcgctcaccctctggcagcaggcactcagccaggcccctggcagcgacgactatcgtatcggctatatcaaaacgctcgccgatgcccgcaaggacggcgaggcgctcagcgaagctcgtcgcctggtggcggagcaggcgagcgttgcgcacctgcagacgctctcctatgtctacctgcggctgggcaaaagctgggaccagctgttggtggacacgcagatcctcgatcgtgaaccgcaaaacaaaaccgcgctggccagcctgatggcgaccctgacccgcaaccggattgattcccctgctctcggcctggcgaatagcgtcgaactgacgcctgcggaaaagcgtaacttgcagttgaacgccgccgccgaactggtgcgccttgccgataccccttcccgcgaagaaaaggcgcgttacgcgcgcagtatgacgcgatga

SEQ ID NO: 269021 - DNA, 534 bp, Klebsiella pneumoniae
atgattcagtacattcgtattcaaaattttcgctcagtgaaggatatcgcgctggagctcgggccgctgaacattgtcttcggccctaacggctgcggtaaatccaatatttataacgccatccacctgctgaccgctgccgctgagggcaggctttcggggtttatcagcgaagagggcggtctggagaatatgatgtggtccggggagcgttcgcccctcgatcgtcacccccgccggctgcaaatcgcctgccggaccgacagcttcgattatgagctgcagataggcttccctgaaaaattgccctatccgacgcaattcatgctcgatcctatcgttaaagaagagaatatctggctggccggctactcccgccggccttcctcccgcgtactgcagcgcaagaatcaggcggcgtttctcgtcgatgtcaccggggagaaaagtactttcaccgagagtatttatgaaaatgagtcggtgttcggtcctgtctcttatacacatctgacgctgccgacgaaggcttag

SEQ ID NO: 269022 - DNA, 852 bp, Klebsiella pneumoniae; identical to SEQ ID NO: 269020

SEQ ID NO: 269023 - DNA, 216 bp, Klebsiella pneumoniae
atgctcaagcgcaatacgttcgtcgcgaatgcggctttcatcgccgccaacccgcagggtggtaatgatatagttggcgtcctgcagcgctgcgaccgggtcggtggtggtactaaactgaatatccgggcgaatggtattaaatacatagcgggcaatttcgccaaatatcgccagattatcagcagagttatcgagaaaaacgacttctgttaa

SEQ ID NO: 269024 - DNA, 1560 bp, Klebsiella pneumoniae; identical to SEQ ID NO: 213713

SEQ ID NO: 269025 - DNA, 5286 bp, Klebsiella pneumoniae
atgaagaccatccgaacaacctgcccctactgcggcgtaggctgcggggtgctggcgagcgtggacgacgcggggcaggtgagcgtgcgcggcgacgatcagcacccggcgaacctcggccgtctgtgcgtcaaaggggccgccttaggggagaccacgggcctggcggggcggctgctgacgccggaggtcgacggccagcaggtagcctggcctcaggcgctggcggaaaccgctgcgcgcctgagacagatcatcgaccagcacggaccgcaagcggtggccttttacgcctccggccagctgttaaccgaggattactatgccgccaataagctgatgaaagggtttatcggcgcggcgaacatcgataccaattcacggctgtgcatgtcgtcagcggtcactggctacaagcgggcctttggcgccgacgtggtgccctgcagctacgatgatgtggaaaacagcgatctggtggtgctggtcggctcgaacgccgcctgggcgcatccggtgctgttccagcggctggcgcaggcgaagcgggataatccccgattgcggatcgtggcgatcgacccccgacgcaccgctacctgcgagatcgccgaccgccatctggcgctggccccaggaagcgacggcgggttgtttgcggggctgcttaacgccctggctgaggcaggagcctgcgtcgatggctttcgcgacggcccgcaggcgctggccgccgcccgcggctgggacgtggcgagggtggcggccttttgcggtctgcctgccgatgaggtggcgggattctatcgcgagttcatcgccgccccgcgggcgatcaccctctacaccatgggaatcaatcaatccgccagcggcagcgacaaatgtaacgccatcatcaacgtccatctggccagcgggaagtatggccgccgcggatgcggccccttttcgctgaccggtcaacccaacgccatgggcggccgcgaagtcggcgggctggcgacgatgctggcggcacacatggattttgtgccagacgatctgcagcggctggcccgcttctgggggacggaacggctggcgcagacccccgggctgaccgccgtggagctgtttgccgccattggccgcggcgaggtcaaagcggtctggatcatgggtaccaacccggtggtgtcgctccctgacagccacgcggtgagccaggcgctggccgcctgtccgctggtgatcgtctcggatgtcgccgcccagaccgataccggacgtttcgcccacatccgctttccagcgctggcctggggcgagaagaatggcacggtcaccaactcggagcggcggatctcccgtcagcgcagctttctgccgccgccgggggaggcgaaagcggactggtggatcatcgccagagtgggccaggctctggggtatcgcgaggcgtttgcctggcagcatccgcatgacgtcttccgcgagcatgcggcgctgtccggtttcgaaaacgacggccagcgggcgtttgatatcggcgcgctggcggatctcagccgtgaggcgtgggacaccatgccgccggtgcgctggccggtcagccgcagcgaggtcgcctgggatatcacgcgcggctggcatggcgatggcaggctgcggatggtgccggtgacgcctcaaccgacccgggcgacaaccgatgccttttatccgctgatcctcaacagcgggcggatccgcgatcagtggcacaccatgacccgtaccggcgcagtgccgcggctgatgcagcatatcgcggagccaatggtggaggtggcgccgcaggatgccgttcgctatcagcttcccgctgacgggctggcgcggatctggtcgcggcatggggtgatggtggcgaaagtggcgatcagcgaagggcagcgccccggctcgctgtttgttccgatgcactggaacaaccagtttgcccgtcaggggcgggtgaataacctgctggccgccgtcacggacccgtattccggccagccggaaagtaaacaggcggcggtggcgattgccgcctccaacgtctataccgtcaaaacctacggtccggaccgcgtggctggcttctcgccgatcccggcgatgtcgatggtctcctacgcgtccggcgcccgttatctgtcgctgatcggcggcacctgcctgagcttctacgactggtactgcgacctgccgccggcttcgccgatgacctggggcgagcagaccgatgtgccggaatccgccgactggtataactccagctatattatcgcctggggctccaacgtgccgcagacccgcaccccggatgcgcacttctttaccgaagtccgctataaagggaccaaaaccgtagccatcactccggactacgccgaaatcgccaaactctgcgatctgtggctggcgccgaagcagggtaccgatgccgcgatggcgctggcgatgggccatgtgatgctgcgtgaattccacctcgataagccgagccagtatttcaccgactatgtgcgccgctataccgacatgccgatgctggtgatgctcgaggagcgcgacggttattatgccgccggccgtacgctgcgcgcatccgacctcgtggattcccttggtcaggagaacaatccggaatggaaaaccgtcgcctttgacgagaagggcgacatgaccgtaccgaacggctccctcggattccgctggggcgacaaaggcaaatggaacctcgaacagcgcgacggtaaaactggcgaagagattgagctacgtctgagcctgctgggcagccatgatgaagtggcgaacgtcggcttcccgtacttcggcggcgaaggttctgagcacttcaacaaagtcgatctggaaaacattctgctgcacaaactgccggctaaacgcctgcagctggccgacggctctaccgccctggtcaccaccgtgtatgacctgaccatggctaactacggcctggagcgcggtctgaacgatgacaactgcgccgccggctacgatgaagtgaaagcctacaccccggcgtgggcggagaagatcaccggcgtctcccgcgcgcatatcatccgtaccgcccgtgaatttgccgataacgccgataaaactcacggtcgttcgatgattatcgtcggggcgggcctcaaccactggttccacctcgacatgaactaccgcggcctgatcaatatgctgatcttctgcggctgcgtcggtcagagcggcggcggttgggcgcactatgtgggccaggaaaaactgcgtccgcagaccggctggcagccgctggcgttcgcccttgactggcagcgtccggcacgtcacatgaatagtacctcgtacttctataaccactccagccagtggcgctatgaaacggtgaccgcgcaggaactgctgtcgccgatggcggataaatcccgttacagcggccacctgatcgactttaacgtgcgcgcagagcggatgggctggctgccgtcggcgccgcagcttggcgtcaacccgctgcgtatcgctgacgaagcgaaaaaagccggcatgaccccggtggattacaccgtgaagtcgctgaaagagggctcgattcgctttgcggccgagcagccggaaaatggcaaaaaccacccgcgtaacctgtttatctggcgttccaacctgctgggctcctccggtaaaggccatgaatacatgctcaagtacctgctgggtaccgagaacggcattcagggcaaagacctgggcaagcagggcggcgtgaagccggaagaagtcgaatggcgggataacggcctcgacggcaaactggatctggtggtgaccctcgatttccgtctgtcgagcacctgtctctactccgacatcgtgctgccgaccgccacctggtacgaaaaagacgacatgaatacctcggatatgcatccgtttattcacccgctgtcggccgccgttgatccagcctgggaatcgaagagcgactgggagatctataaaggtatcgcgaagaaattctctgaagtgtgcgtgggccacctcggtaaagaaaccgacgtggtgaccctgccgatccagcacgactccgccgcggaaatggcgcagccgctggatgtcaaagactggaaaaaaggcgaatgcgatctcatccccgggaaaaccgcgccgcatattattccggttgagcgtgattacccggcgacttacgaacgtttcacctcgatcggcccgctgctggaaaccatcggtaacggcgggaaaggcatcgcctggaacacccagagcgagatggatctgctgcgtaagctcaactacaccaaggcggaaggcccggcgaaaggccagccgaagctggaaacggccatcgacgccgcggaaatgatcctcaccctggccccggaaaccaacggtcaggtggcggtgaaagcgtggcaagcgctgagcgaatttaccggccgcgaccatgcgcatctggcgctgaacaaagaagacgagaagatccgcttccgcgacattcaggcgcagccgcggaagattatctccagcccgacctggtctggcctggaagacgagcatgtctcctacaacgccggttacaccaacgttcacgagctgatcccgtggcgcacgctgtccggacgtcagtcgctgtatcaggatcaccagtggatgcgcgacttcggcgaaagcctgctggtctatcggccgccgattgacacccgttcggtgaaagcggtgatgggcgagaagtccaacggcaacccggagaaggcgctgaacttcctgaccccgcaccagaaatggggtatccactcgacctacagcgataacctgctgatgctgaccctatcgcgcggtgggccgattgtctggatgagcgaagcggatgcgaaagatctgggtatcgaagataacgactggatcgaagtcttcaacgccaacggagccctgacggcgcgtgcggtggtgagtcagcgcgttccagccgggatgaccatgatgtatcacgcgcaggaacgtatcgtgaacctgccgggctctgaaatcaccggtcagcgcggggggatccataactccgtcacccgtattacgccgaaaccgacccacatgatcggcggctacggccacctggcctatggctttaactactacggcaccgtcggctccaaccgcgatgagtttgtggtggtacgtaagatgaagaacattaactggttagacggcgaaggcaacgaccaggtacaggagagcgtaaaatga

SEQ ID NO: 269026 - DNA, 852 bp, Klebsiella pneumoniae; identical to SEQ ID NO: 269020

SEQ ID NO: 269027 - DNA, 1464 bp, Klebsiella pneumoniae
atgaaaaataaagagaagcttttgagtttctcgaatccggtgaggtttattttttcacactctgctttgaaagaaggctgggataaccccaatgtgttccagatctgtagccttcgagagatgggaagtgaacgagaacgtcgtcaaacattagggcgtggtcttcgtctgtgcgttaaccaagaaggtgaacgtgttcgtgatgacagcattaacattctgactgtcgttgccagtgaaaattacgaagcctacgctgaacgattacagtctgaaattgagagcgaaacgggtatccgttttggtattatcgaaaaagatgcattcgcccatctgatcttctctgattcctcacaaggtgtaggaatcaccggttcgcatgacatctggtctgaactacagactgaaggttatctggaaaaatcgggaaaaatcactaaaaccctgaaagaaactcttctcgatggcacttttgctgttagcgaaaggttccttcctcttcaggagcaaattgaggctatcctgcgtaaatcagcagggcgactcaatataaataatgctgatgagcgtaaagtaatcaaataccggaaagaggtcttaaacagccctgaattcgaagcgttatggcagcgcatttgccaaaaaacactgtatcgtctggcatttgatgaagatgtattgatcaagtcctgtataaaatcactttctgaaatgcagcctgtagcaaaagcaatggtcagtttcagcaaagcaacaatcaaacaaagtcaatctggacttgatgtcaaagctcagtctaatgggacaacaagcgctgttatagatgttgcagagcagccactgccagatattcttggtgttctacaggaaaaaaccggactgacaagacgcagtttaagcaccatcctgaaagagagtggaagactcgctgattttgctaaaaatccacagcagtttatcagtgaagctataggccgaatcaactactgcaaacgcctgtcaattgttgatggtattaaatattatccactaaaaggagaggtgtatgcgcaaagtctctttatggataaagagctaacaggatatgcccgtaatctttttgaaacctcgtctaagtcagtttacgaatacgttcctaaagattctgaagtcgaaagccgtttcgctcaggaactcgaagaacaggatgaagttaagctttatgtgaagcttcccggttggtttaaaattccgactccactgggaacttacaatcctgactgggccttagttattgaagacaatggtgaagaacatatttactttgttgtagaaacaaaaagtaaacacattggtcttggtaatgaagaagatgcgaaaattacttgtggaacagctcatttcagtgctttaaaagaagaaaacactaatgcagcaaaatatatcagagcgacaaatcttacagaagtaataagcagcatttga

SEQ ID NO: 269028 - DNA, 267 bp, Klebsiella pneumoniae
atgcacaccgctttttcttccccgtcttcagcccctgccgcgccgctgatgccggtttctgatgccgctcaggagcgttttattcgcctgcccgaagtgatgcatctgtgcgggttatcccgctccacgatttacgacctcatcagccgggaggctttcccgaaacaaatctccctcggcggaaaaaacgtggcgtgggcgcagtcggaaatcaccgggtggatggccgaccgtatcgccgaacgcaaccggggctatgacgcatga

SEQ ID NO: 269029 - DNA, 138 bp, Klebsiella pneumoniae
atgttgcacaaacagaaaggccatgcgttaatgattgcgtcggtttgcaagacagaccttatgaaagcagttttagtaaagcagtccgaagttcaggtgttatccaaagattacccttctccgtgcgtctcctcctaa

SEQ ID NO: 269030 - DNA, 1080 bp, Klebsiella pneumoniae; identical to SEQ ID NO: 221108

SEQ ID NO: 269031 - DNA, 1464 bp, Klebsiella pneumoniae; identical to SEQ ID NO: 269027

SEQ ID NO: 269032 - DNA, 432 bp, Klebsiella pneumoniae; identical to SEQ ID NO: 214517

SEQ ID NO: 269033 - DNA, 363 bp, Klebsiella pneumoniae
ttgacgctctatatcgggatgagccgcgataccggcagagctattacggaatctgaccacctgcgtcagtcggtgcgtgacattttgctgaccccgcaagggagccggcttgcgcgccgggagtatggttccctgctttcagcgctcattgaccagccgcaaaacccggcgctgcgcctgcaaatcatggctgcggtgtacgtcgcgttgctgcgctgggagccgcggctgcaactggacaccatcacggttaacagcagcaacatggatggcgcaatggttattgagctggcaggccagcgtaatgacggcgtgcccgtgtccctttccgtatcgacaggagcagacaatggccgttattga

SEQ ID NO: 269034 - DNA, 477 bp, Klebsiella pneumoniae
gtgaaaacgggcgacctcgaaaccaactggattaactggctgacctaccgtgcaggtaaatcccgcacctggtggtgcccgtctccaggggagcaggtggtgctgttcagcctgggcggcaatctggagacagcctttgcgcttccggccatctactccaacgcctgcccgccgccgtcagactctgaaagtgcggacgtgaccgcatacgaggatggcggctggttcgaatacgaccccgccaccgggcgctggattattcgcggcgtgaaaagcgtgctgattgagtcttcgcaggttgtctcctgcaaaaccggtgagtttgtgatcgaggctgacaccacccgtattaacagcaatgtgatcctgaatggcgatgtgacccacggcggcggcgcgatgacgtcaaacggcgtcgttgctgataagcataaacaccctggcgacagtggcggaacgacaggagacccattttga

SEQ ID NO: 269035 - DNA, 510 bp, Klebsiella pneumoniae
gtgggctcacgcaacaaaaagggcagcgacgggacgaacgcccggatcacactgcgcaacctgcacagcgttatcaacaatccgtccatcgagctggccgcagcccagaccgtcgatattccgggagacgcggcaaactggaccactgattacctgaacagtgattacagctggataccgcggattaccctggataattgcatcccggcaattatccatactcctggcgcaaaagctgttgtcgatattcatggcggcaagctggcgcgggtctacaccaacggcaatggcaaccgctgccgggtcaccagtgctgatattgagctgatacctgatgcgtcgggtgtgacctatttcgctgcagataaaacgctggtgacgggctgttcatggctgaacccggccagtggtgcaacctatccaggcacattgcgtggttcaggaaacgaaatgatcggagaaagtgctaaagcaccaaaccttcctgcaaaagcttttattgaggaataa

SEQ ID NO: 269036 - DNA, 573 bp, Klebsiella pneumoniae; identical to SEQ ID NO: 213420

SEQ ID NO: 269037 - DNA, 363 bp, Klebsiella pneumoniae; identical to SEQ ID NO: 213421

SEQ ID NO: 269038 - DNA, 894 bp, Klebsiella pneumoniae
atgagaaaattaatcgtagttgcttctgttgccgccagtttactgctcgggtgtgaccagaaaagtactggcaagcgtgaaaccttgtctgaagcgcttgttgctaagtcgctttctaacatggttcccgttaagggcggcgagttcttaatgggggattttggcccattagtcggtcaaaaactacctttcagcataaaccaggatgataaggtattacataaggttgtattaagtgatttttcgatatcaaagtttaaagttaccaacgatgattataataaatatctgcagataacaggaataaaaaaacctcccattaatattctggtaaaagagtacccatccttgcaaaaagatgattactctgttggtgtgacctggcaacaggcaaaagattattgtcagtggctaggtaaggagtccgataaaaatattgatttaccgacagaagcacaatgggaatatgcggcaaggtcaagagggcagtatcttcctttttcgactaataatggaaatttcgagcttggttctaatatacctgaacaaaagaaattagatgaatacacagatggttatggttttcctatttatccaattgggaaatatcctccgaatccgctaggtttatacgatatggggctaagtggagccgaatggagtaatgattggtattcaactgattattattcccactcccctgtttatgatcctcaaggtccagttaagggtaatgaaaaagttttaagggggtatgttggcggagatcgtcagtatgccttgactatattcaggcaatcgtcacaacctgtgccaaaatttgctgggcgtgatgattatcaaaagtttggagttagtcctctttttgtatttcgttgcgttattaataaataa

SEQ ID NO: 269039 - DNA, 597 bp, Klebsiella pneumoniae
gtgctgcaggcggatgcgactgcttacgccactgcccgcgcgctgggtctgcgtgcaaaaatcgacgagcagaccggctggcacaaaaccctttctaacgtgggcgtcaacggcgtaaccggcttgtctgcggatgtgttctgggatctgcaggacccggcaaccgatgccggactgctgaaccagaacgacgtcaccaccttgatccgcaaggatggtttccgcttctggggttcccgctgcctcagtgatgatccgctgttccagtttgaaaactacacccgcaccgcgcaggtactggctgacaccatggcagagggccatatgtgggcggtggatatgccgcttaacccgtcgctggcccgcgatattatcgaaggtatccgcgccaaaatgcgcagcctggtgaatcagggctacctcatcggcggtgattgctggattgatgacagcgttaacgacaaagacagcctgaaagccgggaagctctggatcgactacgactatacgccagtgccgccgctggaaaacctgatgctgcgccagcgcatcactgaccgttacctggtggatttcaccacccgcgtaagcgcataa

SEQ ID NO: 269040 - DNA, 426 bp, Klebsiella pneumoniae
gtggtggccctcgagcaggtgccggacgaagccttcgccagcaaagccgttggcgacgggatcgcggtgaaaccgaccagcaacatcgtggtggccccggccgccggtaccgtggtgaaaattttcaacactaaccacgcgttctgcctcgaaaccaacaacggtgcggaaatcgtcgttcacatgggtatcgacaccgtggcgctggaaggcaagggcttcaaacgtctggttgaagagggcacggacgtgaaggcgggtgagccgattctggaaatggatctggacttcctcaacgccaacgcgcgctcaatgatcagtccggtcgtctgcagcaacagcgatgactacagcgcgctggtgatactggcgagcggtaaggtcgttgctggccagacgccgctgtatgagattaaaggcaagtaa

SEQ ID NO: 269041 - DNA, 258 bp, Klebsiella pneumoniae
atgcagcggatcgctaaactggcgggtgctgaagccaatgtcgaccgtttttgccaccaaagtggcaggcttgccttcccgaccaaaggtgacgtttcgcaactgcacatgatggggggaggagaaatcgtgctccatctcatcgaaggagacctgccagccggtgccattgctgagccaggcgctggcctggcgggcgccccagtgggtttgcagcaggaaccacgcgccaataatgacgagcagcagagcgactag

SEQ ID NO: 269042 - DNA, 1017 bp, Klebsiella pneumoniae; identical to SEQ ID NO: 212971

SEQ ID NO: 269043 - DNA, 348 bp, Klebsiella pneumoniae; identical to SEQ ID NO: 5328

SEQ ID NO: 269044 - DNA, 1395 bp, Klebsiella pneumoniae
atgaaagatcacattttgtccgtcaaagagaaaattggttatggcatgggtgatgccgccagccacattatttttgataacgtcatgttgtacatgatgtttttttacaccgatatttttggtatccccgccggctttgtcggcaccatgttcctgctggcgcgcgcgctggacgcgatttccgacccgtgtatgggtctgcttgccgaccgtacccgcagccgctggggtaagttccgcccatggatcctcttcggcgctatcccgttcggcctcgtctgcgtgctggcctacagctcgccggatttaagccacaacggcaagctgatctacgccgccgtgacctacacgctgctgaccctgctctacaccgtggtgaatatcccttactgcgcgctgggcggcgtgatcaccgacaacccgacgcagcgcatttcgctgcagtcctggcgcttcgtgctggcgacggcggggggcatgctctccaccgtgctgatgatgccgctggtcaactttatcggcggcgaagacaaagcgctcggcttccaggggggcatcgcggtgctgtcggtgattgccttcctgatgctggccttctgcttctttaccaccaaagagcgtgtcgaagcgccgccgagcagtacctcgatgcgtgaagacctgcgcgatatctggcgcaatgaccagtggcggggggtcggcgtgctcaccatcctcaatatcctcgcggtctgcgttcgcggcggcgcgatgatgtattacaccacctggatcatgggctcggcggcgctgttcaccgccttcctcacgacctactgcgtcggcaacctgattggctcggcgctggcgaaaccgctgaccgactggaaatgcaaagtcagcgtcttctggtggaccaacgccctcctggcggtgctcagcgtggcgatgttcttcgtaccgatggacgccgaaatcaccatgtttgtctttatcttcgtcattggcgtactgcaccagctggtgacgccaatccagtgggtaatgatgtccgacaccgtcgactacggcgaatggtgtaacggcaaacgcctgaccggcatcagcttcgccggtaccctgtttgtgctcaagttagggctggcgctgggcggcgcgctgatcggctggatgctggccggcggcggctatgacgccgccgctaaaacccagaacagcgccaccctcaccatcattatcgccttgttcaccctcgttccggcggtgtgctacctgctgagcgcggtgatcgccaaacgctactacacgctgaaaacgccgttcctgaaaaaaatgatggccgagctggccgagggcgcgcgtcgcaacgaacaagatttcaccgccgccccgatcgacaaagaatggcaaaactaa

SEQ ID NO: 269045 - DNA, 402 bp, Klebsiella pneumoniae; identical to SEQ ID NO: 230495

SEQ ID NO: 269046 - DNA, 1356 bp, Klebsiella pneumoniae; identical to SEQ ID NO: 135569

SEQ ID NO: 269047 - DNA, 429 bp, Klebsiella pneumoniae
gtgctgcatccaggtccggcccggcatcacggtatcgcgataacgatccgcctggagagccagggccgccaacagctgctcaagcagggtctcagcggcatccagcgccccgcgcagctggagcaccagtccggtgtcgatggcgtcctggctggtagcgccccagtgaacgtagcgcgcagcctcgggatctcgcgcttttacctggaccgtcagctgtttcaccagcgggatggccagattaccggctcccactgccgcctcgcccagcgcggcaaaatcgatggcctcgtggcggcaggccgcctgcgggatggtgccgccggaagcggtcgggccaattgtggcggcggcctgcgcttgcgccagcgccgcttcaaaatccagcatgccctgcacccgctgcgcgtcgctgaaccagtcggttag

SEQ ID NO: 269048 - DNA, 240 bp, Klebsiella pneumoniae
atgagagtatcgaaaacaaagatgaacgtatttgcctgcatttctcgccagaagcaagacagagatggattgcattttataatcaagttgaaacagaaatgcggttactcggatttctttcagactttaaagattatgcatctaaaatcgctgaaaatatggcaaggattgctgctttattacactattttaatggtgatgaaggggatgtatcacttaccgctgctgaagctgctatag

SEQ ID NO: 269049 - DNA, 228 bp, Klebsiella pneumoniae; identical to SEQ ID NO: 105755

SEQ ID NO: 269050 - DNA, 567 bp, Klebsiella pneumoniae
atgagtaaactacatcatagaacgaagtcaaagactaatgcatcattgatatcaatactacaaagattctccgacataattatgatatttatggggatgtatattacaaatgcaatatatcaaaaaatgtatgattctactgcattaataaatagcctgattgtacttgtttgtttccagatgattggtggtattacagatttttatagatcctggcgcggggtgaaaatttctacggaattgaagattataattcaaaattggacattaagtattgtatttacgtcaggtattttatcatttctagcaggtaatgatttagaaatagagtttttcttttgttggtatattattgtaagccttttccttattgtcagtcgtttttccattcgggcactaatgaatgttattaggaaattaggctataacacgcgtattgtagctctagcgggaaatatacctgttggtattaatctgatgaaaagttttgccgaggaaccatggcttggattaaaagtaaaaggtatttactgtgattgccccccaacgaactcaataggtcggtaa

SEQ ID NO: 269051 - DNA, 216 bp, Klebsiella pneumoniae; identical to SEQ ID NO: 210503

SEQ ID NO: 269052 - DNA, 516 bp, Klebsiella pneumoniae; identical to SEQ ID NO: 223624

SEQ ID NO: 269053 - DNA, 273 bp, Klebsiella pneumoniae; identical to SEQ ID NO: 221118

SEQ ID NO: 269054 - DNA, 195 bp, Klebsiella pneumoniae
atggctacgaccctcaccccgtcacatccgcagtttgtctttgtgtttgccgctgttcgtcgcgcagaccgtcagccccgcatctgtatgctccgcgccgtcgccggggatgaacacgctgcacgccagtccctcgttcgcgattacgtcctctcgtttgccggtcgtctgccggtggcggaggtgcgcgcatga

SEQ ID NO: 269055 - DNA, 1005 bp, Klebsiella pneumoniae
atggtagatgtaaaagcaatctttgaacgtgttggtgttgatctggaagatgggatttatggtatgtcaccttcaccgcttccacgtatgaagcaactggtaaaactcatgccagcggtagaagctggtgaatgcaccttagcagatatcaacatctatctgaatgatatccggtctgctcgtattgaagcagatgctaacagtaagatggctagtgaaaagactattcgcaagtgctggaatctgcttaaagaagctaagcaaaagtatccacatcttgagaaatatcctttagctcaggctgcatatctgatccacaaaggggagacggttaagccagcatctaaagccaatggctcagaggctgcgtataactacgctcgcctgttagctggtgaatctgttaacggcaagattttagtagatgatgccaactatcagctaatgattaaagactctgagatcttaggccgtctacttgatcaagagattgtaaacggacagcgcttgattggtgagattccgtttaacgctctggagtggattaaagccaacgatcaggaggcatatcaaaaggccatagaagccactacagcagacttgaaagcgaaagctgaagagaagctacaagcggcgttagctgagcaagagaagctactcagagaacagatttatgcacagcttggactaacagcgccagagggtaattctgttaaccctgctggattgccagcgcctgtacatacagcgccaacgtttacacctgtaggcgtggctgatgctgtaggtaaagatgttgctgaagagcttaaagctaagaagaaaaaagaatcagatgctgattttctggatcgcatgaaagcgcttatctgtgagaacaaggcaatggataacgcagactatcagcgcctgttagatatgaagggtaagaacaatgcaatggctacagagttggtagagcttttcgagacttcaccagaagagccagaagcggctaatgcgtag

SEQ ID NO: 269056 - DNA, 153 bp, Klebsiella pneumoniae
atgtttatttcattaggtcaattgatcatgctggtgatctttgcggtctgtgggtttagttacctgatgcgtattattatacaacttgaaaaagatgttaagtctttagatgaaatttgcgatgagtaccgcaaggagttatataaaaaatga

SEQ ID NO: 269057 - DNA, 636 bp, Klebsiella pneumoniae
atgaaaaagttaattattgctcttgctgtgctggcttcatttggcgcacaggctaatcgttgcgactatccagatcaggtagctaaagatggctcactgtgtggagctagggcggcttctgtgcgtcctggtggctatacgcctcctcctgaatactcagcacatgtacaggcttctcagcctctctacatgagccacgacaaactagttccgtttaatgatcagggggatatgcaaatagaacaaggtgaaaacacctatccggttatttttgagtttaaatgtaatggagatatgaatgttaattttgctggcggtcgctatttctccagcgttgaagattctgaagtaccgcaggaatggtatgatgtttccttagtggcgcataaccattacttaggggatcaggcacacacaatagcccctaatggaaacgataatctaaccagcatgaaagaagctatagatgctaacggtaacggggttatcactttaggtgattttcctcatgtgtggagttttgcagatctcaccattacctttaagcaccataaagctgttagcgcctcttttattggtgatgatcttaactaccaatgtaaacgaattgaagttagtaatccgtggaaggcttaa

SEQ ID NO: 269058 - DNA, 414 bp, Klebsiella pneumoniae
gtgaaaaagattttattagcagcggcattattagccgtagctggctcagcgtctgcctttgatcctaatatcatgtttaccactgtttaccagtgcggaaagtatgtaacggttcagatgaataacaattctgagagcttcaagatgttcacagtgaatgctaatgactcagacggctaccctaacactattgcatatcagtcgcagactacagacgacagcgccaccaatgagaacggcgatactatttacaatagctgggctgatgatgccaataacataagcctacgctatgagcttgtagaaacagcggggaaattagataagaccgttttaattgtctctgatagctcaggcattactaaaggccaaaaggtgaagatatctaaaatccaatgctcacaggtgaaatga

SEQ ID NO: 269059 - DNA, 201 bp, Klebsiella pneumoniae
atgaatccttttcaattctatatggacgctttaggggcggctgctgatggcctcttttgcttaatgcttattggtgtaggtttagtggtgtgcggtctggtggctgaattctttgcagatcgtaaagagaacatccgacacaatgagttaataaacgagcgccgtagtcgcagagcgccacaagtggagggcttagaatga

SEQ ID NO: 269060 - DNA, 141 bp, Klebsiella pneumoniae
atgaagtacatctacagaggcttcatgatcggaatcggcttgatggtggctcatgttgtcgtaggggcaacggtgatcgccacgctctggagcacaatagaaccagttttaaagcagacgttagcagcatatttccactaa

SEQ ID NO: 269061 - DNA, 192 bp, Klebsiella pneumoniae
atgaacgctttaacgatctgtcaaataattgaaaatgaattgcttaaaaaatatggaactctttacaaagcgcataaagtgctaaatgtgcctttagggtcaatttataaattgcgtagtaaaccatcttatgattcagcattcagatttgctaatgctgctggtattattttaaaagtggaggtgatctaa

SEQ ID NO: 269062 - DNA, 591 bp, Klebsiella pneumoniae
atggcacgtgtaagcatgcttaataaatctgagattgattacatgactgaagagcaaaagctagccagatggcctaatgctctgaaactgaaacgtgagatagaacgccgtagggaagaagaatttaaaggtaaattcccgacttggaaaagtaaagtaattcgtccatataaaagcccagcggagaaagtaagaaaacctattgtagctaaccctattgatctggatatcttcaaaaaagtagtagttattgataatgaattttatcaaatgaatgatgctcaaacaggggaattaactaaatgcactattataggtgctgagaaagattaccctagagtaaggctatatgaattccacggctttaaatctaaatacgtgatggctcatagggctatggctgcttattatgaacctaatcagaagttaccgggtaatgtattggtagaccatagaaacggtgatcgaagagactacagagcggagaatttacgattagtgacggtggaacaaaacgcccataacagaccagaagacagagatgttattcgctatagcaattccatcgatggcaacactattttaatgtaa

SEQ ID NO: 269063 - DNA, 651 bp, Klebsiella pneumoniae
atgagcgctgaacaactgcaggctacatttgatgaagctgtaaaaaatttcctatttatcaaggggttaagtaatagcaagcaagaagtatctgaagatgactatatcaatctcaatcgtgcttacttcaggctgtgtacacatttttatgactcatttttaatgatgatcggcaacggcaatcctttccctgctatagtcgttcttcgttcaatcctggaagtatataccaaagctatatatctggagtttatcgaaaaacccaaaaaaacggatgtaaaaccattaatttccggagaaaaggaattccctcagttcttcaagatggccgcagcactcgataagtttggggaagaagggaagaatggcctagagggaatgtttatacagttcactaagcagggactagcccaatacgaaaagttctcgctctttacacatggccgcggggagtttttgcaagctttcatgaagtcggacacagttgcactacatcccaatgatgtcagcgatttgatttatacggccagaggaatgtatgaaacattttccctctgctacttcggagtgcagggactgacccgcgagttccaaaaattgaaaaatgagttacaaaaatcggctctgtataaaaataagagcgcaggttag

SEQ ID NO: 269064 - DNA, 1443 bp, Klebsiella pneumoniae
atgaaaaagttaacggcactaataataggtaatggtgattatcagaatgcatcactattgaaaaatcctacgaatgatgcggaggatatatctggtatattaataagatcaggttttgatgttataactctgaaggatgcttctttccgggaaatgaaagaaagattgagagagtttgaagataaatctaaagactttaatggcgtgtcaatgttcttttttgcggggcatggcgttgaggttgacggtgaaaactatcttattgcatgtgatacagaagttagaaacaaagctgatatagagacgacagctttatcactcaatgaagttattcgtcgaatggagcctgaagataacataactcgtacaagcataatcattcttgatgcatgtagagataatccttttcaaagaaaatggcgaggcgcaaatcaagggttggcccctgtttatgcacctagaggaacattacttgctttttctacatccccgggacagtatgcttctgatggtgatgggcgtaatggcctttatactgaggctctgttaaagcatatagaggaaccagatcttcctatcgaaacaatgtttaaacgtgttcgaaatacattgggagcgaaaacaaagcagaaacaaatatcttgggagcacacttcactttctggagagttctatttcaacttgagtacagcgtcacgtattgatatttatagctcatcagcgattaaagataaattatttgtacttgatgaaagtaaatggactcatcgtgcaataacaactttgaaaacttatgattggtatgtacaaaatacagcatttagcaagatcactgttggaaacatcaatggtgcaatgaatgataacttatttgttttagggagaaatatattacaggcagcacaaggaggttcaaatgacgctgtggcgttcattaataacttcaggagtaaaactgatggtgtggaacctgaaaaaagaaaagcgattttagatggtgttatttttgagatctttttcgattcaatgggggagtttagagataagccaaagcttaagctttttaatgaggttttcgaacttcagctatatgaagaatttaaagatagtttcgaatttatctctggggtattagctccttatgctcaaggttttctcagggtccctggttcgggtcaagccctaggtgtggatgtaaggttgggttcccaagtgaatgtcgaaggtatttatattgacggagaggattatcttgaagatgctcctgaacttgatgaagatgattatgaacaagtctcaaaaagtaagtttgagtacaaattatctagggagttgctggttccattgagattaatgaaggtcacttatagtcacgataaagaactcagcggtaagataagagtctctcgttggtgggaagttaacttatcaactcataagtga

SEQ ID NO: 269065 - DNA, 687 bp, Klebsiella pneumoniae
atgtattttttattgccattgagtaaacagactgactacgggtttggatttacagcaggtcaatttatggacgcagctaatttggttattgaaaaagatacgtcagatgatttatcgatgcccattaattatcttctccggcatagtatagaattatacctaaagtcttttataataattctgacaaagttcaaagatcttggtgatgtggggggagcatttgacgtaaatcgtatatgtataggtaaagttactatttctaattgtcacaatataagtgctttgtacaatgaatttaagatgattttatctttagttgaaaaagaactgccgagtaaaggtgattgggatattcctcatgaagttgaacgatatgttaatttaatcaatggacatgactcaaaaagcgatcttttccgctacccgattaccaataatatgaatgcagatgaaaagaaaaataaggttagaactatttctgctgataaggcaatcagtgcggtgaatcgtgatggagggaagcctgtaaaatgcttcatgctacttggtcatgatgatgatatattggaagtatacgatgttaatactaatgttcaaccggatgtaaggaaggcattaattaatcttagtgagtttatgtataatttccatgcaatgcttagatttgttgtttgtaaaggtttttaa

SEQ ID NO: 269066 - DNA, 441 bp, Klebsiella pneumoniae
atggatagagagctgagtgagcaagtgatgattgaacgagtagaaatgattgcccgcctgacaaccgaaggcgtttgccaggaaagagatcgtgaaatcgcattaaatttaattgctgaaattgcgagagggaatttgatgaaaaacgactcgttttccgttgttttctccgcaacgcctgttgaaaaaagatttaaaagagagggggatgtgcggatacacatcacattggataaagcccatcaaatcgaaccgaatctagttgatgcctttaagcgtgaactcacacgacgtgtgcaatccgtttttccttcgacgcgagttaccgttaagaaaggctcaatgacaggtgttgaacttatggggtttgacaaagaatcagaacgggaagcgttggatagtattcttcaacaagtctgggaagacgagagctggcgctag

SEQ ID NO: 269067 - DNA, 1320 bp, Klebsiella pneumoniae
atgagccagtcagctaatataatttctgtttctgatatttcggcaaaagtcagggaaatagaaactgcttatcgcaattatctggatattttccgtataccagaagatcacagaattgtagtgaattattcagcgggtaaagacagcactgcaacactggccgtagcgaatgcgttgtttggtcgtcgcgtacaggccgtgatggccgatactgacaatgagcatgaattgacgatcgatttcgccaggactatccatgaacagattggatgtaacccgattaaggttgtgaagcgcaactacagcgaggcagattttgcccgccgacgcgcctatatgaaaaagaactggtcgaagaaacaggccatccggatgggggcttaccggggcatcatcatgccgtcactggcccgtgcagataccgcgtttggccaagcttggcagaagacggctaagcgctggggtatcgactttgaaaccgcattagatgcggccctgtcagtgatgcatccaagtggaaatagttttctcgatgcggctctgctccacggcaaattcccgatgctacgcgaccgtttttgtaccgacgagctcaaaatacagattgcctacgatgcggccattcgccctatgctggatgtgggcgatgttgtcgttcagtggtcaggtgttcgcggtgatgagtcatccaaacgtgctggttatgaccgcttcgcagctgatatgcgcgatgaggggtttctctataacttcctgcccattcatcaatggacggcggcggatgtgtttgccctgcataagtatctgggtatcaggccaaatccactttatttgcagggtgcttctcgcgtaggttgcatgaactgtgtgctttgcaataaagaggaaatttcagagacggcggcacgctggccggagcatatcgaaaaacatcacgcgtgggagaagaaagtacgtctggcatctcgctgggttcactggatgagtatcggcacagaaagccaggcatggatgcgtatgcatcttgggagtcgtgatgttatccattgttatgaggatgagttcactggtgaagagattgtacagcgcagaagatacccgataaatctaggtcaggaagtaaaattatatgggctggagcctgacatccagaatattgaatggtcaggattctatgggcctcgtggaaacatgggggctccatcagcgcttgatgttgtggagtgggcaaaaactggtcgcggcggaaaggtctatgacctcgtaaaagccagtcttgatacggtcacttgctcctcgcgctacggcttgtgcgaatga

SEQ ID NO: 269068 - DNA, 273 bp, Klebsiella pneumoniae
atgggtattcgtatcgaagtcggcgacaaatgggtaattaccagcgaccaatatcaattcatcctgaacgagaagaaagtcgctcaatccgggaagaaagctggcgaggaatggctcgataccatcggctattacccgaagattaatcagcttatttctgggctgattaatcatcatattcaaactacaacgattaattctctttctgaaatggcggcggaaatagagcgagttggcgctatctgctctgcggaatttaagggggaaaaatga

SEQ ID NO: 269069 - DNA, 894 bp, Klebsiella pneumoniae
atgaaaaagtgccctatctgtgaacagctaaacagccttgataatcatctttatgaattatctatagccagtgaatactttaaatctgagaaatatagtaatttttcaaatatctctgaatggcttaagctttctgcctatcttgaagaagttctaattaccccagaaaaatatgcaggctctgacttgatatggtgtagacctgcagcggaagcttatcaggcagaacggattcattacagcctctactcaacagctctgacccgctttctatatacctctaacgcattagaggaaacgtaccgtttcgcaagtacctattactctctatcaccgaaagagatcaaagataatagagaattcaataacagtaagaagagtgttctcctattcgaaaacactagcgaaaataacttacccaaagacttctatcaccattgtgaaaacttgtttttgaaattcgaagcttataaaaaagaatataatcctaaaattagcatcatcaaaaattaccctagtaatcataaatgtcacggcttacacatcgtccgcaacctcagaaattttatcgcacatggtacgattccaataaatcttgtgcctgaataccatggagccgctgagatgtggcatgtgttacatggtttgctaatctctgcaacccgagtcacagctctatacatacaatcattccttcttgaatttagcgataagtttgatatgtacacttacctccaaaggatggattacgaatactatcttgaacggcaagatgacatgctagaggacgacccggagcatgtgacgctgatagcaccttcaagcgctcaacaattgataactagacttcacctttcagatggctttggttatttgaaaatcgcgacatattaa

SEQ ID NO: 269070 - DNA, 1032 bp, Klebsiella pneumoniae
atgactgatgcccatcaacctccccaccaggaaggcagccatcacggcagcagccgtcttatccgtcacgcctatggcgaaggtgagaaatatgttccgctggtgctgcgtgcccagcagctatgggacgaactggcagagatcagtggcgaagccgtgtttgaacgcaccggcgtcattaacctcggccccgccagctccgcttttctcgccaacgtcgccgccagcgcccgtgcgttccagcttgaggtggaagagctggatgcccaggccgtgatgcagcgctggccggagatacgcctccccgatgactatcgggcgattttcgaacccgcttccggcgtactgcgcagcgaactggccgtcgaaacctggatccgtctggcgcgggaagcaggctgcgcgcagctattcaactgtccggtctcggctattcatcaccatgctgacgggatcaccatcgataccctcgacggtgaatatcatggtaaaaagctgctggtcagcgccggcacctgggccacccgcctgcttccggacctccctatccagccggtacgcaaggtgttcgcctggtaccaggccgatggccgttacagcagcaagaatcacttcccggccttcaccggcgagttgcccaatggcgatcaatattacggtttcccggcggaagataatgaactgaaaattggcaagcataacggcggccagccgatctccaccccgcaggagcgggtagcgtttggcgctgtcgccagcgatggttccgaatccttcccgtttttgcgtaacgtcctgcctggcatcggcggctgcctgcacggcgcctcctgtacctacgacaataccgtcgatgaggactttattatcgatacgttgccaggcaggccagacacgctgctgatcaccgggctgagcggccacggctttaagtttgcgccggtgctgggcgaaattgccagtcagtttgctcagggcgaagcatcgagcttcaatctggcccccttttctctggcgcgctttaacgcgtaa

SEQ ID NO: 269071 - DNA, 1128 bp, Klebsiella pneumoniae
atgaaagggataacgacatggatagtgctgggcagcctgctgctgtcaggctgcgaccagaaaagcatccacaaggacgcgccgatgaacccgctgaccgatattaatgcccgcctggcgtttacctgtaaacaccagattattcctgaggcgtctgcggatacagatgttctgtttaaatatgcccgctggctgcagaaaaataacctgattaatcgggataaaatggtggatgcggaaattgcgcgactgtatcgcatcgcggcggaaaacgggcattacaaagccagtattaatctgcagaacggtgcgctgcgcgggcgcttttcgctgagcagccatgaacgtctgcgcctgagtcagcaactgattgatgcgaaggtggccgccggctactactttattgccatctatctggagcacggtgcggcaggactggcgcaggacccggagatggcgctgcgttactatcgtaaggcggcagatgaagggaatcctcaggcgcaggcttttttaggcgaaaaactatttccggccaaaagagctcctcaggtagccatgcagatgtttcgatgcgcggccctacaaggtgagggaaaagcggctaattcgttagggaatatgcttgcaatttacaaaaaatatccggaggcagttgaggttttccaactgggcgttgcagcaggagattcaacctcagccggtttcctgatgcacggattttccggacctgaaccaacggacaggttgttctatctggcactggagaaagacccggagcgtgcccgtcgttatgagcagataggtgctgtgctggcgaaatactcatgggcccatcctgtcgtcccggaaatcaacgatatcgtgccgctgcccccggcgccgctgccggaatgggacggtaagctgaagtggctggaggaatgggaggccaatatcccgccgccagtgcctgatgcagcgctgatagagaaactggcgcaggcgaaacagctgaacccggcgacgggcaggccgctgccgacgtcaccggactttgagaaggacagcgtggcgcggctgcagtgccgcagcggtgagccctgcccgcaaagtggactgcaccccaaaagttggacacccaactga

SEQ ID NO: 269072 - DNA, 564 bp, Klebsiella pneumoniae
atgaaccttgatgacaaatccctgtttcttgacgccatggaagatgtccagcctctgaaacgtaacaatgacgtgcactggcatcccgggcgtaacagccgggccccgcaacgcgtcgataccctgcagctggataattttctcaccaccggctatctcgatatcgtgccgctcgccacgccgctggagtttaagcgagaagggctgcagagcggcgtgctggataagctgcggcgggggaaatacagccagcaggcgagcctctccctgctgcgccagccggtggaacagtgccggcagatgctcttcgcctttatggtgcaggcgcagaaagaggggttacgcaatgtgctgatcgttcacggcaaaggccgcgacgaccagtcccacgccaatattatccgcagctatctggcgcgctggctggaagagctgccggaggtgcaggccttctgcgccgcgcttccgcatcatggaggcagcggcgcctgctatgttgcgctgcgtaaatcggcgcaggcgaagcaggagacctgggagcagcacgccaagcgcagtcgttag

SEQ ID NO: 269073 - DNA, 909 bp, Klebsiella pneumoniae
atggcatttcagattaaatttcatcaaattcgcgccttcgtcgaagtagcccgggaaggcagtatccgtggcgccagccgggcgctggcggtctcgcagccggcgctgaccaaagcgattaaagagctggaggaggggctttccgcccagctgttcgtccgccgcagccagggggtggcgttaaccgataatggcgaaagtttttatcaacatgcgagcctgatccttgaggagctgcgggcggcgcaggatgaactgctgcagcgccagggggaacaggccgggcaaattaatattggccttggcgccagcgtcgcccggtcgctgatgccgtcggtgatctgccgctttcatcagcagcatccgcaggtgaaggtacggatcatggagggtcaactgctggcgatgattaatgagctgcgccagggggagctggatttcaccattaatacctattaccccgggccgtacgaccatgagttcagctttgagaaactgtttgagaaaccgttcgcggtgttcgcccgcgcgggccatccggcggcgcaggccacctcgctgggggagttgatggatcaccactggaccatgccgacgccgcgcggcagctacttcaagcagctgcaggagcgcttcgaacagctgggacgggagccaaaggtggggatcgtctgcgaaacgttctcatcctgcatcagcctggtggtgaaaagtgattttctcagcatcctgccggtggagctgggcaacgacccgctgatggccgacaaactggtgatgatccccatccgtgaagtgttacccaccgccacctattatctgatccagcggcgcgatacccggcagacgccgctcacggcgtcgttaatcaccctgttccgccgccagagccgacaattgtttccttaa

SEQ ID NO: 269074 - DNA, 1311 bp, Klebsiella pneumoniae
atgccgcaacttgatgaatacctccgccagctggcgccctccatgacccaatggcgccgtgattttcacctgcacgctgaatccggctggctggagtttcgcaccgccagtaaggtcgcggatattcttgacgggctaggctatcagctggcgctaggccgcgacgtcatcgatgccgacagccggatggggctgccggacgaggagaccctggcccgggctttcgaacgcgcccgcgaacagggcgcgccggagcgctggctgccggcgtttgaaggtggtttcgccggcgtggtggccacgctcgacaccgggcggcccgggccaaccctggcctttcgcgtcgatatggatgccctcgatctcaacgaacagcatgacgatagccaccgcccccatcgcgatcatttcgcctcctgcaacgccggcatgatgcacgcctgcggccatgacggccataccgccatcgggctggggctggcgcatgtgctcaagcagtatgccgcccagctcaatggcgtcattaaactgattttccagcctgctgaagagggtacccgcggcgcccgcgcgatggtggccgccggcgtggttgatgacgtggattatttcacggcgatccatatcgggaccggcgtgccggcaggtaccgtcgtctgcggtggagacaactttatggccaccaccaaattcgacgtgcagttcagcggcgtggctgcccacgccggcggcaagcccgaggacgggcgcaacgcgctgctggccgccgcccaggccgcccttggcctgcacgccatcccgccgcacagcgccggcgcctcgcgggtcaacgtcggggtgatgcaggccggtacagggcgcaacgtggtgccctcttccgcgctgttaaaagtggaaacccgcggcgaaagcgaagccattaatcagtacgtgttcgagcgggcgcagcacgtcgtcgccggggctgcggcgatgtacgaagcccgctacgaactgcgcatgatgggcgcggcgaccgccagcgcaccgtcgccggcgtgggtggactatctgcgcgaacaggccgcccgggtgcccggcgtgcaacaggcggtggatcgcatcgccgccccggcgggctcggaagacgccaccctgatgatggcccgggtccaggcgcgcggcggcctcgcctcgtacatgattttcggcactgaactcagcgccggtcaccacaacgaaaagtttgacttcgacgagagcgtgatggcggtagcggtcgaaaccctggcgcgcgtcgcgcttaactttccctggcagcggggggtgtaa

SEQ ID NO: 269075 - DNA, 1527 bp, Klebsiella pneumoniae
atgagtatgtcatccataccgtcatcttcccccggcggaaagcgctatggctgggtagagaagatcggtaacaaggtcccgcacccgtttttgctgtttatctatctcatcgccgtgctgatcgctgccacggcaatcctctccgccctcaacgttggggtacaaaacccaactgacggttcgcgggtggtggtcaaaaacctgctcagcgtggaaggattgcactggtttttgccgaacgtgattaaaaacttcagcggtttcgcgccgctgggcgcgatcctcgccctggtgctgggcgccggctttgccgagcgggtgggcctgttaccggcgttgatggtcaagatggcctcgcacgtcagcgcccgctatgccagctatatggtgctgtttatcgcctttttcagccatatctcttccgatgcggcgctggtgattatgccgccgctgggggcgctgatgtttcttgccgtcggtcggcatcctgtcgctggtctgctggcggcgatagccggcgtgggctgcggctttaccgccaatctactgattgtcaccaccgacgtgctgctctccgggatcagcaccgaggcggcaaagtccatcgatgcctctttgcacgtcagtgtgatcgacaactggtactttatggcgacctcggtgatcgttctgacgctcgtcggcggactgatcaccgataagctggtcgagccgcggctgggccagtggcaaggcagtcgtgatgaaaagctgcagacgctgacgcccggggagcggttcggcctgcgcatcgccggcgtggcgacgctggtattcgtggcggtcatcgccctgatggtggtccccgaaaacggtattcttcgcgatccggttcagcatacggtcatgccctcgccgtttatcaaaggcatcgtgccgctaattatctttttcttctttgtcgtgtcgctggcatacggcatcgccaccggcaaaattcgccgccaggccgacctgccgcagttaatgattgagccgatgaaagagatggccgggtttatcgtgatggtcttcccgctggcgcagttcgtggcgatgttcaactggagcaacatgggcaagtttatggccgtcgggctgacggatctgctggagagttcaggcatgaacggtgttccggcgtttgtcggccttgcgctgctgtcggcttttctgtgtatgtttatcgccagcggctcggccatctggtcgattctggcgccgatcttcgtgccaatgtttatgctgttgggctttcacccggcgtttgcgcagatcctgtttcgtatcgctgattcatcggtgctgccgctggcgccggtgtcaccgtttgtgccgttgtttctcggctttctacagcgctaccggccggatgcccgcctcggcacctactactcgctggtgctcccttacccgctgatttttctcgccgtctggctgctgttgctggtgggctggtatctggtgggactgccgatcggccctggcatctatccgcggctgtcttaa

SEQ ID NO: 269076 - DNA, 159 bp, Klebsiella pneumoniae
atgcaatatatactgactggcgtaatcgtactgatcttcagcggtctggttattcacggtatgtcgctgttgcttgagcgagggtatcgcgcgcttttcggcatattcgccggagccggggaagcgacccgtaagttcaaagtgaagatatcgcgttaa

SEQ ID NO: 269077 - DNA, 516 bp, Klebsiella pneumoniae; identical to SEQ ID NO: 136767

SEQ ID NO: 269078 - DNA, 753 bp, Klebsiella pneumoniae
atgatccctgagaagcgaattattcgacgcattcagtctggcggttgtgcaatccattgtcaggattgcagcattagccagctctgcatcccctttactctgaacgagcatgagcttgatcagctggataatattatcgagcggaaaaagcctatccagaaaggtcaaaccttgttcaaagccggtgatgagctgaagtcgttgtacgctattcgctccgggaccatcaaaagctacaccatcaccgagcaaggtgatgagcagatcactggcttccatctggcgggcgacctggtgggctttgacgccatcggcaccggtctgcacccgagctttgcgcaggcgctggaaacctcaatggtctgcgagatccccttcgaaacccttgacgatctttccggaaaaatgcccaatctgcgtcagcagatgatgcgcctgatgagcggtgagattaaaggcgaccaggatatgatcctgttgctttccaaaaagaatgccgaagagcgcctggccgcgtttatctataacctttctcgtcgtttcgcccagcgcggcttctcaccacgtgagttccggctgaccatgacccgcggcgatattggcaactatctcggcctcaccgtcgaaaccatcagccgtctgcttggccgttttcagaaaagcggcatgctggcggtgaaaggcaaatatatcactattgaaaacagcgatctgctggcccagctggccgggcaggcgcgcaacgtcgcttaa

SEQ ID NO: 269079 - DNA, 951 bp, Klebsiella pneumoniae
atggcgaagtatcagagcatgctggtagtaatcgatcctaaccaggacgaccagccggcgctaaggcgagcggtgtacctgcaccaacggattggtggacgcatcaaagcctttttgccgatctatgatttttcctatgaaatgaccaccctgctgtcgccggacgagcggacggcaatgcgccagggcgtcattgcccaacgaacggcctggatccgcgagcaggcgaaattctacctggaatcaggcgtgccgattgacgtgaaagtggtgtggcacaaccgtcccttcgaagcgattattcaggaggtggtcagtgagaaacacgatctgctgctgaagatggcccaccagcacgacaaactggaggcggtgatctttaccccgacggactggcatctgctgcgtaaatgcccttgcccggtgtggatggtcaaagaccagccgtggccggaaggcggcaaagcgctggtcgccgtcaatctcgccagcgaagagaattatcacaacacccttaacgagaagctggttcgcgagacgctgtcgctggcggaagaagtcaaccacactgaagtgcacctgatcggtgcctacccggtgacgccgatcaatatcgcgatagaactgccggattttgatcccagcgtctacaacgacgcgatccgcggccagcatctgctggcgatgaaagcgctgcggcagaagtttggcatcgatgaaaaattcacccacgtcgaaaaaggactgcctgaagaggtgatcccggacctcgccgagcatctgcaggcggggatcgtggtgctgggaacggtcggacgtaccggcctgtcggcggcgttcctcggcaataccgcggaacaggtcgtcgatcatctgcgctgtgacctgttggtgctgaaaccggaggcctaccagacgccggtggaactggacgacgacgacgacgattaa

SEQ ID NO: 269080 - DNA, 222 bp, Klebsiella pneumoniae; identical to SEQ ID NO: 211620

SEQ ID NO: 269081 - DNA, 1389 bp, Klebsiella pneumoniae
atgtctggtggattagtaacggctgcatacattgttgctgcaatcctgtttattttcagcctggcgggcctgtcgaaacacgaaacgtcgcagcagggcaactatttcggcatcgccgggatggccattgccctgatcgctaccatcctggggccggacgccggcaacgtcggctggattattcttgcgatggtgatcggcggggcgatcggtattcgtctggcgaagaaggtcgagatgaccgaaatgccggagctggtggctatcctgcacagcttcgtgggtctggcagcggtgctggtgggtttcaacagctacctgcagcatgaaaccggtatggagcaaattctggtcaatattcatttgaccgaagtgttcctcgggatcttcatcggcgcggtgaccttcaccggttcggtggtggcgtttggtaaactgcgcggcaaaatttcctccaggccgctgatgctgcccaatcgccataagctgaacctggcggcgctggtggtttccttcatcctgatggtgatttttgttcgctctgacagcaccggcacccaggtcctgtgcctgctggtgatgaccgcgatcgcgctggcctttggctggcacctggtggcctctatcggcggtgcggacatgccggtggtggtctcgatgctcaactcctactcgggctgggcagcagcggcggcgggctttatgctgagtaatgacctgctgatcgtcaccggcgcgctggtgggctcttccggcgccatcctctcttacattatgtgtaaggcgatgaaccgctcctttatcagcgtgatcgccgggggcttcggcaccgatggttcctcaagcggcggcgatgaagaagtgggcgagcatcgcgagattagcgccgaagagacggcggagatgctgaaaaactcgcactcggtgatcatcaccccgggctacggtatggcggtggctcaggcgcagtatccggtagcagaaattaccgagaagctgcgggcgcggggtatcaaagtacgctttggtattcatccggtggccgggcgcctcccggggcatatgaacgtcctgctggcggaagccaaagtgccttacgacatcgtgctggagatggatgagatcaacgacgatttcagcgacaccgacaccgtgctggtgatcggcgccaacgataccgtcaacccggcggcgcaggacgatccgaagagcccgatcgccggcatgccggtgctcgaggtgtggaaagcgcagaatgtggtggtctttaagcgttcaatgaacaccggttacgccggcgtacagaacccgctgttctttaaagagaacactcatatgctgtttggcgatgctaaagccagcgtcgatgcgatcctgaaagcgctgtaa

SEQ ID NO: 269082 - DNA, 1530 bp, Klebsiella pneumoniae
atgcgtattggtgtaccacaagaaaggctagcccaggagacccgggccgccgccacgccgaagaccgttgagcaattgctcaaactcggctttagcgtcgcggtagaaagcggcgccgggaagctggccagctttgacgatgaggcctttgccgaggcaggagctgaaatcgtgaccggcgacgaggtatggcattctgatgtcatccttaaggtcaatgctccgaatgacgatgaaattgccctgctgaatccggggaccacgctgattagttttatctggccggcgcaaaacccgcagctgatggaaaaactggcggcccgtaatatcaacgtaatggcgatggattccgtgccgcgtatttcccgcgcccagtcgctggatgcgctcagctcaatggccaacatcgccgggtaccgcgctatcgttgaagcggcgcatgaatttggtcgattctttaccgggcagattacggcggcaggcaaggttccgcccgccaaggtgatggtcattggcgccggggtagccggtctggcggcgattggcgccgccaacagcctgggcgctattgttcgcgccttcgatacccgtccggaagtgaaggagcaggtgcagagtatgggcgccgagttcctcgagctggactttaaagaggaagcgggcagcggcgatggctacgccaaggtgatgtctgaggcctttattaaggctgaaatggcgctgttcgccgcgcaggcgaaagaggtcgatatcattgtcaccacggcgttaatcccgggcaaaccggcgccgaagctgatcacccgcgaaatggtcgactccatgaaatcgggcagcgtggtggtcgatctggcctcgcaaaacggcggcaactgtgagtacaccgtaccgggcgaagtggtgaccaccgccaacggcgtgaaaatcatcggttacaccgatcttcctggccgtctgccgacccagtcctcccagctctacggcaccaacctggtgaatctgctgaagctgctgtgcaaagagaaagacggcaatatcgttatcgatttcgatgacgtggtagtgcgcggtgtgaccgttgttcgcgaaggtgaaatcacctggccggcgccgccgattcaggtctccgctcagccgcaggccgcggcgaaaaaagtggaagcaccgaaagaagcggtgaaaccggcgtcgccgtggcgcaaatatgcgctgatggcgctggcgattattctcttcggctggctggccaacgtggcgccaaaagagttcctcggccatttcaccgtcttcgcgctggcctgcgtggtgggttactacgtggtgtggaacgtctcccatgcgctgcatacgccgctgatgtcggtgaccaatgccatttcgggcattatcgtggttggcgcgttgttgcagataggccacggcggctgggtcagcttcctgagctttatcgcggtgctgatcgccagcattaatattttcggtggttttaccgtgactcagcgcatgctgaaaatgtttcgcaaaggataa

SEQ ID NO: 269083 - DNA, 951 bp, Klebsiella pneumoniae
atgaagcttaaaaacaccctcctggcgtctgctctcctgacaaccgccacgttgtctgcccatgcagcgaccgagttgaccccggagcaggcggctgcgctgaagccctacgatcgcgttgtcgtcaccggccggtttaatgccattggcgatgcggtacaggcagtatcgcgcaaagccgacaaagacggcgcggcctcattctatgttgtcgacacgtcggactacggcaatggcggcaactggcgcgtcacggctgacctttataaagaagacgcgccgaaagcggatgcgccgaagaatcgcattatcaacggcgtgatggagttgccgaaagatcaggccgttgagctgatgccttacgacaccgtcaccgttcagggcttctatcgcagccagccggaagtcaacgacgccatcaccaaagcggcgaaagcaaaaggcgcctatgcgttctttatcgtccgccaggttgacgccaaccagggcggcaaccagcgcattaccgcttatatctacaaaaaagatgctgaaaaacgcgtgctgcagagcccggacgctatcccggctgactctgaagctggccgcgcagcgctggccaaaggcggcgaagcggcgaagaacgttgaaattccgggcgttgccaccaccgccgcggtgggttcgggtaccggcgttgggcgtttctttgagactcagtcttcgaaaggtggacgttacactgtcaccctgccgaacggcactaaggtcgaagaagtaaacaaagtgactgcggcgcaaatggtgccgttcgataacatccagttcaccggcaactacggcaacatgaccgaaatctcctatcagacggcgaaacgcgcggcgaagaaaggggcgaagtactaccacatcacccgccagtggcaggaacgcggcggcaacatcaccatcagcgccgatttgtacaaataa

SEQ ID NO: 269084 - DNA, 1383 bp, Klebsiella pneumoniae
atggaaaagaaactgggcctgagcgccctgaccgccctggtccttagctcaatgctcggcgctggcgtattcagtttgccgcaaaatatggctgccgtggccagcccctccgctctgctcattggctgggccatcaccggcgtcgggatcctgtttctcgctttcgccatgctgctgttgacccgtattcgtcccgacctcgacggcgggatcttcacctacgctcgcgaaggattcggcgaactgatcggcttctgctccgcctggggatactggctgtgcgcggtgatcgccaatgtctcctatctggttatcgtcttttcggcgctcagttttttcaccgatacccctgagctgcgcctgtttggcgatggtaatacctggcagtctatcgttggcgcgtcggttctgctgtgggtcgtccactttctggtcctgcgcggtgtccagacggcagcggggattaacctggtggccaccctcgccaagcttctgccgctgggcgcctttgtcgcgctcgccgccctggcctttcagctggatacgttccgcctcgattttagcggcctggcgctgggcgtgccggtatgggagcaggtcaaaaacaccatgctgatcaccctgtgggtgtttatcggcgtggagggggcggtagtcgtgtccgcgcgggcgcgacacaagcgcgacgttggccgcgcgacgctgctggcggtgctgtcggccctcgcggtgtatctgctggtcaccctgctgtcgctgggcgttgtgccgcgcagcgaactggccgaaatgcgtaacccgtcgatggcgggactgatggtcaggctgatggggtcatggggggagatcgtcattgccgccgggctgatcgtgtcggtgtgcggcgcttatctcagctggaccatcatggccgcggaggtgcctttcctcgccgctactcataaagccttcccgcgcctgtttgcccgtcagaatagcaacaacgccccctccgcctcattgtggttgaccaatatcagcgttcaggtatcgctggtgctgatctggctgaccgggtcggactacggcacgctgctgaccattgcctctgagatgattctcgtgccctatctgctggtcggcgcctttctgctgaaaatcgccactcgcccgctgcataaagcggtggctatcggcgcctgtatttatggcatatggttattatacgcgtcggggcctgtgcatttgctgttgtcggtggtactttacgctccgggtcttctggtctttttgtacgcccgacgtacgcaccagcacgatcgttcgctcaaacgccgcgaagtggcgctaattggtttattgctggttgccgctgtgccggcaacgtggatgctggtggggtaa

SEQ ID NO: 269085 - DNA, 723 bp, Klebsiella pneumoniae
atggctgaacaacagccccgcccgattctgatcacaggagcaggccgccgcatcggcctcgctctggcacaccattttctgcagcagcgccagccggtcatcgtcagctatcgtacgccctatccggcgattgacggcctgcgcgaagcgggcgcgctctgcctgcaggccgattttagcagcgatgacggcattctgaccttcgctgaagcggtcaaatcacacaccgacggtctgcgcgccatcatccataacgccagcgactggatggcggaaaagccgggcgtcccgctgagcaccgtcatcaaccgcatgatgcagatccacgtccacgccccctatctgctcaaccatgcgctggaggcgttgctgcgcggccatggccatgccgccagcgacattatccatatcaccgattacgtggtggagcgcgggagcgacaaacatatcgcctatgccgccagcaaagccgccctggataacatgacccgctccttcgctcgcaagctggcgccagaggttaaggtcaacgccattgcgccgtcgctaatcatgtttaatgagggtgacgacgaggcctatcgtcagcaggcgctggataaatcgctgatgaaaatcgcccctggcgaaaaagagattagcgatctcatcgattacctgtttaccagtcgctacgttaccggccgctcattcgctgtcgacggcggccgcccgctgcgctag

SEQ ID NO: 269086 - DNA, 336 bp, Klebsiella pneumoniae
atggggctgttaatcaaagggctgctgggagcgctggtggtggtgctgattggcgtgctggcgaaaaccaaaaactacgctatcgctggcctggtcccgctgtttcccacctttgcgctcatcgctcattatattgtcgccagcgagcgggggatcgaagccctgcgcgcgaccatcgtattcggcatgtggtcgattcttccctattttatctatctgctgtcactgtggtatttcaccgggatcatgcgcctgccgttggcgctggcaggcgcggtgggatgctgggggctgtgcgcctggctgttaatcctcggctggagccgtttccactag

SEQ ID NO: 269087 - DNA, 720 bp, Klebsiella pneumoniae
atgaataaaatcgtttttgttgaggatgaccctgaggtaggcacgctgatcgccgcctatctcggcaagcatgatatggatgtggtggtcgagcctcgcggcgaccgcgctgaggaggtgatcgcgcgggagaaaccggatctggtgctgctggacattatgctgcccggcaaggacggaatgacgctctgtcgcgatctgcgcgggcaatggcaagggccgattgtcctgctgacttcgctcgacagcgatatgaaccatatcctctccctggagatgggcgccagcgattatattctgaaaaccaccccgccagcggtacttctcgcgcgactgcgtctgcatttgcgccagcatattgctccggcaggcgccggatccgcctcctcaacgctcacgccacataaaaccatctctttcggctcgctgaccattgacccggtcaaccgccaggtgctgcttggcggagaaaacgtcgccctgtcgaccgccgatttcgatctgctgtgggagttggccacccacgccgggcagattatggaccgcgacgcactgctgaaaaatttacgcggcgttacctatgacgggatggatcgcagcgtcgacgtggctatctcccgcctgcgcaaaaaactgctcgacaacgccacggagccctatcgtattaagaccgttcgcaacaaaggctacctgttcgcccctcacgcctgggataactaa

SEQ ID NO: 269088 - DNA, 363 bp, Klebsiella pneumoniae
atgatgaaatacgttgtacttttggcactctcactgttcacttctctctctggctgggctttttccctcgacaacgccgatattcgactcctctgtccgcagcgcgggcaaatcgaggtgatccttcatcgctatgaacatacccagcaatcctgggggcagcatcactttgaaaccggcggcggccacgttcgccaggggccgctgctggtgatcccgtttgccaacctcgatcagatgatttaccaccagaccaccggcgagtttgcttactggtatgccgaaacggaaaaactggtgcgctgtcggctgctgagtctgacgtccacctatccggtagacattccttattatcgtgagtag

SEQ ID NO: 269089 - DNA, 1302 bp, Klebsiella pneumoniae
atgaaaaagctgttcgtgcagttctatcttctgctcttcgtctgctttctggtgatgaccatgctggtcggtctggtctataaatttaccgcggagcgcgccggacggcagtcgcttgacgatttgatgaaaagctcgctgtatctgatgcgcagcgagctgcgggagataccgccgcgcgactggagcaagacccttaaagagctggacctgaatttatcgtttgatctgcacatcgagccgatcagcaaatttaagctgtcggaaagctcgatgcagcacctgcgcgccggcgatatcgtcgccctcgacgatcagtacacctttattcagcgcattccccgcagccactatgtgctgtcggtgggcccggtgccctatctctattttctgcatgagatgcgcctgctggacgtggcgctgatggcgtttattgctatctcgctggcctttccggtgtttatctggatgcgcccgcactggcaggacatgctgcgcattgagacggccgcccagcgctttggcgaaggtcacctcagcgagcgcattcacttcgacagtatgtccagcttcgagcggctcggggtggcctttaaccaaatggccgataacattaatgcgcttattgccagcaaaaagcagctgattgacggcatcgcccatgaactcaggacaccgctggtacgcctgcgctaccgtctggagatgagcgagaatctcaccgaggcggaatcgcaggcgctgaaccgcgatatcggtcagctggaggcgctgattgaagagctcctgacctacgcccgcctcgaccgcccgcagacggagctcagcctgacgactcccgattttcccgcctggatcagcgatcacgtcgaggatattcagatggttaacccacagcgcgaggtcgccctggcgacgctgacccacggtaactacggcgcgctggatatgcgactgatggagcgggtgctggataatttggtcaacaacgccctgcgctacagcagccagcgggtggcggtcagcctgacgctgcagggttcgcgcgcatcgttgctggttgaggatgacggcccgggaatcgcccccgaggagcgcgagcgggtgtttgagccctttgtccgccttgaccccagccgggaccgggcgacaggaggctgcggtctcggcctggcgattgtccacagtatcgcccaggcgatcggcggcgaggtgcgctgcgaggccagccctctcggcggcgcccgcttctgctttagctggccgatctatcatcagctgcctgatttcacctctgcctga

SEQ ID NO: 269090 - DNA, 933 bp, Klebsiella pneumoniae
atggccagctacgacctcgttgaacgtctgaataatacctttcgccagatcgagctggagctgcaggcgctccagcaggcgttaagtgactgccgtctgctggcgggccgggtatttgaactgccggcgatcggtaaggatgccgagcacgatccgctggccactattccagtggtgcagcacatcggcaagacggccctggcgcgcgccctgcgccactacagccatctgtttatccagcagcaatcggaaaaccgcagcagcaaggccgccgtacgcctgccgggggctatctgcctgcaggttaccgccgcggagcagcaggatctgctggcgcgtattcagcatatcaatgccctgaaggccaccttcgagaagatcgtcaccgtcgactccggcctgccccccaccgcccgttttgagtgggtacaccgtcatttgccggggttgatcacccttagcgcctaccgcacgctgacgcccctcgtcgacccgagcaccatccgcttcggctgggccaataagcacgtcatcaagaatctgacccgcgaccaggtgttgatgatgctggagaaaagcctgcaagcgccgcgggcggtgccgccgtggacccgggagcagtggcagagcaaactggaaagggagtatcaggatatcgccgccctgccgcagcgggcgcggctgaaaataaaacgaccggtgaaagtccaaccgatcgcccgcgtctggaacgccggcgagcagaaacaggtacagtacgcctgccccagcccgctgatcgccctgatgtccggcagccggggggtcagcgtaccggatattggcgagctgctgaactatgatgccgacaatgtgcagtatcgctacaaaccggaggcgcagtcgctgagattgcttatcccgcgcctgcacctctggctggctagcgaatag

SEQ ID NO: 269091 - DNA, 1401 bp, Klebsiella pneumoniae
atgacaacgcatcgcagtgaaaaagactcgatgggcgccatcgaggtcccggccgataaactctggggcgcccagacccagcgctcgctggagcatttccgcatctcgaccgaaaaaatgcccggggagctgatatacgccctggcgctgaccaagcgggcggcggcgaaggttaaccaggatctcggactgttgacggcggagaaagccggggcgatcgtcgccgccgctgacgaagtgctggccggaaagcacgcgcaggagttccccctggctatctggcagaccggctccggcacccaaagcaatatgaatatgaacgaggtgctggccaaccgcgccagtgaactgctcggcggagaacgggggatggcgcgaaaaattcatcccaatgacgatgtgaataagagccagagctcaaatgatgtattccccaccgccatgcacgtcgcggcgctgattgccctgcgggaaaaagtgatcccgtcactgcaggcgctgcgggcgacgctcaatgaaaaagcggtggccttcagggatatcgtcaagatcggccgcacccatctgcaggacgccacgccgctcaccttaggccaggagatctccggctgggtggcgatgctggaccatagcctgaagcacattgaagccagtcagccgcatcttgccgagctggcgctgggcgggacggcggtaggaaccgggctgaatacccatccggaatatgccgtacgggtggcggccgagctggcgtcgctcagcggacagccatttgtcaccgcgccgaacaaattcgaagcgctggccactgtggatgccctggtccatgcccacggcgcgctgaaaggcctggcggcctcgctgatgaaaatcgctaacgatgtccgctggctggcctccggcccccgctgcggcattggtgaaatcgccatcccggaaaacgagccagggtcatcgattatgccgggcaaggttaacccaacccagtgcgaagctctgaccatggtctgctgccaggtgatgggcaacgacgtggcggtgaatatcgggggtgcttccggcaactttgagcttaacgtctatcgcccgatggtcatccacaacttcctgcagtcggtgcgtctgctggcggacggtatggcgagctttaacgagcactgtgcggtgggtattgaaccgaatcgcgagcggatcagtcagttgctcaatgagtcgctgatgctggttactgcgctgaatacccatatcggctacgacaaggcggcggaaatcgctaaaaaagcgcaccatgaggggctgactctcaaagcctcggcgctggcgctgggctacctgacggaagccgaattcgacagctgggtgcgcccggaagagatggtcggcagcctggctattcgctag

SEQ ID NO: 269092 - DNA, 1176 bp, Klebsiella pneumoniae
atgcaaaagctgattaacgccgtgcagaactatgcatggggaagccacaccgccttaaccgaactctatggcatcgccaacccggacaatctgccgatggcagagctgtggatgggggcgcatccgaagagcagttcgcagatcctggcggccgacggccagccgcgttcgctgcgcgaggtgattgacgcggataaagccgctctgctcggcgacaaggttgccgcccgctttggtgaactgccgttcctgtttaaggtactgtgcgccgctcagccgctctcaattcaggtgcatcccaacaagcgggcctcggaagaaggtttcgcccgcgagaacgccgccggtatcccgctctccgccgccgagcgtaactacaaagatccgaaccacaaaccggagctggtttttgccctgacgccgttcctggcgatgaatgcatttcgcgagttcagcgagattgtcaccctgctgcagccggtggctagcgcgcatccggcaatcggcgccttcctgcagcagccggacgcgactcacctgagccagctgtttgccagcctgctaaatatgcagggtgaggaaaaggccaaggcgctgcaggtgctgcgcgacgtactggcccgtgaacaaggcgaaccgtggcagacaatccgcctgatcgcggaattctatccggacgacagcggcctcttctccccgctgctgctgaacgtagtgaagctgaacccaggcgaagcgatgttcctgtttgctgaaacgccgcacgcctatctgcagggggtggcgctggaggtgatggccaactcggataacgtactgcgcgccggcctgacgccgaaatacattgatattcctgagctggttgctaacgtcaagttcgaggctaaaccggcgggtgagctgttgacccagccgcagcgtcacggcgcggaactcgacttcccgatcccggtggaagattttgccttctccctgcatgacctctccgccgagggcagcgatctggcccaggcaagcgcagcgatcgtgttctgcgtcgacggcgaagccgtactgcgcaaaggcgaccagagcctgaccctcaagccgggcgagtcggccttcgtggccgccagtgaatcgccggtgcaggtcagcggccgcggccgcgtggcgcgcgttttcaataagctctag

SEQ ID NO: 269093 - DNA, 1563 bp, Klebsiella pneumoniae
gtggcgctgggcgtggtatggacaggcggcgcctggttcaccggtaaacagctggaaggccggatcgccgatatggtgcagcaggcaaacgcccagctgcgcagcagcgcgccggagtcaggtctggagctgagctatcaggactaccagcgcgggctgttcagcagccatctgcagctggtggtgaagccgatcgccggtcaggctaacggctggctggccgccgggcagagcgtggtgcttgacgaagtggtcgatcatggccccttcccgctggcctcgttaaaagcctttaatctggcgccggcaatggcttccgtccacaccacgctggtgaaaaacgacgccagccaggcgctgttcgagatagccaaaggcgacaccccctttaccgtcgatacgcgcattgcctacagcggcgacagccagtcggctatcgtccttaacgccctcgactacgctaaaggcgatgagaaagtcaccttcagcggcggtcagttccagctcgacgccgaccgcgacggcaaaaacatcagcctgaagggccaggccggcagcgggcagatcgatgcgctcaacgaatataaccagaaggtacagctgcgcttcgtcaacctgaccaccgacggcgccaccgagctggccagcttcaacgaacgtatcggccagcaaaaaatgaccctcgataaactggccatcagcgtcgaaggcaaagagctggcgctgatcgacggcatggcgctggacggcggctcgacgctgacccaggacggcaaaggcgtgaacagccaggtgaactacaccgtcaacagcctcaagctgcaggggcaggatatgggcagcggcaaactcacgctgaaagtggataacgtcgacggtcaggcgtggcaccagttcagtcagcagtacagcgcgcagtctcaggcgctgctggcgaaaccggagctggcgcagaatccggagctgtatcagcaggccctcaccgaaacgctgttcaatgcgctgccgatcctgctcaaaggcaacccgtcggtgaccatctctccgctgagctggcgcaatgccaaaggcgaaagcaccctcaacctctcggttctgctgaaagatccggcccaggtgaccgctccgccgcagaccctggcggacagcctggatcgcgtggtgcagtccctggacggcaaagtggtgatcccggtggatatggcgacggagtttatgactaagatcgccggtctggaaggctatcagccggccgatgccgccaagcttgccgatcagcaggtcaaaggcctggcggcgatgggccagatgttccgcattaccaccatggaagataacgccatcagcagcagtctgcagtacgcgaacggccaggtgacgctgaacggacagaaaatgccgctgcaagattttgccgcgatgtttggtctggaagcgccttcgctgccggacagcgcgccgcaggaaggccagccgccgcaggaaggccagccgcagcaggaaggccagccgcagcaggatgacgccgctcctcagcaggacgacgccgccccgcagccgtaa

SEQ ID NO: 269094 - DNA, 1029 bp, Klebsiella pneumoniae
atggcaatcgcaaaaaagatcaccatcaatgatgtggcgctggctgccggcgtctccgtgagtaccgtttcactggtactgagcggcaaagggcgcatctccagcgccaccggcgagcgggttaatcaggctatcgaacagctgggatttgtgcgcaatcgtcaggcggcctcgctgcgcggtgggcagagcggcgtgattggccttatcgtcagcgacctgtcaaaaccgttttatgctgaattaaccgccggcctcaccgatgccctggagaggcaggggaaaatggtatttctcacccagggaggccgcagcggcgagaagatggcccagcggtttgatacgctggcggcgcagggggtggacggggtgattatcgctggggcgatcgaccgcgggagcgagctgcgcgagcgtgcggcggaggcgggggtgccgctggtgtttgcttcccgcgccagctatcttgacgatgtcgacctgatccgcccggacaacatgcaggcggcgcagctggtgacggagcatcttatccgccgcggccatcagcggatcgcctggctcggcgggcagagtgcttcgctgacgcgcgccgagcgggtcggcggctattgcgccaccttgctgaaatacggcctgccgtttcacagcgaatgggtgctggagtgcgagtccagccagaagcaggcggcggaggcgatgaccggcctgctgcgccagaatccgaccattaccgcggtgctgtgctacaacaacgtggtagccaccggcgcgtggttcggtctgttacgggctggaagacagagcggggaagatggcgtcgagagctactttgagcagcgggtggcgctggcggcgtttgccgacgtgccggaggccgccctcgacgacctgcctctcacctgggtgaccaccccggcgcgggagatggggaaaagcctggcggattcgatgctgcggcggctggaagaggggactggcgagacgcgaaaccagattatgcccccgcggctggtgacgcgaaaatga

SEQ ID NO: 269095 - DNA, 1593 bp, Klebsiella pneumoniae
atgacggcgaaaacagcaccaaaaatcaccttatgggaatttttccagcagctgggaaaaaccttcatgctgcccgtagcgttgctctcgttttgcgggatcatgctggggatcggcagctcgctaagcagtcacgatgttttgactctgctgccgtggctggatatgccgctgctgcaggccatctttatctggatgagcaaggtcggctcctttgccttcagcttcctgccggtcatgttttgtatcgccatcccgctgggtctggcgcgagagaacaaaggcgtcgccgccttcgccggcttcgttggctacgcggtcatgaacctggcggtcaacttctggctgaccgcgaagggtattctgcccaccaccgacgccgcgatcctgaaggccaacaatatccagaacattatcggcattccgtcaatcgataccgggatcctcggggcggtgatcgccgggattatcgtctggctgctgcatgaacgcttccataacattcgcctgccggacgccctggccttcttcggcggcacccgcttcgtgccgatcgtcaccaccgtggtgctggggctggtcgggctggcgatcccgctggtgtggccagtcttcgccatggggatcaacgccctcgggaagatgatcaacagcgccggggattttgggccgatgatcttcggcaccggcgagcgactgctgctgccgtttggcctgcaccacatcctggtggcgctgatccgcttcacggaagccggcggcacccttgacgtctgcggccacagcgttagcggcgcgctgaccatcttccaggcgcagctgagctgcccgaccacccacggcttcgccgaaagcgccacccgcttcctgtcgcagggtaagatgccggcattcctcggcggtctgccgggcgccgcgctggcgatgtaccactgcgcccgtccggaaaatcggcataaaattaaaggcctgctgatctccggggtgatcgcctgcgtggtgggcggcaccaccgagccgctggagttcctgttcctgttcgtggcgccggtcctgtatgtcatccacgccctgctgaccggtctcggctttaccatcatggcggtgctcggggtaaccatcggcaacaccgacggcaatattatcgacttcgtggtgtttggcatcctgcatggtctggcgaccaagtggtatctggtgccggtggtggcggcaatctggtttgcggcctactatgccatcttccgcttcgccatcacccgcttcaatctgaaaacgccgggccgcgacatcgacactgccgccagcgtggagaaagccgtcgccggtaccatcggcaaatccgggtataacgtaccggcgattctggcggcgctcggcggcgcagagaacattgtttcgctggataactgcattacccgtctgcgcctgtcggtgcacgatatgagcaaagtggacgccgccgcgctgaaagcccatcgcgccatcggggtggtacagctcaaccagcataatctgcaggtggttattggcccgcaggtacagtcggtaaaagatgagatggccacgctgatgaataccgtgcaggcctga

SEQ ID NO: 269096 - DNA, 1173 bp, Klebsiella pneumoniae
atgtttgattttgccacccctatcgatcgccacggcacctggtgcacgcaatgggactatgtcgccgaccggtttggcgccgccgatctgctgccgttcactatttccgatatggatttcgccaccgcgccctgtattctcgacgccgtcagccagcggctggcccacggggtgttcggctacagccgctggcgcaacgaggcgtttctcggggcgattgcccactggtacgccagccgctttaacagcgacatcgatccgcaatctgtggtctacggaccgtcggttatctatatggtggcggaaaccatccgccagtggtcgaaagaaggcgacggcgtcgtggtccacacccctgcctacgatgcgttctataacaccatcaccgctaaccggcggcggattgccccggtgccattgatcctgaaggataatcggtggcgctgcgatatggaccgcctggaggcggcgctggcggagccaaagaataccctgctgctgctgtgcagcccgcacaacccaacggggaaagtctggcgtcgcgaggagctggagaccatggcggccctgtgtcaaaaacatggcgtcagggtgattagcgacgaaattcatatggacatgacctggggcgaacaccgccatatcccgtggagcgaggtcgctcagggaccatgggcgctgttcacctccggttcgaagagcttcaatattccggcctttaccggggcctacggctttatccccgaagagaacgagcgcgacagctacctgcaggcgctaaagggtcgcgacgggctctcttccccttccgtgccggcgctggtcgcccatatcgccgcctaccgcgacggggctccctggctcgatgccctgcgcgactacctgcaggcgaatatgcgctatgtcgccgacacgctcaacaacgccttccccgcgctctgctggcagccgccggaggccacctacctggcatggatcgacctgcgcccgctcaacgttgacgatcgcgcgctacagcaggcgctgatcgccgaacagaaggtggcgattatgccgggttatacctatggtcctgagggcaacggctttctgcgactcaacgtcggctgcccgcgcgagaagctggaacgcggtgtcgaaggactgattgccgccctgcgcagcctcagctga

SEQ ID NO: 269097 - DNA, 1029 bp, Klebsiella pneumoniae
atgagtcaagacgtcaccgcgaagatgttaaagcccgattttgatagtgaagtttccggcctggtgcatggctatttgtttcatgaacagcgccccccgcagccgatcgcctctggcgaggtctgcgcccgctatcaggcgctcgccgatgacaaggcgtttatctggttacacctgaatcttaatcatgccaccgccgagaaatggttaaccagccactttccggtggccgattttttcttcgaggagatccgcagcggctcgcacaccacccgcattgagcgacagggggaaaatctgttcgctgtgcttaacgatgtgctgtttcgtccgcaggataccagcgcggaaaccgccacgctgtggctctactgtagccccaggctggtggtgacggcgcgcttcaaaccgttgcggtttatcgaatggatgctgccgcgcttgcagacgctcagggtgaacacgtctactgagctgctggcctttctgctggaggagcaggaggaggtgctggagcaggtcgtccgccaggccagccgccatgttgaccttattgaagagcgtcttctgagcaatcacgtgcagcgcaaccgggccgatctggcgcggctacggcggatgcttttacgcttccagcggctgctggcgccggagccggcggcgatgttccggctgcttaaccggccgccggcgtggatggatcgcgcggtggtgcaggcgtttcgtcagttcaccgaagagtttagcgtggtgcttaacgatctgtcgggcctgatcgagcgcatcagtctgctgcaggaggagattggcgcccgccagctggagcagagcaatcgcaccctctataccctgacggtgatcaccgtcctcgcgctgccgattaacatcgtcgccggtttcttcggcatgaacgtcggtgggatcccgctagcaagcaaccaccacgggtttatcctgctggtggtgattgtcgctgtctttaccctcggcgccggttacctggcgtttcgccggcgcgatgacctgtag

SEQ ID NO: 269098 - DNA, 204 bp, Klebsiella pneumoniae
atgaaaacctatgaccgtaatcgtaacgctattgctaccggcagcatggtaatgatcgccggtaacgggacgacgggcgtgattaaagctatccatggcgaggggaaaaccgctgagcagctgcgccgggcggactgcgttgaaatcgacggctgcgagggccgcttctgcccgttggatctgatccgtctcggcttccgttaa

SEQ ID NO: 269099 - DNA, 480 bp, Klebsiella pneumoniae
atggttgccatgccgtcggcgcaggccggggaattaagcctctattcgatgaataccggctcctatgtctatcatatgacgggtaaccacggacaatataacgaacatttcaataacaactttttctcggtggagcgcaagttttctcaggattcaaaatacagcgtgctggtcggaacgatgaaaaacagctttgacgatcgttgcctgactctcggcgtgcgccgcgactggctgaaaaacgataccggctgggtactgaaaggggtgtatgcctataccggggaatttttctttgatgccttcagccactgtggggattccggcacctaccgcaccgccaaaaaaatcaccggcatcggtttttcgccctacctctatcatggcctgcaatataatttcaccgattatttcggtgtggaaggcggcattattgtgccggcgatctttgtgatgagtgttcagtggagctttcgctag

SEQ ID NO: 269100 - DNA, 354 bp, Klebsiella pneumoniae
gtgttagccactctcctcgttgcgctggtcgctattattcatctcgccatcctggtgctggagatgtttctctgggaagcccccgccgggcgccgggcctttaacctcagcgccgatttcgcccggcagacccgggtgctggcggccaaccagggcttgtataacggctttctggccgccggcctggcatgggggctgtggctgggggcgccgggggtacaggtggttatctttttcctggcctgcgtgctggccgccgggattttcggcgcgctgaccgccagccgcaaaattctctatattcaggcgctgcccgcgctgctggcgctggttgccgtgctgacgcaagcgtag

SEQ ID NO: 269101 - DNA, 234 bp, Klebsiella pneumoniae
atgaaaaacatcattcctgattatcgcctggatatggtcggcgaaccctgcccgtatccggcggtcgctaccctggaggcaatgccttccctgcaaaaaggcgagatcctcgaagtggtcagcgactgtccgcagtcgatcaataacattccgcttgatgcaaggaaccacggctacacggtgctggatattcaacaggatggcccaaccattcgctatttgatccgaaagtag

SEQ ID NO: 269102 - DNA, 393 bp, Klebsiella pneumoniae
atggaactgctggtcaggctgggtcatttttttgagcaagcgcgttctgacgccgactatgccaccttcgccaatgaactgcgtcggcataaggtctcctactacatctattttgtttccaccggcaatatgaatttcgtaatggcaaacgacgaggtggtctcggtaaaaagcgcccgcgggctgctgcgcgttcgcgctgaggccagccattgtctgaccagggccgccgttatccgccactttgcccgggccattaactttgaacagtactgccgggatctcgccagcgccggggtgtttaagtggatcgtcgatcttgaagaggagacccggcactactggtcgaaggataatacgctgttatataaagagtgcctgatgcccccctga

SEQ ID NO: 269103 - DNA, 159 bp, Klebsiella pneumoniae
atgggattctggagaatcgttttcactatcattctgccgccgctgggtgtgctgctgggaaaaggcttcggctgggcgtttattctcaatatcattttgaccctgttgggctatattcctggcctgatccacgccttttgggtgcagacccgcgattaa

SEQ ID NO: 269104 - DNA, 1440 bp, Klebsiella pneumoniae
atgacagcacccgttcaacacccgatgtatattgatggccagttcgtttccggtcgcggcgacggctggatcgacgtgcttaacccggcgaccgaagcgctgctgtcgcggatcccggacgggactgccgaagaggcgcggctggcgattgacgccgccgagcgcgcccagcccggctgggaagcgctgccggccattgagcgtgcgggctggctgcgcaaaattgccgccggtatccgtcagcgtgccgacgagatcgccgggctgattgtcgctgaaggcggcaagatccagcagctggcggcggtggaggttgcgttcaccgcggactatctcgactatatggcagaatgggcgcgccgttacgaaggtgagatcgtgcagagcgatcgcccgggggagaatatccttgtctttaaacgcgcgctgggggtgaccaccgggatcctgccgtggaacttcccgttctttcttatcgcccgcaagctggcgccggccctgatcactggaaataccatcgtcattaagcccagcgaatttacgcccaataatgccatcgcctttgccgagattgtccatcaggttgggttgccgaaaggggtctttaaccttgtgcttggccgcggagaaaccgttggccaggagctggccggcaatccgaaggtggcgatggtcagcatgaccggcagcgtggcggcgggagaaaaaattatggccgctgcggcgaaaaatatcaccaaagtgtgcctcgagctcggcggcaaagcgcctgccattgtaatggacgatgcggatctggagctggcggtgaaagcggtagtggactcgcgggtgattaacaccgggcaggtgtgtaactgcgtcgagcgggtctatgttcagcagggaatatacgaccgcttcgtcaaccgcctcggtgaggcgatgaaggccgtccagtttggcgacccggcgacgcgggatgacatcgcgatggggccgctgatcaacgcggcggcgcgggaccaggtggcgggcaaagtggcgaaggcggtggcgcagggggcgcgggtggcgctgggcggtcagccgctggagggcaaaggctatttttatccgccgaccctgctgctggatgtacgtcaggagatggacattatccatgaggaaaccttcggtccggtgctgccggtggtggccttttcgaccctcgatgaggcgctggcgatggccaatgacagcgattatggcctgacctcctcaatctatacccgcgatctgaacgtggcgatgaaagcgattaagggactgaagtttggcgaaacctatatcaaccgtgagaactttgaggcaatgcaggggttccacgccggctggcgtaagtcggggatcggcggggcagatggccgccacggcctgaatgagtacctgcagacccaggtggtttatctgcaggcctga

SEQ ID NO: 269105 - DNA, 801 bp, Klebsiella pneumoniae; identical to SEQ ID NO: 235163

SEQ ID NO: 269106 - DNA, 1326 bp, Klebsiella pneumoniae
atgagcaatccacaagacaacactgcatccattctgcagaaaaacaagaaggtactgatcgcgagcctgacaggcagcgccatcgaatggttcgattattttctctatggcaccgccgccgcgctggtgttcaacaaaatcttctttccgatggtcgacccggttatcggcctgatcctctcatggctctccttctcgctgacgttttttatccgccccatcggcggcgtgattttcgcccatatcggcgatcgcatcggccgcaagaagacgctggtgctgaccctgtcgctgatggggagcgccacggtggcgatcggcctgctgcccacctacgagatggtgggcctctgggcgccggccctgctgattactctgcgcattattcagggcatgggtatcggcggcgaatggggcggcgcgctgctgctggcctatgaatacgcgccggaaaagcggaaaggctttttcggcagcattccccaggccggggtgaccatcggcatgttgatggcgacatttatcgtctcgctgatgacgctgttcgatgaggcgcagtttctcgcctggggctggcgcataccgttcctgctcagctccgtcctcgtttttctcggcctgtggatccgcaaagatatcgacgaaacgcccgcctttaagcaggtgaaaaaatccggccaggtggcgaaggccccgctgcgcgatacgctcaagcaccactggcgggaagtgctgatcgccgccggcctgaaagtggtggagaccgcccccttctatatcttctccacctttgtggtcagctacgccaccaccaccctgagctatcagaagtcgcaggcgctggaatccgtgaccctgggcgcgctggtggccaccgtgatgatcccgctgatggggctgctgtcagacaaggtgggtcggcaaaagatgtacaccctgagcgtggtgctgctggggctgtttatcgtcccgtggttcctgctgctcgacaccggcaccggctggggcatcatgctggcgacgatcgttgccttcggcatcctgtgggcgccggtaaccgcggtgctcggcaccctgtgctctgagattttcagcgccaatgtgcgctataccggcatcaccctcggctaccagctgggcgccgcgctggccgggggcaccgcgccgcttatcgccaccggtctgctggcgaaatatgacggtgactggcggccggtggccatttatctgggcattacggtggcgatttcgctgctggcgatattctgcgccagccggatgaagtccgcgctgggcacggccccctcccgggcggaaagcgcctga

SEQ ID NO: 269107 - DNA, 1431 bp, Klebsiella pneumoniae
atgactgaacatcaacatcaggcgtcacctgccgccggaggtgaaggcgcgtcacagcttaagcgcgggctcagcgcccgccatatccagatgattgccctcggcggcgccatcggcaccgggctgtttatgggggcggggcgcaacatcgccgtcgccggcacctcgatcctggttatctatgtgctggtcgggttctttacctatatggtgatgcgggcgatgggcgagctgctgctcacccgccatgactaccgctcgtttgccgactttgtcggcgagtatctcgggccgcaggccagcttttacctcggctggacctactggctaagctgggtggtgacctgtatcgccgacgtggtggtctgcgggagctatatgcagtactggttcccggaactgtcggcgtggatgccggccctcagcatgctggcgattctgttcctgcttaacctgctgtcggtgaaaatgttcggcgaggcggagttctggttcgccctgatcaaggtgatcaccattatcgccctgatcggcaccggcggctggatgattgccaccggctggacctccccggacggcgtgacggcctccctcagccatctcaccgacccgacggcctttatgccccacggcatcaccggctttttcgccggcttccagatagcgatcttctcctttaccggcattgagctgctgggcaccatgacggcggagacccgcgatccgcagcgcattttgcccaaggcgatcaatgctctgccgctgcggattatcatcttctatctgctgtcgatggtggtgatcatcgctgtcgcctcgtggccgggggtgtcggcggagaccagccccttcgtgacgctgttcgccaaggccgggctgcctgccgccgcggcggtgattaactttgtggcgctgacctcggcgatgtcctcggccaacagcggggtcttctccagcacccgcatgctgtacggcctgtcggtggagaagcatgcgcactggcagtttcgtatcctgtcgcgcagtacccgcattccggtgcgcagcctgctgttctcctgcttctgcatgctgatcggcacgctgttgctgtttctggtgccgaacgtgatgaccctgttcaccatcgtctcgaccctggcggcgattatggtggtgttcagctgggggatgatcctcgtggcctatctggtttaccgccgtcagcgtccggacctgcacgccgggtcgatctttaagatgcccgccggggtggtgatgagctgggtgagcctgctgttcttcgcgttcgctatcttcatcatgatctttgacccggacacgctgctggcgctgttggcttctccgctgtggtttatcgcgctgtggggcttctggaagctgaagcagcggcgcgaggggcagcttcagctggacaaccagagcgcctga

SEQ ID NO: 269108 - DNA, 996 bp, Klebsiella pneumoniae
atggagcacctggttaacgatttactgcactgccgcctgcaggcgtggacctttccggcgggcatcgaggcccgctggctgggcgagggcattttacagctgctgccgacggcgccgtggcgccaggcgacgatcctctccgccggcgtgcatggcaatgagaccgcgccgattgaactgctgctgcaactaacccacgatctgagccaggggcggcagccgctcacgcaggcgctgctgatcgtctttggtaatctgccggcgatccgcgccgcgcgccgctatctgcataacgacctgaatcgcctgttcggcggccgccatctggcggtcaccccgggaaatgagtcgcggcgggcttttgcgctggagcaggcggtgcaggctttttatcgcgccgccgatgcggcggggccggtcaaccgtggtcatctcgatatgcacaccgccattcgcggatcgctgtatcgccagtttgcgctgctcccagcccacgccggggatttttcgcccgatttctatcagctgctgcaggccagcgggatggacgcggtcgtgcgccataccgaagcgggcggcaccttcacccatttcacctgcgaaaagttcgccgcgcaaagcgccaccctggagctggggaaagtgatgccgttcggcgccaacgatctcagcctgttcgccgccgccgacgcggcgatccgggcctggatcgctgatgcgccgctgccgccgcgcgacaaagcgccggtggactacttcctggtcgaggagagcatcatcaagcgcgagggggaatttacgcttaatctcgcggcagacgttgaaaacttcaccgcgctcccggcagggtatgagatcgcccgccaggcagagaaacgttgggtggtgcaggcccgggccccctatatcctctttcccaacgccggggtcgccaccggccagcgcgccgggctgttgctccgcgccgctgaccttcgtctcccgcaaccagcctga

SEQ ID NO: 269109 - DNA, 1341 bp, Klebsiella pneumoniae
atgtctggttttgaagcaaactttgatggcctggtcggcccgacgcaccactacgccggactctccgtcggcaatgaagcctcgcaaaataaccgcgatggtctctctaaccctaaaaaggcggcgctgcaggggctgtataaaatgaaagccctggccgaccgcggcttcgtgcagggcattctgccgccgcagccgcggccgaatctgcgtctgctgcgtgaagtgggtttccagggcagcgatgagcaggttatccggcaggcggcccacgcggcgccgcagctgctctccgccttcagctccgcctcgtcgatgtggaccgccaacgcggcgaccgtctcaccgtcggcggacagcgccgatggcaaagtccatttcaccgtcgccaacctgaacaataagctgcaccgtatgcaggaggcgcccaccacctcggcgatcctgggcgccacgttcgccgatccgcgctactttgcccaccatgcggcgctgccgcagcatggtgacctcggcgatgaaggggcggccaaccataaccgcttctgccgggaatatgaccggcagggggtgcagtttttcgtctatggtcgacgcgccagcggcggtatcgtcccggtgaagtatccggcgcggcagaccctcgaggccagtgaggcggtggcccgcctgcatcagctggatccgcgctacacggtgtttgcccagcaggcgccacaggctatcgatcgcggcgtgtttcataacgacgtcatcgcggtcagcaatcgccatgtgctgtttcaccatcagcaggcgtttgtcgatcaggcgacagtgctggccacgctgcgggctaaaagcgacagtctggatatcccgttcaccagcgtggaagtgccggacgagcgggttacgctcgacgacgccgtggcctcttacctgttcaacagccagctgctgagcaaaccagacggcaagatgctgatcgtggtgccggaggagtgccgccagcgggaaaacgtctggcgctatctcagcgatctcgccgccgatagcgcatcgccgatcgatgaagtggcggtctttgacctgcgggaaagcatgcgcaacggcggcggcccggcctgtctgcggctgcgggtggtgctcaacgtggcggagcgccaggcggtcaacgcccatagcctgatgaacgacgaacgttatcagcagctgacggcatgggtggaaaaacactatcgcgaccggctgcatgcccgcgatctggcggacccgcagctgctgcgcgaggtttatcaggcgctggatgagctgacgcagatcctgcgcctcggcgcggtctatgattttcagcgttaa

SEQ ID NO: 269110 - DNA, 1023 bp, Klebsiella pneumoniae
atgctatttcgtcccgtacgggaaaacgatctcgacgacatcgtccgcctcgccgcgcgggcgggggtcggcatgacctctttaccgcatgacgtcgggcgcctggcggcccggatccggcgcagtatcgagaccttcgccggcgaattgccacgcagccagcagggtttcctgtttgtgctggaggacaccgcgctggcgcgggtggtgggggtgagcgccattgaggtcgcagtgggcctggacgagccgttttacaattttcgcattcagaaaacggtgcgcgcctcgaaagcgctgggagtctataagccccaggagctgcttaatctcagctatgaccacaccgggcatagtgagctgtgtacgctgtttctcgacccggcgtatcagcgcaaccgcaatggtctgctgctctccaaggcgcgctttttatttatcgccgcctttcgcgagtggttctccccgcatctgtttgccgaactgcgcggctgcagcgatgagcagggacagtcgccgttctgggatgcgctgggccatcatttcttcgacatcccgttcgccgatgccgaccggctgaccggcaccggcatgaaaacctttattgccgaactgatgccggcgtacccgatctatatctcactgctgccggaagcggcccgcggggtcatcggtcaggtgcatcccaataccgccccggcgcgggcgatcctcgagaaagagggtttcagctggcgcggctcggtggatattttcgatgccggtccggtgctggaggcggacaccgatcagatccgcgccgtgcgcgacagccagcgtctgcctgtccggcagctgatgggcgacctgccggcgccgaccctcgtcgccaacggtcaattcgacaactttcgggcgctgctggtggcccacgaagagcaggtctcgcttgacagcgccgcgctggacgcgctgcaggtcagtgaaaccgaccgcgtttatacggtaaccctgaatccagaggacaacagatcatggcggtaa

SEQ ID NO: 269111 - DNA, 1206 bp, Klebsiella pneumoniae; identical to SEQ ID NO: 235170

SEQ ID NO: 269112 - DNA, 1275 bp, Klebsiella pneumoniae
atggaaaagttatcttacgcatctgaaagtagtacatctccatggaccacctacctgcgccagatcgaccgcgtcgcgccttatctcggcgatcttgcctactgggtggaaaccctgcgccatccgaaacgcgcgctgatcgtcgacattcctgtgcaaatggacgacggcaccatccgccacttcgagggctatcgcgttcagcacaatctgtcgcgcggaccaggtaaaggtggtgttcgctaccatccggatgtcgatcttaacgaagtcatggcactttctgcctggatgaccattaagtgcgccgcggtcaatattccttacggcggggccaaaggcggcatccgcgtcgaccccttctccttgtcggaaggtgaactggagcgtctgacccgccgctacaccagcgaaatcggcattattatcgggccgcagaaagatatcccggcgccggacgtcggcaccaatggcaaagtgatggcatggatgatggacacctactccatgaaccatggcaccaccatcaccggcgtggtcaccggcaaaccgatccacctcggcggctccctcggtcgtgaaaaagccaccggacgcggcgtgtttgtcaccggccgggaagttgcccgtcgcgccggtatcgaaattgaaggcgccaaagtggcgctgcagggctttggtaacgtcggtagcgaagcggcccgcctgttcgccggcgtcggcgctcgtatcgtggttattcaggatcataccgcgaccctgtataacgaaggcggaatcgatatggccgccctcaccgcctggcaggcggagaaaaagcagattgccggtttcccgggcgcccaggagatcgataaagacgccttctggaccactccgatggacatcctgatcccggcggcgctggaagggcaaatcacccgcgagcgcgcggagaagctgacctgcaaactggtgctggaaggggccaacggcccaacctatccggaagcggacgacgtgctggccgagcgcggcgtgatcgtggtgccggacgttatctgcaacgccggcggggtgaccgtcagctactttgagtgggtacaggacatggccagcttcttctggagcgaagaggagatcaacgccaaaatggaccgcattatgaccgacgctatcgtgcacgtctgggataaagccgccgagaaagagtgtacgctgcgcaccgccgcctatatcgtggcctgcgagcgcatcctgatggcgcgtaaagaccgtggcatctacccgggctga

SEQ ID NO: 269113 - DNA, 999 bp, Klebsiella pneumoniae
atgaaaacacgttatcttggaaaagagaagtttcaggtttccgcattaggtctcggatgtatggggatgagttttgcctatggcggcgctgaaacgtcgcaggcgataaatacgatccatgccgccatggacatgggcgtgaccttcctggataccgccgaagtatatggtcctttcgataatgaagttctggtcggaaaagcgattaaaggttttcgcgataaggtgcagattgccaccaaatttggatttcgtattttgccgaccggccagggtctggagcggatggccggcgttgacagccgtccggcacatattcgcgaatcagtggaagggtcgctgaagcgactgaatgtcgagaccatcgatctgctctatcagcaccgcgtcgatcccgcggtaccggtggaagaggtggtgggcactatggccgatctggttaaagagggtaaaattcgccatatcggtctgtcggaagtatctactcagacgctgcgccgggcctgcaaggtacatccgatcgctgccgtgcagacggaatattcgctatggagccgcgagccggagggcggtattctccacacctgccgcgagctgggggtcggctttgtgccatacagcccgcttggccgcggcttcctgacggggacaattaccgatcccggcgttttggcagcggatgatttccgccgccatctgccgcgcttccaggccgaaaccatgcgcaaaaaccagctgctgcttgagcgccttcagcaggtggccacccgctatgacgcgacccttgcgcagattgcccttgcctgggtgatgagcaaaggcgaggatatcgtgcctatcccgggggcgaggaaaattgctcacctgcgcgacaatgccggcgccgcgaatattaccctcgcgccggaggacatcctcaccatcgaacatattttcactgccgacaacgtcactggcttacgctatacccagggcgactttgatttaatcgaaaaataa

SEQ ID NO: 269114 - DNA, 948 bp, Klebsiella pneumoniae
atgaaaaccttgcccgatctgcaacaaatagaaatattaatactcatagtgaaacatggcagttttcgtcaggccgctaaagcgttaaacctttccccaccggcccttaccgtcgctattaatcatctggaagaaaagttaggcgtgcgcctgctaaatcgctcaacacgcagtttgtcattaaccgcagtgggtgaggaatttcttaataatataacgccggtggtcaatgattatcgccgggtggtggacagtctgaattatcaccgtctgactccggaaggcgtggtgaaagttaatttaccgcgcattgttattgacctgttttttcaagactattttatcgcctttaaaaacgcctgtcccaatgtgacgctcgaactgtatgccaccgatcggaaagtcaatattatcgagtccggttttgacgccggcattcgctattcgcaggatgtgcccaaagagatgattgccatcccctttggcgagaaactatcgctgatcccggtggccagcccggactatatacgcgaagccggagagcccgacaccccgcagtcattagttaatttccgctgcattaaccgctgttttcctggtggtgagaagtaccgctgggagtttattggccccagcggcgagcttagcgaggtcgcggttaaaggcgatctggtcgtcgatgccgatagcgcaatgatccaggccgcggagagcggattaggcatcgcctttgtctatcagtcgctggtgacgcagcagctgaacgcgggcagcctggtccatttgttacccgactaccgctatcctgccgaccatttctgcgtctactacccaagccggaaacatattcccgcccccctgcgggcctttatcgcctgggtgatggcgcagaataaaaatatcctcggtcagcagaccgcacgacacggatcgcggccggaagattaa

SEQ ID NO: 269115 - DNA, 432 bp, Klebsiella pneumoniae
atggacaatcgacagcttaccttctcccatcttttatacctcaccgcgcaccactggcggctggcggtcaatcgtcggctgaaaaatctcggtctcagccaggccagctgggtggcggtagcgtccatcgcccgccaccagcagccgctgtcgcaaagcgaactggcgcaggagctgggggtggagagcccgaccattgtgccgttgatccatcgtctggtcgccctcggactggttgagcgcgtcaccaccgccagcgacaaacgtaagcgactgctggtggtcaccgacaaagggaaggccctctatgaacaggtcaaaacggtggctgacgatctgcgcgaagagatcctgacggcgattaccccacaggagcaggagcaaacccagcgggtgctggaaaagctgttgcgcgaagtggagaagaaataa

SEQ ID NO: 269116 - DNA, 1653 bp, Klebsiella pneumoniae
atgccccgtcgccaggataacccctacgccccgcatgactgggcgccgcatgaaaaaccggctctgctcggttcgccgtcgacgccgctgcacagtccggcgaaacgccttgcctacggcgtggtcggtctgctggtatgtctcaccggcgcgctgggcaacgcagtggtcaccgccaacctgcagctgctgcagggtaccttcgccgcctggtcgacagaaatcgcctggctgccggcggtatacgtgatgaccaacgtctccatcaacctgctgctggtgaaattccgccagcagtttggcctgcgcgctttcaccgaaggctttctggtgctctatgtgctggtcacctttttccacctcttcgtcaacgatctcagctcagcgatgatggttcgcgccgcccatggcatggtggccgcggcgctcagctcgctggggatttactaccaggtacaggcctggcctgcgcgccatcgcctgaaagggctgactatcggcatcaccggctcgtcgctggccattcccctggcgcgcctcttttccaccgaactgctgcagaccgatgaatggcgcggtctctacttctttgagctgggcctggcgctggtgtcgctggcctgcgtcatcgcgctaaaactgccgccaagcgatcgtaaaaaagtattcgaaaaaaaggatttcattaccttctttctgctggcgcccggcatggcgctggtgtgcgccgtgctgtcgctggggcggctcgagtggtggtttgaagcgccgtggatcggctgggcgctggcggcggcggtaatactgatcgtcgctgcgattaccttcgagcataaccgcagcaaccccctgctcaataccaaatggctctccagcggcagcatcgtgcgtctgggcctgattatgctgttgatccgcatcgtgctggcggagcagaacaccggggtcatcggctggctgcagtacgttggcctgcaaaacgaacagatgactaacctcgcgtggtcgattttcgccggtattctgtgcgggatcattgccagctgtctgacgctcaacccgcagaagctctactggccgaccgccaccgcgctggcgctgatcatgatagcctcgctgctcgacagccagtccaacgccctcacccgtccggaacaattaatgttcagccagtttttactcggcttcggcagcgccttctttctggccccggcgatgctcgccgggattggcggcgtgtttgccgacccgcgcaacctggtcagcttctcggtgctgttcggcatgagccagaacattggcgggctgctcggctcggcgatcctcggcaccttccagacctggcgtgagaaattccactccagccagctggcggaccagataaccaccctgaacccgctgatcgtcgagcggctgcagcagtacagccagatgtatcagagccagattggcgacagtacgctactcaacgttcaggccaccaccctgctgcaaaacgccgcgacgctgcaggccaatattctcgcctggaatgatacctatctgctgacggcggcgatctccgccgggacactagtgtgggttttctggcgcttaattcgcttacgactgactgcccgtatcgcgttgcaacgcgctaccggcagcaaataa

SEQ ID NO: 269117 - DNA, 1086 bp, Klebsiella pneumoniae
atgagtcagcaggatgcggccaaacaacaggccaacacccggaataatattcgcgtggtttccatttttaccgccgcggcgataggcctcgtcggcgtgctagtgatcctctacgcctggcaactgccgccgttcactcgtcatagccagtttaccgacaacgcctatgtgcgcgggcagaccacctttattagcccgcaggtcaacggctatatcaccgccgtcaacgtcaaagatttcgcgattgtccagccgggcgaggtgctgttccagatagacgatcgcatctataaacagcgggtgcatcaggcccaggctaccctggcgatgaaagaggccgcgctgcgcaataacctgcaacagcgcaaaagcgccgaggcgacgatcgccaagaatgaagccgcgctgcaaaacgcccgcgcgcagaatctgaaaatccaggccgatttaaaacgcatccagcagttaaccgccgacggttcgctgtcgatccgcgaacgtgattcggcgcgggccagcgcggcgcaaggggcggcggatattgagcaggcgaaagcggcgctggagatgtcgcgccaggaccgtgaatcgaccatcgtcaatcgcgattcgctggaggccgacgtggccagcgccaaagcggcgcttgagctggcgcagatcgacctgcagaatacccagattatcgcccccaccggcggccagctggggcagatctcggtgcgtcttggcgcctatgtcagcgccggaacccatctgacctcgctggttccgccgcagcactgggtgattgccaacctcaaagagacccagttggccgaagtacgcgttggccagccggtcaccttcaccgtagacgcgctcaacggcgagaccttccacggcaaggtgcagagtatctccccggcgaccggggtggagttcagcgccatctctccggacaacgccaccggcaatttcgtcaagatcgcccagcgcatcccggtgcgtattacggtcaacgacgggcaaaacaacagcgaacgcctacggccggggatgtcggtgcaggtgactattgatacccgtgcggagaaacaaccatga

SEQ ID NO: 269118 - DNA, 1380 bp, Klebsiella pneumoniae
atgatccgcccggtcgcccttgctatcgttctggcgctggtcggctgtcaatccgccgatgtgcaacgcgcgcagccgaccctgaccattcctgccgcctggcgggccgacgttggcccggccagcccggtggagggcgtatggtggcgcaattttcatgacagtaccctcaatcagtatgtcgaccaggcgctgcgctataacagcgatgtgctgatcgcccgcgagcgggtgaatgagtatcaggcgcgcgcttacgccgccgacagcagcctgtttccgtcactggacgccagcctcaccggcacccgcgcccggacgcagtccgccgccaccggcctgccgatccacagcacactgtataagggcggcctgaccgccagctatgatgtcgatatctggggagcgaaccgaagcgcggccaacgccgccggcgccagccttgaggcgcagaaagccgccgccgccgccgccaatttgagcgtcgccagctcggtggccgttggctacgtcacgctgctgtcgctggatgagcagctgcgggtgacccagcagacgctaacatcaagggaagacgcgtggcgcctggccaaacgtcagtttgaaaccgggtatacttcacgccttgagctgatgcaggcggattcggagctgcggtcaacgcgggcgcagatcccgccgctacagcaccagattgcgcagcaggaaaatgcgctcagcgtgctgctcggcgataaccctggcgcggtaaaacgcggcgagttcgcccagcttaccccgctgcgtctgccgtcgcagctgccgtccaccttgctcaaccgccgtccggacatcgctcaggccgagcgccagctggtggccgccgacgccacgctggcctcgtcgcaggcgcagctgctgccctctattaacctgaccgctaccggcagcctgcaggaccggacgctgccggatctgctggacaacccgctgcggctgtggagtcttggcggcagtattctggcgccgctgctaaaccgccaggcgttaaatgcccaggtggacgtctccatggcccagcgcaaccaggcgctctatagctatgagaaaacggtgcgcagcgcgttcaaagaggttaatgacagcctggacgccatcagtcgctatggcgaacagttaaccgagcttcaggaacaagagaccgttgcccaggaaaccttacgtattgcacaaaaccgctaccgtaacggctactcttcttatctggatgtgcttgatgcccagcgaacgctgttctccacccagcttagcgtcgtgcaggtgaagaacaacctgctgctggcgcagatcgatctgtaccgggcgctgggaggcggctggtctgactcatcagggagctaa

SEQ ID NO: 269119 - DNA, 660 bp, Klebsiella pneumoniae
atgcaacaacagtggtcggcagtagacaattatttgattaaggccttaattcccggcgatcctgtgctcgatcgggtactggaaaacaaccatcgtgccgggctcccggcacacgatgtcgccgccaatcagggtcagtttctcgccctgctggtacggctaacccaggctaagcggatactggagatcggcaccctcggcggctatagcaccatctggatggcgcgcgagcttcctgcagacggccaactcctcaccctggaggccgacgcgcatcatgcccaggtggcgcgggagaatctgcagctggcgggcgttgaccagcgggtcacgctacgggagggaccggcgttacagtccctggaggcgcttggcgcatgtcccgctttcgacctgatcttcatcgatgccgataagccgaataacccccattatctgcgctgggcgctacgttattcccgcccaggaaccttaattattggcgataacgtggtacgcgacggcgaagtggtcaacccacagagcgccgacgagcgcgttcagggcgtgcgtcagttcattgagatgatgggcgccgagccacggttgacggcaacggcgctgcagaccgtgggcactaaaggctgggacggctttactctggcgtgggtaaacgcttaa

SEQ ID NO: 269120 - DNA, 3903 bp, Klebsiella pneumoniae
atgacagaacaacaaaaaatcaccttcccccagctttatcaacagctcgacggcctgatgctgcgcgacaaaacgcgctttgcccgccgtctgcacggcgtgaagaaggttaaaaatcctgaatcgcaacaggccattctgcaggagatggcgctggagataagccaggcagccggtaaagtcctgctgcgcgaagcggcgcgtccggccatcacctatccggaaaacctgccggttagccagaaaaaacaagagattctcgaggcggtgcgcgaccaccaggtggtgatcgtcgccggggagaccggttcgggtaaaaccacccagttgcccaaaatctgcatggagctggggcgcgggctgaaaggactcatcggccatacccagccgcgtcgcctggcggcgcggaccgtcgccaatcgtattgccgaagagctgcagagcgagccgggcggctgcatcggctataaagtccgcttcagcgaccatgtcagcgaaaacaccatggttaagctaatgaccgacggtatcctgctggcggagatccagcaggatcgtctgttgatgcagtacgacaccatcattatcgatgaggcgcacgagcgcagtctgaatattgactttctgctcggctatctgaaagagctcctgccgcgccgcccggacctgaaaatcatcattacctcggcgaccatcgacccggaacgtttctcaaagcatttcaataatgcgccgattatcgaagtctccgggcggacttacccggtggaagtgcgctatcggccgatagtggaagaggcggacgataccgagcgcgatcagttacaggcgatctttgatgcggttgacgaactggggcgcgaagggcccggcgatattctgatctttatgagcggtgagcgggaaattcgcgataccgccgatgcgctgaataagctggatctgcgccataccgaagtgctgccgctgtacgcccgcctgtccaacagcgagcagaaccgcgtcttccagccgcacagcggacgacgcatcgtactggcgaccaacgtggcggaaacctcgctgaccgtgccgggcattaaatacgttatcgatcccggtactgcgcgtatcagccgttacagctaccgcaccaaggtgcagcgcctgccgatcgagccggtttcccaggcgtccgccaaccagcgtaagggccgctgcggccgcgtttcggaagggatctgtattcgtctttattcagaagacgatttcctgtcgcgcccggaatttaccgacccggagattctgcgcaccaacctggcgtcggtcatcctgcagatgaccgccctgggcttaggcgatatcgccgccttcccgtttgtcgaagcgccggataagcgcaatatccaggacggcgtacgcctgctggaagagctgggcgccatcaccaccgatgcgcaggcaacggcttataagctaaccccgctgggccgccagctcagccagctaccggtggatccgcgtctggcgcgcatggtgctggaggcgcagaagcacggctgcgtgcgggaagcgatgatcatcacctccgcgctgtcgatccaggacccgcgcgagcggccgatggacaaacagcaggcctctgacgaaaaacatcgccgcttccacgataaagagtccgatttcctcgccttcgtcaatctgtggaactacctcggcgagcagcagaaggcgctgtcgtcgaatcagttccgccgccagtgccgggtcgattttcttaactatctgcgcgtgcgcgagtggcaggacatctacacccagctgcgccaggtggtgaaagagcttggcctgccgatcaacagtgagccggcggaatatcgcgagatccatactgcgctgctgaccggtctgctgtcgcacatcggcatgaaggatgccgataaacaggagtataccggcgcccgtaatgcgcggttctctatcttccccggctccggtctattcaagaagccgccgaagtggacgatggttgcggagctggtcgagaccagccgcctgtgggggcgtattgccgcccgcattgagccggagtgggtggagccggtagcgcagcacctgatcaagcgctcatacagtgagccgcactgggagcgggcgcagggcgcggtgatggcgacggaaaaggttaccgtttacggcctgccgatcgtcgccgcgcgtaaggtcaactacagccagattgatccggcgctgtgtcgtgagctatttatccgccacgcgctggtagagggcgactggcagacgcggcacgccttcttccgcgaaaacctgaagctgcgggcggaaatcgaagagctggagcataagtcgcgccgtcgcgacatcctggtggatgacgagacgctgttcgagttttacgaccagcgcattagccacgatgtcatctccgctcgccactttgataagtggtggaagcaggccagccgcgaaacgccagacttgctcaattttgaaaagagcatgctgattaaagagggggcggagcaggtcagtaaactggactacccgaacttctggcatcagggcaacctcaagctgcggcttagctaccagtttgaacctggcgccgacgccgatggcgtgacggtgcatattccgctgccgctgctgaaccaggtagaggaagccgggtttgaatggcagatccctggtctgcgtcgcgagctgattatcgcgctgataaaatcgctgccgaagccggtacggcgcaatttcgtcccggctcccaactatgcggaagcgtttcttggccgggcgacgccgcttgagctgccgctgctcgattcgctggagcgcgagctgcgtaagatgaccggcgtgaccatcgaccgcgaagcctggcagtgggatcaggtgcccgatcacctgaaaatcactttccgggtggtggatgataaaaacaagaagctgcaggaagggcgctcgctgcaggcgttgaaagacgccctgaagggcaaagtgcaggagacgctgtcggcggtcgctgatgacggtattgagcagagcgggctgcatatctggagctttggcaccctggcggaaagttacgaacagaagcgcggtaactataaggtgaaagcctggccggcgctggtggacgagcgcgacagcgtggccatcaagctgtttgataatccacaggaacagcagcaggccatgtggcgcggtctgcgtcgcctgctgctgctcaacatcccgtcgccgattaagtatctgcacgagaaactaccgaataaagccaagcttgggctctactttaacccgtacggcaaagtgctggatctgattgacgattgcatctcctgcggcgttgataagcttatcgacgaggcgggcggtccggtgtggacggaagagggctttagtcagctgcacgataaagtgcgagccgagctcaacgacacggtggtggagatcgctaaacaggtcgagcagatcctcaccgcggtgttcaatatcaacaaacggctgaaaggccgggtggatatgaccatggcgctggggctgtcggatatcaaagcgcagatggcgggtctggtgtatcgcggctttgtcaccggcaacggtttccgccgtcttggcgatacgctgcgctatctgcaggcgattgaaaagcgtctggagaagatggctatcgatccgcaccgcgatcgggcgcagatgcttaaggtggagagcgtgcagcaggcgtggcagcagtggctgaataagctaccgccgaaccgccgtgaggacgacgatgtccgggagatccgctggatgatcgaggagctgcgggtcagcttcttcgcccagcagctgggcaccccgtatcctatctcggacaagcgagtgttgcaggcgatggagcaaattaccccatag

SEQ ID NO: 269121 - DNA, 606 bp, Klebsiella pneumoniae; identical to SEQ ID NO: 137444

SEQ ID NO: 269122 - DNA, 408 bp, Klebsiella pneumoniae; identical to SEQ ID NO: 211666

SEQ ID NO: 269123 - DNA, 597 bp, Klebsiella pneumoniae
atgccgatatatcagattgatggactgacgccggtggtgccggaggagagttacgttcacccgaccgcggtgttgattggcgacgtgatcctcggcaaaggggtctatgttgggcccaacgccagcctgcgcggcgacttcgggcgcatcgtggtcaaagacggcgccaatattcaggataactgcgtgatgcatggcttccccggccaggatacggtggtggaagaggagggccatatcggccacggcgctattctgcacggctgcgtgattggccgcaacgcgctggtgggcatgagcgcggtgattatcgacggggcggtcattggcgaaaacagcattgtcggcgcttcggcctttgtcaaagccaacgccgagatgcccgccaaccatctgattatcggcagcccggcaaaagcgattcgcaccctgagcgaacaggagctggcgtggaaaaaacaaggtacccgtgaataccaggcgctggtggaacgctgtaagcagacgctgcaccaggtggagccattacgggaagtcgaagcagggcgtaagcggctggcgtttgatgaaaacctgcggccaaaagccgccacctga

SEQ ID NO: 269124 - DNA, 936 bp, Klebsiella pneumoniae
atgaatcagatgagtaaactcgacgcctttattcaacaagcggtgacggcgatgccgatcagcggcacgtcattaattgcctcgctgtatggcgacgctttattacaacgcggtggggaagtgtggctgggcagcgtcgcggcgctgctggaaggattaggcttcggcgagcgcttcgtacgcaccgcgctgtttcgcctcaataaagaagagtggcttgatgttgtccgcattggccggcgcagcttctatcgcctgagtgataaagggttgcgcctgacccggcgcgcggagcataaaatttatcgcgctagtgccccggaatgggacggtacctggctgttgctgctttcggaaggcctggagaaaaatgtgctcgccgacgttaaaaagcagctgctgtggcaggggtttggcgcgctggcgccgagcctgctggcctcgccgtcgcaaaagctggcggacgtccagtctctgctccacgaagcgggcgtcgccgaaaatgtcatctgttttgaagcccattcgccgctggcgctctccagagcggccctgcgcagccgggtggaggagtgctggcatctcaccgaacaaaatgagatgtacgaggcgtttatcgccttgttccgacctctactgccgctgctgcgcgattgcgacccgtcagagttgacgccggatcgctgtttccagatccaactgctccttatccatttctatcgccgggtggtgctcaaagacccgctgctgccggaagagctcctgccggcgcattgggcagggcaaaccgcccgccagctgtgtatcaatatttatcaacgcgtgagtcccggcgcgctggcgttcgtcagcgagaaaggtgagagctcggtgggcgagctcccggcgccgggtccgctctattatcagcgctttggcggtttgccgggcgcataa

SEQ ID NO: 269125 - DNA, 1317 bp, Klebsiella pneumoniae
atgataactactacaaaattagatccgattgaaaccgcatcgcgtgacgaactgcaggccctgcaaacccagcgcctgaaatggacgctgaagcatgcgtacgaaaatgtgccgatgtatcgccgcaaattcgacgccgctggcgtgcaccctgacgactttcgggaattaaacgatctgcaaaaattcccctgcaccaccaaacaggatctgcgcgacaactatcccttcgataccttcgcggtgccgatggagcaggtggtgcgcattcacgcctcttccggcaccaccggcaaaccgacggtggtgggatatacgcaaaacgatattgataactgggccaatattgtcgcccgttcgctgcgcgcggccggtggttcagcaaaagataaaattcacgtcgcctacggctacggcctgtttaccggcggccttggcgcgcactacggcgcggaacgtttgggcgcgacggtgatcccgatgtccggcggacagaccgaaaaacaggcgcagctgatccgcgatttccagccggatatgatcatggtgacgccgtcctactgtctgaatctgattgaagagctggagcgccagatgggcggcgatgcccgcggctgttcattgcgggtcggcgtctttggcgctgagccgtggacgctggcgatgcgcgcggaaatcgagcgccggctggggatcaccgccctggatatttacggtttgtcggaagtcatgggaccgggcgtagcgatggagtgtctggaaaccgttgacggcccgactatctgggaagaccacttcttcccggaaatcgtcaacccggacgacggtacgccgctggaagatggcgagcatggtgagctgctgtttaccaccctgaccaaagaagcgctgccggtgatccgctatcgtacccgcgatctgacgcgcctgctgccgggaaccgcgcggaccatgcgccgcatggatcgcatcagcggacgcagcgacgatatgctgattatccgcggggttaacgtcttcccctcgcagctggaagaggagatcctcaagtttgaacacctggcgccgcactatcagttagaggtcaatcgccgcggtcatctggattcgctggcggtgcgcgttgagctgaaagagagcgggctggcgctgagtcatgaacaacgctgccagatttgccatcagttgcgtcaccgcattaagtcgatggtcgggatctccaccgatattactatcgtcaactgcggcagcattccgcgctcggaagggaaagcctgtcgggtattcgacctgcgtaaagcggtggtcagcggttaa

SEQ ID NO: 269126 - DNA, 423 bp, Klebsiella pneumoniae
atgagcaatgatccgtggcgcaacgcgcgcgtgatgtacgaaaaagatacctgcgccagaaagatggggatcgaacttatcgaaatggacgacggttttgcgcagatgagtatgaccgtctcggcggacatgcttaacggccatcaaacctgtcacggcggtcagctatttacgctcgccgataccgctttcgcttatgcctgtaacagccaggggctggcggcggtggcctcggcggcaagcattgattttcttcgtccggcgtttgccggcgaccggctggtcgccaccgccagagtcaaacagcagggcaagctgaccggcgtctacgacatcgaaattgttaatcaacagcaaaagattgtggccctgttccgcggcaaatcgcaccgcatcggcggcacaatcacgggagacgtgtaa

SEQ ID NO: 269127 - DNA, 1422 bp, Klebsiella pneumoniae
atgacgacatccttagccaccgtggcggtgatcggcagcggcaccatgggggccggcatcgccgaagtggctgccgccgccggacatccggtgcgtattttcgatattaatcaaaccgcgattgcccaggcgatcgacggcattgctatgcgtctggcgtcacgggtcgagcgcggcaaactggcgtcagagcaggccgacgcgctgctggcgcgcctgcatccggctcacgatttagccgcgcttgccgacgcggatttagtaattgaagcggcctctgaacggttggaggtgaaaacggcgctgttcgcgcagctggcggcgatctgcgcgccgtcaacgctgttgaccagtaatacctcgtctatttcgattaccgctatcgccgccggggtcaaaaacccggagcgggtggccggactgcacttttttaatccggcgccggtgatgaagctggtcgaggtggtgagtggtcttgcgacctccacagaagtggtggagcagctgtgccagtgcgtaagcggctgggggaaacagccggtgcgctgccgctcaacgcccggttttatcgttaaccgcgtagcgcgtccgttctacgctgaggcctggcgcgcgctggaagagcaggtcgccgccccggaggttatcgatgccgctttgcgtgacggcggcggcttcccgatgggaccgctggcgctgacggacctgattggccaggacgtcaacttcgccgtgacctgttcggtgtttaacgccttctggcaggaccgccgctacctgccatcgctcctccagcaagagctggcgctggccgggcggctaggtaaaaagagcggccacggcgtctatcgctggcccgctgagacactgccggacgcggcgctgccgccggtaatgataggtgctgaatccgttaccgtcagaagtgacaacgtcactgaattagacgatgtcttgctgctggagactgaaggcgagaccgccctggcgctgagtattaagcatcaccgcccggtggtggtgtatgacctgtgcgccagcgatacggtggtgctggccgcagcggcaaccaacgcgcctgcggccactgataaggccgtgcattacttccagcagcagggcaagaaagtgctgcgtattgccgattatcccggcctgctggtgtggcgaacggtggcgatgctgattaacgaagcgctggatgcggtacaaaaaggcgtcgccagcccgcaggatgtcgataccgcgatgcgccttggcgtcaactatccgcatggcccgctggcatggggagaacgccttggctggcggcgggtgctgcaactgctggagaacctgcaacaccattatggcgaggagcgctatcgccccagttccctgctgcgccagaaggcgctgatggagaagcaccatgagcaatga

SEQ ID NO: 269128 - DNA, 768 bp, Klebsiella pneumoniae
atgagtgacctgctgatccaccgtcatggccgggtgcttcagttgacgctgaaccgcccgcaggcccgcaacgcgctgaacaatgccttattaacccagattgccgaggcgctggaggccgcggcagttgatgacagcgtcggcgtctgcgttattcgcggtaacgcgcgttttttcgccgccggggctgacctcaatgaaatggcggaaaaagatctgcctgccaccctggatgatattcgcccacggttatgggcgcgaatcgatgcttttactaagccgctcatcgcctcggtcaacggctacgcgctcggcgccggctgcgagctggctctgctgtgcgacctgattgtcgccggggacaacgcccgctttggcctgccggaaattaccctcggcattatgccgggcgcgggcggcacccagcggctgatccgcagcgttggcaaggcgctggccagccggatggtgctgagcggcgagagtattgacgcccgccaggcgcagcaggccgggctggtcagtgatatccatccggcggcgttaaccgatgagtatgccctgaaactggcaaccaccattgcccgccattcgccgctggcgctacgggcggcaaaacagtcgctgcgcctgtcgcaggaagtcagcctgcaggccggtctgcaacaggagcgccagctgtttagcctgctgagcgccaccgaggaccgccgcgaaggcatcgacgccttcttacaaaaacgtaccccggaatttaaaggacgctaa

SEQ ID NO: 269129 - DNA, 498 bp, Klebsiella pneumoniae
atgcaacgtcttgccgatatcgctcctgcagaggttcgcaccatctggggattattaagcgcgatcccggatccggaagtgccggtactcaccatcaccgatctcggtatggtgcgcagcgtcgcgcgccatggcgacggctgggtgattggctttaccccgacctattcgggctgtccggcgacggagcatctgctgggcgagatccgtacggtcatgagcgagcatggctttcagccggtacatatcgtcctgcagctggatccgccgtggaccaccgactggatgagtcaggatgcccgcgagcgcctgcgccagtacggcatcagcccgccccaggggcacgcctgccatgcggacatgcccgttgaggtgagctgtccgcgctgcggcagcgcccatacctcgctgataagcgaattcggttccacggcctgcaaagcgctctatcgctgcgacagctgccgggaaccttttgattactttaaatgtatttga

SEQ ID NO: 269130 - DNA, 756 bp, Klebsiella pneumoniae
atgaataaccctaaccccgtagccacctacgccctgcggcttggcgacaatggtctggttctggcccagcgtttaggcgcctggtgcggacatgctcccgagctcgagatcgagcttgcgctggccaatatcggcctcgacctgctcggccaggcgcgcaattttttaagctatgccgccgagcttaacggctgcggcgacgaagatacgctggcttttggccgcgatgagcgccagttcagcaacctgctgctggtggagcagccaaacggcaattttgccgacactatcgcccgccagttctttatcgacgtctggcatgtcgccctgttcagccggctggtgaacagccgcgacgcgcagctggcggccattgccgctaaagggctgaaagaggtgcgttaccaccagcgctttagccgcggctggctggagcgtctgggtaacggcaccgaattatcaaatcgcaaaatgcagcaggcggtcgacaatctgtggcgcttcaccggcgaactgttcctggctgatgaagtggagctcagcctggttgagcagggcattgcggttgatccgcgtgaactgcaggccgaatggcaaagcgcggtacacacggcgcttctcgactccggcttacagatcccgcaggaagcggccttccgcagcggcggcaaacaggggctgcacagtgaacatctcggcccgctgctggcggagatgcagtatctgcagcgttcgcatcccggactgcagtggtaa

SEQ ID NO: 269131 - DNA, 288 bp, Klebsiella pneumoniae; identical to SEQ ID NO: 211678

SEQ ID NO: 269132 - DNA, 930 bp, Klebsiella pneumoniae
gtgacagaagaacaacgctttgaccagcgcatcgcgcaggaaacggccatcgaaccgcgggactggatgccggatgcctaccgtaagaccttgattcggcagataggccagcacgcgcactcggagatcgtcggcatgctgccggaaggcaactggatcacccgcgcgccgacgctgcgccgcaaagcgatcctgttggctaaggtacaggatgaggctggacacgggctgtatctctatagcgccgcggaaacccttggctgcgcccgggaagacttgtatcagaagatgctcgacgggcagatgaaatactcctccatttttaactacccgaccctcagctgggcggatatcggcgtgatcggctggctggtcgatggcgcggccatcgtcaaccaggtggcgctgtgccggacctcctacggcccctatgcccgggcgatggtcaaaatctgcaaagaagagagctttcaccagcgtcagggttttgaagcctgcatggcgctggcgcagggcaatgacgcgcagcggcagatgctgcaggacgctattaaccgcttctggtggccggcgctgatgatgtttggccccaacgatgacaactcgccgaacagcgcccgcagcatggcgtggaaaatcaaactgcactccaacgacgagctacgtcagcgcttcgtcgacaataccgtgccgcaggtagagatcctcggtatgaccgtcccggacccggatttgcagtttgatgaagccagcggccactaccgcttcggcgaaatcgactggcaggaatttaacgaggtgattagcggccgtggcatttgcaatcacgagcggttggccgccaagcgtaaggcctgggaagagggcgaatgggtgcgcgaagccgcgctggcccatgcgcaaaaacagcaggcccgcagcgcggcatga

SEQ ID NO: 269133 - DNA, 951 bp, Klebsiella pneumoniae
atgttcaacgacgccattgtttatgaccgctacgggccgccgtccgccgtgctgaccctgaaacgcctgccgctggcgccgctggcaggcggacgggtgcgggtcaggatgcgctttgccccggtgaatccttcggatctgatccccgtgaccggcgcctatcgccaccgcacccgactgccggccgtcgccggctatgaaggccttggcgaggtggtcgccgcgccatacggcagtcggttggccgcgggccagcgggtgctgcccctgcgcgggggcggcacctggcagcggtttatcgatctggatgagacctggctggtgccggtgccgccggcagttgacgatctgctggccgcccgcgggtatatcaatccgctgacggcgatgctgatgctcaagcgctggccggttgccggaaaacacctcgtgctgaccgcggcatcgtcctcctgcgccagtctgctggggcagtgggcgctggcgatgggcgcccgctcggtgagcgggattattcgctcgccgcagcaccgggcgcgcctggaacaggccgggatctatccgatcctcgataccgaccgggcgctgatggagaaggtcagccagcacagcgatctggtgtttgacgcggtgggcggcgaactggcgaatacgttgctgtcggtgctgcccgggtcgtcgaccctgatctcctatgggctgttatccgggcggccgctgacccagacgcgcggtagcgcgacggtgcgcaagtttcatctgcgggaggcgctgccgacactcagcgtggcggcgtggcgggcagcgttcgacgaaatctggcagcgcctgccgacgacctcccagccgccggcccagcgcatagcgttgaacgactggcgggcggcgattgccgccgccggccagccgggaagaggcggtaagatcctgctggatttcaccgccggttaa

SEQ ID NO: 269134 - DNA, 891 bp, Klebsiella pneumoniae
atgacagcatttcctaaggttgcgctaattggtcccggcgccatcggcaccacgattgccgccgccctgtttgagagggggagggcgccgatggtctgcgggcgtaccgcccattcggcgctggtgctgcgcactgacgagggtgagatcgtggtgcccggcccggtgcacaccgacccgatggcgatagccgcccccttcgacctggtctttgtcgcggtgaaaaccacccagacggaggccatcgccccctggctgacggccctgtgttcccctgacaccgtggtgtgcgtgctgcaaaacggcgttgagcagcgccagcagtttgcccccttgaccggcggcgcgacggtgctgccgtcggtggtctggttcccggcgcagcgcgatgccgatgcctctgtctggttgcgcgccacgccgcgcctgacgctgccggatctgccgggggcagagcgggtgcagcaggcgctggcgggaacccgctgcgcggtggacctggcggctgattttaccaccgttgcctggcgcaaactgttgcagaacgcggttgccggtctgatggtgctgaccggacgacgcgccgggatgttcgcccgggaggacatcactgccctcgggctggcttatctgcgcgaatgcctgcaggtggcgcgggcggaaggggccgccctgagcgaaaacgtgccggaggagattatcgccggctttcatcgggcgcctgccgacttaagcacctctattctgatcgatcgcctcaatggccgaccgctggagtgggatattcgtaacggcgtggtgcagcgtcgcgggcgtcagcacggcattccgacgccgctcagcgatatcatcgtgccgctgctggcggcggccagcgacggcccgggctga

SEQ ID NO: 269135 - DNA, 1500 bp, Klebsiella pneumoniae
atgtccacctcacagatagcgctgcttgccagcgtccagcagtttttagaccgtcagcatggcctgtatatcgacggcgccccctgcgccgcgcagagcgataaccggttaaccgtctgggatccggccaccgggcaggcgattgccaccaccgccgacgccagcccggcggatgtcgaccgggcggtgatgtccgcctggcgcgcttttgtcgatcgccgctgggccgggcgcaccccggctgaccgtgaacgcatcctgctgcgttttgccgatctggtggagcagcacggcgaggagctggcgcaactggaaaccctcgagcaggggaaatccattgccatctcccgcgcctttgaggtcggctgcaccctgaactggatgcgctacaccgcggggctgaccaccaagatcagcggccggacgctggacgtttcgatcccgttcccgcaaggggcgcgttaccaggcgtggaccaaaaaagagccggtcggggtggtggcgggcatcgtcccgtggaatttcccgctgatgatcggcatgtggaaggtcatgccggccctggcggcgggctgttcgatcgtcatcaaaccctcggaaaccaccccgctgaccctgctgcgggtggcggagctggcgacccaggcgggcattcctgacggggtgttcaacgtggtcaccggcagcggcgccggctgcggcgcggcgctgaccgcccatccgcaggtggcgaaggttagctttaccggctcgacggcgaccgggaaacagattgcccgcgtggctgccgaccgcctgacccgcgtgacgctggagctgggtggcaagaatccggcgattgtgctcaaagacgccgacccccagtgggttattgaggggctgatgaccggaagcttcctcaatcaggggcaggtctgcgccgccagctcacggatctacatcgaagcgccgctgtttgacaccctggtcagcggcttcgagcaggcggtgaaatcgctgcaggtggggccggggatgcaggagacggcgcagatcaacccggtggtctcccgggcccactgcgacaaggtggcggcctacctcgaagaggctcgccagcagaaggcagagcttatcagcggcagcgccggaccagacgcgggagggtactatattccgccaacgctggtggtaaaccccgacgccggactgcgtctcagccgtgaggaggtttttggcccggtggtgaacctggtgcgagtggccgatggcgaggaggcgctgcgcctggccaacgacagcgattttggtctgaccgccagcgtctggacccgcgatctgacccaggccctgaactacaccgaccgtctgcaggcgggaacggtatgggtcaacagccataccctgattgacgccaacctgcctttcggcggcatgaagcagtctggaaccggccgcgatttcggccctgactggctcgacggctggtgcgaaaccaaatccgtctgcgtgcgctactag

SEQ ID NO: 269136 - DNA, 903 bp, Klebsiella pneumoniae
atgatgaccacggcagagggagggctggcgtatcagcgctggctggcgacgatcaatcaggtctgcggccatttcgccgcccggccgttggaggagagtttccacggcgagattgacgcccgctacgccggcagcctcaaggtcagcacggtcaccgccgccggcgttaatctctaccgcacacacaatgagataaaacgcgataacgacgcctggttctataccgtgtttcagctcgccggcgaagccatcatcgaacaggacgaccgccaggtgacgctggcggcaggcgatatcacgttaatcgacgccgcccgcccctgctccatcgtctggcagcagacctcgcgtcaggcctcgctgctgctgccgcgccagcgggtggcgcccacaggggacatcactaccgcctgccggctggacaaatctctgccaatggtccagctcagccagcgactgctgctggaaagcatgggcggcatgacgctctccgccagcgagagcgaagccgcgctggaggcgatcgcctgcctgttgcgcccggtgctgcatcagcgcgatcctgccccttcccggcgggaaaagcagtttcagaagattattgcgttaatcgatgcgtccattcagtcggagcatctgcgtccggagtggctggccagcgagacgggcatgtcggtacgcagcctgtaccggctgtttgccgaccaggggctggtggtggcgcagtatattaagaaccggcggttggatctgtgtgcccaggcgttacagaatgtccatgacgatgaaaagctggcggggatcggctaccgctggggcttcagcgaccacagccatttctccaccgcctttaagcagcgctttggcgttaccccgggggaataccgcaagcgctgtcgctaa

SEQ ID NO: 269137 - DNA, 324 bp, Klebsiella pneumoniae; identical to SEQ ID NO: 138935

SEQ ID NO: 269138 - DNA, 186 bp, Klebsiella pneumoniae
atgaagaagctgttactggccatggtggcgtcgatgctgctcgccggctgtacgccgcgcatcgaaatcgcggcgtcgaaagagcccatcaccatcaatatgaatgtcaaaattgagcatgagatccatatcaaggtcgataaggatgtggaaaacctgctcaaatcccgcagcgatttgttctga

SEQ ID NO: 269139 - DNA, 2640 bp, Klebsiella pneumoniae
atgaagggtaaatataaagccgccatcgcgctggtgttagttctggtgttattgccgctaaccctgctgttgacgctaacccactgggtgccgacgctggcgggcatctggctgcccgtgggcacgcgtatctctttgcaggagagcccgcgcctgacgcggtcggccctgctgatccccgatctgcgttatctggtgggcgactgtgaaatcgcccgggtgaccgatgcccgtctctcgcgtcccagccgctggcggctgcatattggccagctggagatcaacagcgcctgcctgagcaaattgccggccagcgatccctctcccggttcaccgcgcacgcttgccgaatggcaatcgatgttgccctatagctggttaaccattgacaatctgcggctctcgccgtgggagaaatggcaggggcggctggtaatgtcattaacgcctgcgcagcaggatatcggctttgccgggaaggaactgagtctgcaggcgcgcctgcgcggccaggcgctcaccgtcagccagttcagcgcgcggctgactgacgatcagccgccggtgaagctggtggggaccttccatctgccgctggtgccggatggtctgccggtcgacggtcagatgcagggcaccttcgaattcccgcagactgcggaatggatcgatgctgagctcgagtggcagcacaattgcggccaactgctggtcaccccgcggggtgaggtagagcctattctggacctgccgtgggagatcaccccggagcggatcaccatcagcgacggccgctggcgcacccgttacgaggcgtatccgctgcgcgggcgggtggcgctgtcggtgggtaactggcagcagggcaccgaacagatgatcgtcagcggtcgcctgaatgttctcaccgaggggcatgccgggaagggcaatgcggtactgaatattggtccgggcaagctgagcatggataacagcgatctgccgctgcggctcaccggcgaggccaagctgggggagatgatactatacgcggcgctgccggctcagctcagcgggccgctgatcagcccgcagctggcttttcaccccggtgcgttgctgcgctcgcgcgggcgggtgatcgacgcgctgaatattgacgaaatccgctggccgctggccggggttaaggtcactcagcagggcgtcgatggccgcctgcaggcgatccttcgcgcccatgagcagcagatgggcgactttacgctgcatctggacggtcaggcgagcgattttctgcccgacagcggccgctggcagtggcgctactggggcgagggacattttaccccgatgcaggcgcgctgggatgtgaagggcagcggggagtggcgcgacaatgctattaccctgagcagcctctccaccggcttcgataagcttgagtacggcacaatgcgggtcagcaccccgcgtctgaccctcgagcagccgatccgctggctgcgcgatgctgagcatccgcggttgaccggcgcgctgtcgctggacgccgccaaaaccaccttctccggcggcagctatctcccggcctcaacgctgaaattcgccctcgacggtcgggacccgacgtggttccagttcaccggcgccctgcatgccgaggctatcggtccggtgcgtctgtccgggcgctgggatggcgaacggctgcgcggccaggcgtggtggccaaaacagtcgctaacggtgttccagccgctggtgccgccggactggaagatgaacctgcgcgaaggcagtctctacgcgcaggtggccttctcggcggcagccgggcagggatttgaggcgggcggccatggcgtcctgaagggcggcagcgcctggatgccggataaccagatcaacggcgtcgacttcgtcctgccgttccgcttcagcgacggtcactggcagctgggcatccgccgcccggtctccctgcgcattggcgaaatcgtcaaccaggtcaccgcgcgtaatctgacggcggacctgcagggcacctggccgtggagcgaggccaatccgctgcagctcagcgacgtcagcgtcgatctgttaggcgggaaactgacgctgctgcagctgcgtatgccgcagcgcgacccggcgttgatccgcctgcagcatatctccagcagcgaactgaccagcgccgtcaaggtgaaacagttcgccatgtccggcgcggtgagcggcgcgctgccgctgtggctggagaataatcaatggatcatccacgacggctggctgcgcaatgacggaccgatgaccctgcggctggataaagacaccgccgatgcgctggtggcggataacgtctccgccggggcggcgattaactggctgcgctatatggaaatctcccgctcgtggacgcagattaacctcgataatctgggcgtgttgacgcttaaggccagcatcaacggcaccagccgggtggaagggaaaagcagtaccgtgcatttaaactacgctcatgaagagaatattttcgacctgtggcgcagtttgcgcttcggcgacaatttacaggcgtggctcgagcagaatgctacgctgcccgtacggcgctgtacggacggtaagacatgtaaggaacctaaatga

SEQ ID NO: 269140 - DNA, 501 bp, Klebsiella pneumoniae
gtgtcgttaattatctcgctcatagagagcgcacaggaccactatccatgggtattgctgattgtttttctgcttaccttcactaaatcctgcgcattggtctcgctggcaatccccggcacctccggcctgctgctgctgggaacattcgcttccgccagcctcggacatttcctgttaatgtggtccagcgccagcctcggcgccatcggcggattctggctatcgtggcggctgggcattcgctaccgtcatcgcctcacccatctacgctggctgaccgccgagcgtctggcccgcagccgcctcttctttcagcgctatggcccgtgggctatctttttcagccgctttctctctcccctgagggctacgctgcccttcgttagcggcgccagcagtctgccgctgtggtcgtttcagctggctaacgtcagctccggtctgctgtggccgcttctgctgctcgcccccggcgctttcagcctcagtttgtggtga

SEQ ID NO: 269141 - DNA, 990 bp, Klebsiella pneumoniae
atgaaaatcgcggtttatagtacgaagcagtacgataaaaagtacctgcagcacgttaatgatgcatacggctttgaactggaattcttcgatttcctgctgacagcgaagactgccaaaaccgccaacggttgcgaagcggtatgtatcttcgtcaatgacgacggcagccgcccggtgctggaagagctgaaggcccacggggtgaaatatatcgccctgcgctgcgccgggtttaacaacgtcgaccttgaggcggcaaaggagcttggcctgcgcgtcgtgcgcgttccagcttactctccggaagcggtcgctgagcatgcgatcggtatgatgatgtcgctcaaccgccgtatccaccgcgcttaccagcgtacccgcgatgccaatttctccctcgaaggcctcaccggcttcaccatgtacggcaaaaccgccggggtgatcggcaccgggaaaattggcgtagcgatgttgcggatcctcaaaggcttcggcatgcgcctgctggcgttcgacccgtacccaagcgccgccgcgctggagctgggggtggaatatgttgacctcgccacgctgtacaaggaatcggacgtgatctccctgcactgtccgctgaccgacgaaaactaccacctgctcaatcgcgaagccttcgatcagatgaaagacggggtgatggtgatcaacaccagccgcggcgccctgatcgactctcaggcggccatcgacgccctgaagcaccagaaaattggcgcgctggggctggacgtttatgagaacgaacgcgatctgttctttgaagacaaatccaacgacgtgatccaggacgatgtcttccgccgcctctccgcctgccataacgtactgtttaccggccaccaggcgttcctcaccgccgaggcgctgatcagcatttcggagaccactctgggtaacctgcagcaggtcgccaacggcgaaacctgtccgaacgccatcgtctaa

SEQ ID NO: 269142 - DNA, 441 bp, Klebsiella pneumoniae; identical to SEQ ID NO: 250792

SEQ ID NO: 269143 - DNA, 264 bp, Klebsiella pneumoniae
atgcgagctgcgatgttagtaggatgtgcggcgctgttgctgtccgcgtgcagtagtgaacccgttcagcaggccacggcggcgcacgtcacgccgggaatgcgggcggcgatgagcgacgccggtcaggccaactgcgccatgataggcggctcgttatcggtggctcgtcagctcgatggttcggcgattggcatgtgcgcgctgccgaacggcaaacgctgcagcgagcaagcgctggcgggcggcagctgcggctactaa

SEQ ID NO: 269144 - DNA, 3528 bp, Klebsiella pneumoniae
atgattacgattgatggtaatggcgcggtcgcttccgtcgcgtttcgcaccagtgaagttatcgccatctacccgatcacgcccagttcaacgatggcggaacaggctgacgcctgggccggcaatgggctgaaaaacgtctggggcgatgttccccgcgtggtcgaaatgcagtcggaggcgggcgccattggcgccgtacatggcgcgctgcagaccggcgccctctccacctcctttacctcatcgcagggcctgctgctgatgatccccacgctgtacaaactggccggccagctgatgccgtttgtgctgcacgtcgccgcccgcactgtcgctacccatgcgttgtcgatcttcggcgaccattccgatgtcatggccgtccgccagaccgggtgcgccatgctgtgcgccagcagcgtccaggaagcgcaggatttcgcgctgatctcgcatatcgccaccctgcaaagccgggtgccgtttattcatttctttgatggtttccgtacttcgcacgaaatcaacaaaatcgccccgctggcggatgacaccattcgcgccctgctgccgcaggataagatcgctgagcatcgccagcgcgcgctcaatccggaacacccggtgatccgcggaacctcggccaaccccgacacttacttccagtcccgtgaggccaccaatccgtggtacgacgcggtgtatgaccatgtcgagaaagcgatggacgatttcgctgccgccaccggccgtcagtacaaaccgtttgagttttacggccacccgcaggcagagcgcgtgatcgtcattatgggctcggccatcggcacctgcgaagaggtggtcgatgagttgctgagtcgcggcgagaaagtcggcgtgctaaaagtccgcctctatcgcccgttctccgccgcccacctgctggcggcgctgccggaaagcgcccgcgcggttgccgtactggatcgcaccaaagaacccggcgcgcttgccgaaccgctttacctcgacgtgatgaccgccctggcggaagcctttaaccgcggcgagcgcgagacgctaccgcgcactatcggcggccgctacggtctctcctccaaggagtttggtccggaatgcgtgctggcgatattcagtgaactgcaggccgcccagccgaagccgcgctttaccgtcgggatctatgatgacgtgaccaacctgtcgctgccgttgggcgaaaataccctgccagcagaggccaagctcgaggccctgttctacggcctcggcagcgacggcagcgtgtcagccaccaaaaacaacatcaaaatcatcggcaactcgaccccatggttctcccagggctattttgtctatgactcgaagaaagcgggcggcctcaccgtctcgcatctgcgggtcagcgaaaaaccgattcgttcatcgtatctgatttcgcaggctgatttcgtcggctgccaccagctgcagtttatcgataaataccagatggccgagcggctgaagcccggcggcattttcctgctcaacacgccgtacagcgccgatgaggtctggtcccgcctgccccaggaagtccaggccaccctgaatcagaaaaaagcgcgtttttacgtggtcaacgcggcaaagatcgcccgcgaatgcagcctcggggcgcgcattaataccgtgatgcagatggcctttttccatttaacccagatcctgccgggtgatagcgcgctggcggaactgcaggcagccatcgccaaaagctacagcagtaaaggtcaggagctggtggagcgcaactggcaggcgctggccctggcccgtgaatcactggcggaagtaccgctccagccggtgaacgccagcagtccgaaccgcccgccggtggtctccgacgccgcgccggatttcgtcaaaacggtcaccgccgcgatgctggccgggctcggcgatgcgctgccggtctctgccctgccgccggacggcacctggcccatgggcaccacccgctgggagaaacgcaacatcgccgaagagatccccatctggaaggaagcgctgtgtactcagtgcaaccactgcgtcgccgcctgcccgcactcggcgatccgcgccaaagtggtcgccccggaagagatggagaacgcccctgccagcctgcattcgctggatgtgaaatcccgcgatatgcgcgggcagaaatacgttctgcaggtcgccccggaagactgcaccggctgcaacctgtgcgtcgaagtgtgcccggcaaaagaccgccagaacccggagatcaaggccatcaatatgatgtcccgcctggagcatgtggaagaggagaaggtcaattacgagtacttcctcaacctgccggaaatcgaccgcagcaaacttgagcgcattgatattcgcacctcgcagctgattagcccgctgtttgaatactccggcgcctgctcgggctgtggcgaaacgccgtatatcaaactgctgacccagctctacggcgaccgaatgctgattgccaatgccaccggctgctcctccatttacggcggcaacctgccctcgacaccgtacactaccgacgccaacggccgcggcccggcgtgggccaactcgctgtttgaggataacgccgaattcgggctcggcttccgcttgaccgtcgaccagcatcgccagcgcgtgatgcgcctgctgagcgaattcgccgacaaactgccggcagagctgaacgcggcgctgcacgccgaggcgacgccggaagttcgccgcgaacaggtggcagccctgcgtcaggcgctggccggcgtggcgggagctgaagagctgctgaccgatgccgacgcactggtggagaaatccgtctggctgatcggcggcgacggctgggcttacgatatcggcttcggcggcctggaccatgtactgagcctgacggaaaacgtcaatattctggtgctggacacccagtgttactccaacaccggcgggcaggcgtcaaaagccaccccgctgggagcagtgactaagtttggcgagcatggcaaacgcaaggcgcgtaaagatctgggcgtcagcatgatgatgtacggtcatgtttatgtggcgcaaatttcgctgggcgcgcagctgaaccagacggtgaaagcgattcaggaagcggaagcctatccggggccatcgctgatcatcgcctatagcccttgcgaagagcatggctacgatctggcgctcagccacgaccagatgcgtcagctgaccgccaccggcttctggccgctctaccgcttcgacccgcgtcgggcagacgaaggcaagatcccgctggcgctagattcccgtccgccatcagacgcgctggccgagacgctgcttaatgagcaacgtttccgccgcctgaacgcccagcagcctgaagtggcggagcagctatggaaagacgccgccgccgatctgcagaagcgctatgacttcctcgcccagctggctggcaaagcggagaaatcgccaagcgaaggttaa

SEQ ID NO: 269145 - DNA, 1125 bp, Klebsiella pneumoniae
atgaaaagaaaagtactggccctcgttattccggctttattagccgccggtgccgcgcatgcggcggaaatttataataaagacgggaataaattagatctctatggcaaggtagatggtctgcattatttctccagcgactcgaaaaaagacggcgatcaaacttatttacgttttggctttaaaggcgaaacccagatcaacgatatgcttaccggctatggccagtgggaatataacgttcaggccaacaacaccgagacctccagcgatcaggcgtggacccgtctggcattcgccggtatcaaagtgggcgattacggctccttcgactatggtcgtaactacggcgtgctgtacgacgttgaaggctggaccgatatgctgccggagttcggcggcgactcctacacctatgcggataactttatggcaggccgcgccaacggcgtcgcaacctaccgtaacagcgatttcttcggtctggtggagggtctgaacttcgccctgcagtatcagggtaaaaacgaaggccagaacgcgcaggatatcaacgtcggcaccaataaccgcagcagcgacagcgatgttcgcttcgacaatggcgatggtttcggcctctctacttcctacgacttcggcatgggcatcagcgcggcggcagcttacacctcgtctgaccgtactaacgatcagatgacccagaccaatgcgcgcggcgataaagcggaagcctggaccgccggcctgaagtacgacgccaacgatatctacctggcgaccatgtactctgaaacccgcaatatgaccccgtacggcaatgacggcgtggccaataaaacacaaaacttcgaagtcaccgcgcagtatcagttcgacttcggcctgcgtccggccatctcctacctgcagtccaaaggcaaagatctgtacaataacggccgctatgccgataaagatctggtcaaatatatggacgttggcgcgacctattacttcaaccgtaatatgtccacctatgttgattacaaaatcaacctgctggatggtaacgacaaattctacgaagacaacggtatctctaccgataacatcgtcgccttgggcctggtttaccagttctga

SEQ ID NO: 269146 - DNA, 213 bp, Klebsiella pneumoniae; identical to SEQ ID NO: 135963

SEQ ID NO: 269147 - DNA, 435 bp, Klebsiella pneumoniae; identical to SEQ ID NO: 241339

SEQ ID NO: 269148 - DNA, 936 bp, Klebsiella pneumoniae
atgctgcaaaaccaagaaatcagtaaaaaagaaaagtacaacatcgataagctgcagaaacgtctgcgccgcaacgtcggtgaggcgattgccgacttcaatatgattgaagagggcgaccgcattatggtttgtctttcaggcggcaaggacagctataccatgctggagatcctgcgcaatctgcagaaaagcgcgcccatctccttctcgctggtggcggtgaacctcgatcagaagcagccagggttcccggagcatattctgccggcgtatctggagcagctgggggttgaatacaagattgtcgaagagaacacctacggcatcgtcaaagagaagatcccggaaggaaaaaccacctgctcgctgtgctctcgcctgcgtcgcggcatcctctatcgtaccgccaccgagctcggggcgaccaagatcgccctcggccatcatcgcgacgatatcctgcagacgctgtttttgaatatgttctacggcggcaaaatgaaagggatgccgccgaagctgatgagcgacgacggcaaacacatcgtcatccgcccgctggcctactgccgcgaaaaggacatcgagcgcttctcccaggccaaaggcttcccgattattccgtgcaacctgtgcggttcgcagccaaacctgcagcgccaggtgatcgccgatatgctccgcgactgggataagcgttatcctgggcgcattgaaaccatgttcagcgcgatgcagaacgtggtgccttcgcacctgagcgacgtcaatctgtttgattttaaaggcatcacccacggctcagaggtggtggatggtggcgatctggcgtttgaccgggaagatattcccctgcagcccgccggctggcagccggaagaagaagacgcccgtctcgatgagctgcgtctgaacgtagtggaagtgaaataa

SEQ ID NO: 269149 - DNA, 1374 bp, Klebsiella pneumoniae
gtgaccgctttttctaccctgactgttttacctgccgcccaattagccaaccttaacgagctgggttatctgtcgatgaccccggttcaggccgccgccctgccggcgatcctcgcggggaaagatgtgcgcgtgcaggcaaaaaccggcagcggaaaaacggccgcatttgggctgggtctgctgcagcatatcgatccggcgcgcttcgagacccagtcgctggtgttgtgcccgacccgcgagctggccgatcaggtcgccggcgagctgcgccgcctggcgcgctgcctgccgaacatcaagattctgatgctctgcggcgggcagccctttggcgcccagcgagattccctgcagcatgccccgcatattatcgtcgccaccccgggccgtctgctcgatcatctgcagaagggaacggtctcccttgacgcgctgcagaccctggtgatggacgaagcggaccgcatgctcgatatgggctttagcgatgccattgatgaggtgatccgcttcgcaccggctgaccggcagacgctgctgttctctgctacctggccggcggcaatcgcggcgatcagcggccgggtgcagcgcaatccgcagaccattgagatcgacactgtcgatgcgctcccggcgattgagcagcagttctttgaagtttcccgccacggtaagattgccctgctgcagcgcctgctcagccagcatcagccagcatcctgcgtggtgttctgcaataccaaacgcgattgccaggcggtctgcgatgcgctcaacgccgccgggcagagcgccttgtcgctgcatggtgaccttgagcagcgcgatcgggatcagacgctggtgcgcttcgctaacggcagcgtccgggttctggtggcgaccgacgtcgctgcccgcggtctggacatcaaatccctggcgctggtggtgaatttcgagctggcctgggatccggaggtgcatgttcaccgcatcggccgtaccgcccgcgccggtgaacaagggctggccatcagcttctgtgcgccggaagaggcgcagcgcgccactattctggccgacatgctgcagctttccctgaactggctgccggcgccgacgggcaacaccatcgcgccgctgacggcggagatggcgacgctgtgtatcgacggcgggaaaaaggcgaaaatgcgcccgggagatgtgctgggagccctgaccggggatatgggctttgatggtgccgatatcggcaaaattaccgtccaccctgcccacgtctatgtggcgatccgccagaatatggcgcagaaggcgtataagcagttacaaaatggcaagatcaaaggtaaatcctgccgcgtacgactgctgaagtaa

SEQ ID NO: 269150 - DNA, 984 bp, Klebsiella pneumoniae
gtggacgcgattaaaggctcggagttgcagataccggacgcgatcttcgcgtgggtgctcgacgggcaggggggcgttaagccgctcgccgatgacgatattatcgacaaagacaagccttgctggctgcatctcaactatacccatagcgacagcgccgactggctggcggccaccccgttgctgcccaataacgtgcgcgatgccctggcgggggagagcacccggccgcgggtgacgcggatcggtgacggggcgctgatcaccctgcgctgtatcaacggcagtactgatgagcggcccgaccagctggtggcgatgcgcctgtatatggatgagcggctgatcgtctccactcgtcagcgcaaagtgctggcgctggacgatgtgctgggcgacctgaaggaaggtaatggcccgacggacggcggcagctggctggtggaggtctgcgatgcgttgaccgatcatgccagcgagtttatcgaacaactgcacgatcgcattatcgacctggaagacgacctgctcgatcagcaggtgccgccgcgcggatttctcgcgctgctgcgtaagcagctgattgtgatgcgccgctatatggcgccgcagcgcgacgtttatgcccggctggccagcgagcggctgccgtggatgagtgacgatcagcggcggcgaatgcaggatatcgccgagcggctggggcgcggtctggatgagatcgacagctgtatcgcgcggacggcgatcatgagcgacgagatcgcccagattatgcaggagtcgctggcgcggcggacctataccatgtcattgatggcgatggtgtttctacccagcacctttttaaccggcctgttcggcgtcaacctcggcgggatccctggcaacagctggcatctggggtttagccttttctgcttgatgttagtcgttgtcatcggtggtgttgcgtggtggttacatcgcagtaaatggctgtaa

SEQ ID NO: 269151 - DNA, 744 bp, Klebsiella pneumoniae
atgcataagctcgccaggcaaaaacatattctcgacaggcttagcgaaaccggtcagctgagcatcagcgagctggttgcagagctgcaggtgtcggccgataccattcgccgcgatctgagcgacctggaacaacagggcgtgctgcagaaaagccacggcggggccatcgcccttaacgtcccggccatgacgcgccagggcagaaacgctcttctcacccagaccaagcagcgcctgggtcagcaggtcgccgcgcgcattccctctggctcgacgctgtttctcgacgccggaagcacgctgctggcggtggcagcccagctgaaagggccgttgaccgtgatcacggcttctctggatatcgctcagctgttcagcgaccgtgccgatatccagctgatcctgcttggcggccagtgggatagtaaacaacggctgttcgccggcagcgccaccctgtcgctggtcacccgctaccgggccgatatcgccattctcggcgcctgcgcgctccatgccgggctggggctgagcgccagccaggaagctgatgccgacgttaaacgcgccatgctggccgccagcgccgagcactggctggtggcggaccataccaaactcaaccgctgcgaaccgtggcgggtggccgggctcagcgacattcaccatctttttcttgatcgtccctgggctgagctgggggatgaccccgccctctctgtacatattgctgacgcttaa

SEQ ID NO: 269152 - DNA, 1119 bp, Klebsiella pneumoniae
atgaccccgccctctctgtacatattgctgacgcttaacaacgtggagaacctgatgagtaacaacacgataaatatcgccctgattggctacggattcgtcggtaagaccttccacgcgccgcttatccgttcggtgccggggctgaacctggcgttcgtcgcttcccgcgatgaagagaaggtcaaacgcgacctgccggacgtcacggtgatcgcctccccggaagcagcggtccagcatccggacgttgacctggtggtcatcgcctcccctaacgccacgcacgccccgctggcccgcctggcgctgaacgccggcaaacatgtggtggtggataagccctttaccctcgatatgcaggaggcccgggagctgattgccctggcggaggagaaacagcgtctgctctccgtcttccataaccgccgctgggacagcgactatctcgggatccgtcaggtgattgagcaaggcaccctcggcgcggtgaaacacttcgagtcgcatttcgaccgcttccgcccggaagtccgcgtccgctggcgcgagcagaacgtcccgggcagcggcttgtggttcgacctggggccgcacctgatcgaccaggcgctgcagctatttggtttgccgcagtcggtgcaaggtaacatagccaccctgcgcgacggcgcggagatcaacgactgggcgcatgtggtattaaactacccggcgcataaagtgattctgcactgcagcatgctggtcgcgggcggctcgtcgcgcttcaccgtgcacggcgataaaggtagcgttatcaaagcgcgggccgaccaacaggagagccagctgctggcgggcgtggtaccgggcagcgccggctggggccaggatgacgacccgctggttatctatgatgcctcgctgcaggcccacgcgcaggctaccccgcagggcgatcagcgccagtactatatgctgatccgcgatgcgctgaagggccagatcgccaatccggtgccgccggtggaagcgctggcggtgatggccgttctggaagcggcggtgcgctctgctgaaagtggtatggtgcagaccctggacctgtccgacgacgagcgcaacacgctgcgctaa

SEQ ID NO: 269153 - DNA, 195 bp, Klebsiella pneumoniae; identical to SEQ ID NO: 135956

SEQ ID NO: 269154 - DNA, 747 bp, Klebsiella pneumoniae
atgaagcatgttcacaagctggcctggataggcctgttcgtcaatattattatctgttttgtcgcgcgaaatttattacttgatgaaggacagctgaacttccatagtcgggcggacggcgtatggtcctggctggtgctggccctgtttattgccgtggtggttcaggcgatcagcataatgctgtcaggccgctacccttatctggccatcgtcctggcgtttgttggcggtatcgtgatggtgcccgccagcgtgatctttctggtgggtagtctgttcagcttgcaaacgcggattaacgccggatttacgccctggcgatcaaccacggcagtgggcgaggctgataaccagcagctattaacctttaatgcctcaggcttttatccccaaggggcgctggcgctcatcgccgggatcattattttaatgattggcatgggtataggcggagtatttattgccgccggtattgttgcgctgtgcaatggctatcgtctgcaaaatcgggtggtgattggcgtgagcggcgagtcgatgatatttacgccggggctctatgccgatacctacgttattcccttgcgggatgttgccgtagttgaacgcagcaataatgatgcgaaagtccggctgctgatccgttccagcggcagaagcttcacgttgcgtaaaaaactgctcgccggcgataaggttaatgacgccttcgccgccattctggcaaaactgactaccgtttaa

SEQ ID NO: 269155 - DNA, 669 bp, Klebsiella pneumoniae
atgtttgatcttattgataccgccatcaccggcgttcagttcctgctggcgctgcgtgacaccctgattatggtcgccgtctcgctgggctttggcgcgctgatcggcgtcccgctggggattgtgctggtggtttgccgtcccggcggcatcgtggccaacccggtggtgcatcaggcgctgaatccgctgattaacgtgctgcgttcactgccgtttatcattttgctgattgtgatcctgccctttaccagactgctggtgggcaccactatcggcaccgcgggagccatcgtgccgctgatcgtctttgtcgccccctatattgcccgactagtggagagctcgttgctggaggtggatgaggggatcctcgaggccgcggacgccatgggcgcaaccccgctgcagactgtctggcactttatgctgccggaggcggcggcatcgctgattctggccctcaccacggcgaccatcggtctgctcggcgccacagccatggcgggtacagtgggcggcgggggaatcggggatctggctattacctatggctatcagcgcttcgacgctttcgccaccctcactaccgccctggtgctgattgtgattgtccagcttatccagacgctgggcacccgactggctcgccgactgcgccgtgaataa

SEQ ID NO: 269156 - DNA, 1026 bp, Klebsiella pneumoniae
atgaataacgcgatgatagaatttcgccacgtcagtaaaagcttttccaggaaaggacatccgattctggccttgcaggatattaatctcagcattgagcgaggcgatatttttggcattattggctacagcggggcaggaaaaagcaccttattacggctgattaatcgtctggaaacgcctggcgagggcgaggtactgttaaacggcgagccgctacaggcctgcagcggccagcgcctgcaggccatcaaaaaagatatcggcatgatctttcagaattttaatctgctgaattcgaaaaccgttttccataacatcgccatcccgctgattttacaggggcgcgacaaggcctttatccaggcgcgggtggcggaactgctggcattcgtcgatctgagcgacaaaatccacagctaccctaatgagctgtcgggcggacaaaagcagcgggtcggtattgcccgggcgctggccaccaacccgtcggtccttctgtgcgatgaagccacctcggcgctcgacccccacactacggtgcagatcttactgcttttgcaggagattaatcgtcggtatggcatcaccatcgtactgatcacccatgagatgtcggtgatccagaaaatctgtcacaaggtggcggtgatgcaggcgggccgtatcgttgaacagggggcggtttttgatctctttgctcagccgcagcatccggtcactgccagtttcgtgcagtcggtggtgcacgaccgcctgccgcagcgggtggcgtcgttcctgcagcgcgataacggcgcccgggctttacgcctcgaatttgtcggcgcgacggcgcagcagccgattattaaccacctgatccgcgagtatgctgtcgaggtgaatatcctgtttgccagcatgtctgaagttcagggccggattctgggatttatgattgtgcagctcctcggcgagcctgacgaaaccgaccgcgccatcacccatctggtctatgcaggagtgaaaatcacccatgtttga

SEQ ID NO: 269157 - DNA, 807 bp, Klebsiella pneumoniae
atgaacaagtcagttgcgcgcgggatcgctttcgccctgttgtcggccacctctttttatgccgccgccgacgctcatcttatccgcgtcggctttaaccccgggccgtataaagaacaatttgagaaaggcgtcgcgccctatttattgagtaaagggtataaaatcgaatataaggatttcagcgacggtattcaggtgaatgacgcggtagcccgcggcgatatcgaagcgaatattatgcagcatccggtatatctgaaagcaattaatgagcggctggggatcgataacgtgggcattgtgcaggtccccacgccgccgatggggctgtatggtgggaaactgaccaccctggggaccccggcggcgggcaccgtcgtgtcggtaccaaaccagccgtcaaatgaatatcgcgcggtactggtgctggagagccttggctgggtgaaaattaaaccagacagcgatccggccactttttcgcagcgtaacatcgtagataatccttacaaaattgtcctaaaagagatggataatgcccagcaggttcgcgctctgccggatgtcgactatggcctgattcagggcaatttcgccgtctccagcggtatgtccctgacttcggcattaaagctggaggctgccaccagccattttattaatgtcgtgaccgtcgccggtaaaaatcagaaggcgcagtttgccaaagatattatcgatggctaccactcggccgagttcaaaaaatatattctcagccatccgcagtatgatggttacctgctgcctgactatttaaaatga

SEQ ID NO: 269158 - DNA, 1176 bp, Klebsiella pneumoniae
atgcctgattttactgcttcgccgctggtggacgcgctggaagagaatctgttcagcctgctggaaaaactggccgcggaggtcaacaccgaagcgctaccgctgatcgatctttccagcggcagtccggatcaacccaccccgccggaagtgattgactcgctgcagagcgctattcatcgtcgtgaaaaccatggctacccgtcgttctggggcaaaccacaggtccgcgaggcgatcgcccggttctatcgccggcagtatgatgtggaactcgatccgcacagcgaagtcgccgtgtttcaggggtcgcatatcggtataggcggcatcccgcgggcgctgctcagccccgggcaatacctcatctccaccgatccctgctatccgatttaccgctcggcggcgctgcagtcccaggcggcgttttatggcctgccgctcagggcggagaaccatttcctgccggattttaacgatcttccccgggaagtcgctgacaaggccgggctggtggtgcttaactatccgcataatccaaccggcgccctcgccacgccggcgctgttcgccagcgcgctgcagtttgctcgtcgtcaccaggtgccgatcctccatgattttgcctatgcggccatcggcagcgcggccagcgatgcgccgctgagcctcttctcccagcccgacgccaaagcatggggagtggaaacctatactttttccaagacctttaatatggccggctggcgcttcggcttcgcggtcggcaacgcctcgattatccgggcgtttaaaaagctgcacacccatagctacagcacggtgtttggcgcgattcaggatgcggcgatcgccgcgctcaacctgccggccgaacggattgcgcagctgacggcggtctatcatcaacgtcgggagtgggttctgcgtcgactggctgcgctgcgctggccggcgcgtgacgcacaaggcactttcttcctctggctcggcgtaccgcccggctaccgttcgcaggagtttgcccgtctgctgctgcaggaagcgcatattctggtggcgccgggcacgggttttggcgcagggggggaaggatttattcgcatcagcctgaccgcaggggacgaggcgctgagcaacgcgctggaccgtcttgcccggctggcgctgttttag

SEQ ID NO: 269159 - DNA, 1035 bp, Klebsiella pneumoniae
atgtcgacgcagatgatgaaggctgttcaacagcacgcctttggcgggccggaagtcctgagctatgaggatgcgcccatgccggtcctgcaggccggtgaagtactggtacaggtgcacgcggtgggcgtgaacccgccggacagctatctgcgcgatggctatcaacagctgcccccggagtggcggcccgaggtccgctttcccttgatcctcgggaccgatctctccggggtggtggtggtgcgggcggatgacgtccgggaggtggcggtcggcgacgaagtgtatgctatggcgcgttttcccgaaggggcggcagggggcagccgcgcttacgccgagtacgttagcgtgccggtcagcgacctggcccgcaaacccctaaccctgagccatcagcaggctgccgcggtgccgatgtcgctcctgaccgcctggcagttcatgatcgatcccgggcatgaggtggcgaatccgctgcagccggggccgcatcggccggtgccgctggcgggtaaacgcgtcctggtcaacggcgcggcagggggagtcggtcatttcgccgtgcagttggcgaagtggcagggcgccgaggtgattgccgtcgccgcgggccgccatgaagcctttttacgtcagctcggcgcggatagcgttatcgactatacaaccaccgcagtggaagagacggtgcgtgacctggacctggtcattgatgcgccgggcgggccggccagcggccgttttttgcgtaccctgcgacccggcggcgcgctgtacccgatctttccgctcggctttgccggggcggaagaggcgcgacagcgcggagtgacggtctccaccacccaggtacgctccagcggcgcgcagctcgcccggcttgccgacctgctggacgccggggtcatccaggttgcaattgacagcgttttcccccttgcgcaggtgcagatggcgcatgagcgagcagcgcaggggcatcttgagggcaaaatcgtgctgtcggtgatggactcgtcagccgggtaa

SEQ ID NO: 269160 - DNA, 549 bp, Klebsiella pneumoniae
atgagagctgatgccagaaaaaattatgacctgttgatcgaggtggcccgggacgtctttgtggagcaaggcgctgaggcctcgctgcgcgatatcgcccgccgggcgggcgtcggaatgggaaccctctatcgccactttcccaaccgcgacagcctgctggaagccctgctccgcagccgctttgcggcgctaaccgcccgggctgagtcgcttctgctcgccgccgatcctgccgcggcgctgctggagtggctggccgagagcgtggcgtttacccatcagcatcgcgggatcatcgccccgctgatgagcgccgtcgacgatcctgagtccgccctgcacagcgcctgcgttgccctgcgcgccgccggtacgtcgctgcttacccgcgcgcagcaggccgggctggcacggccagatctcagcggagaggagctgttcgatctgatcgccgcgcttgcctggctgcgggagcaaccgtcccatgccccgcgcgcagagcggattttagcggtgctggccgacgcgatcctgactgccggctag

SEQ ID NO: 269161 - DNA, 912 bp, Klebsiella pneumoniae
atgaataatgcgcaaaccgtgttggtttttggcgccaccggtcagcagggcggctcggtggcgcgggcgctgctgcaccgcggctggcgggttcgggcgctggtcagggatcctttctccgccggggccgctgcgctggcggcgcggggagccgagctggtcgtgggtacctttgaagaccgggcggcaatgcggtcggcgatggccggggtcgacggcgtcttcagcgtccagcccagttcgccgggagggacggtgaccgatgagcaggaggtacgctacgggataaccatcgccgatctcgccgtcgagtgcggggtgaagcatctggtgtacagctccggcagcgcgacgggggagacgccgaccggcgtagcgcattatgacaccaaagcggaaattgaacggcatattcgccgcctgccgctggcggcgaccatcgtgcggcccgccacctttatggagctgctggtgatgcctggttttggccttgatgaaggtcgttttcaattttttatgttgccggaggggagaatgcaggtgctggcggtggaggatatcggccatcttgtcgcggcggtttttgccgcgccggcgcggtttgccggcaagacgttcgagatcgccagcgacagcgtgaccggccgtcagctggaggggttattctccgcggcggcgggacggccgatcccctattcgcgattttccgacgaggtgctggccgccagtccttttctgcacaagctgaccgggctggtggacgacgggcggctggccgggcacgccgacctcgacgccctgcgccagctgcacccgcagctgcacaccttcgccggctggctggcaggccccggccgtcccgccttcgagcgggcgctgaccagcggggctcgctgggcgtttgatcgttaa

SEQ ID NO: 269162 - DNA, 867 bp, Klebsiella pneumoniae
atgcaaacttaccagacaggcgatagcctgattttcaaagtgccggagcgcgagatttccctgcagccggcagcgctctatccagaggcgttcccggtagcggaggcggaggccgttattcagccgattgcgctgtcaatccacagctgggtggtgcagaccccccacgatctgattgttatcgataccgccaccggcaatggtcgggagcgcggcggcaatccgctctatcatcaacttaacacgccgtatctggagaatctccgcgccgcgggggtgaacccggaggacgtgaccctggtgctactgactcacctgcataccgaccatgtcggatggaataccgtctggcaggacgatcgctgggtgccgctgtttcccaacgcccgctatctgtgctcggcaaaagagctgtcgcgggtgaaaaacagcgaacgctaccgggcgctgtggcttgacagcctgctgccggtgattgaggccggccagctggagaccgtcgatgtggcgacccggccgcgggtcggcggacggatcgactttattcccacccccggccacagtccggaccatgccgcgctggtcctcgccgctggagatgactacgcctgtttctccggcgatcttctgcattccccgatccagtttgcccatccgcagtggaattcagcgttctgcggcgatccccggcaggcggaagtctcgcgacgggagatgatggcgtggggggcaagccatcatgctcaatggttcaccgggcattttgccgggccttcctgcggctggctggagaaggataagcaaggtgactatcgctggcgagaggccgggaaacaggctgcagataaggggaacagtgatgaataa

SEQ ID NO: 269163 - DNA, 924 bp, Klebsiella pneumoniae
atgaacaaaatcattgaaaatgattttagtcgtatcgatctgaatctgttgacagtcttgatggtgctgtaccgcgaagggagcgtcacccgcaccgcagaggtgctgcatcttggccagccggctatcagcggggcgctgaaacggctgcgcgagatgtttgacgacccgctgttcgtccgcagcgccagaggcatgctgccgacgccgcgggcgcaagcgctgatgaccgacctgcagccgctgatggaaaacctgcattcggcgatgtttggcgccggagagttcgtcccggcgcgcgcgcagcagctttttcgcatcggcctcagcgactggagcgaacactggctgatgcccccgctgttacccgggctgatgcaggaggcgcccggagtgtcactgcagtcgatagccgccgaccccttccaggttcgccagttgctggaggaggagcgcattgatgtcgcggtgtctgtcaacaaacagagccgcggggaggtggtcagcgagccagtgatgaccatgggagtcaccaccctgtggtcgccgcagcagatcccctgccgcgggccgctgtcggtgagcgactttgtcgcctgggaacacgtgatggtggcctatcgcgaaaccggccacggtgaaattgaccgccagctcgccagccagggactcgcgcggcgcgtgcgctttgccacgcagaatttctccacctttcccctgctgctgaccaccctgccgctgttcgccaccgtcccgcaggggctggcgcagcgctggcaggcgcagtatgcgctgcgcgcggacgctccgccggtagcgtatccggaatttacgctgtgcattttgcggcacaaacggcgggcgcaggatccggcgctgaattggctggtggcgaagttaaaacaggccatgcgcggtcaataa

SEQ ID NO: 269164 - DNA, 930 bp, Klebsiella pneumoniae
atgagcgccggggggggtaacgaaatggacaaactggatgccatgcaggtctatgttgcggtcgtggatgcccacagcttcgcccgcgcggcggaggtgctcgggcagccgcgctccacggtatcgcgggtggtgaaggagctggaagcctggctcggggcgcagcttctccagcgcaccacccgcaagctcagcgtgacggcggagggtcgccggtattatgaggagtgtaaaaggctgctggccgagatggcggcgatggaagcctcctttcccgggcgctcggctcagccagccgggcggttcaaggtagggatgccgcaatcccttgcccgccactgcattctgccgaggatcggcgagtttttgcagcagtatcccgacctggagctgatcctctgctcaagcgacaacgtggaagatattattcaggagggattcgactgcgtgatccgtaccggacggatcgaagattccaccaccctggtggcgcgtcctctggcccgctaccgctggatggtcctcgcctcgccggcctggctcgcggcccacggccggccgcagagcatcgacgaactgcaccagcatcgggcggtgggctaccttaatcaccgtaccgggcggaccatcgactggcttttctccctcgatgaaggcgactgcgcgatccgcatgcgggagacgctggtggtcgacgataccgatgcctacattcaggccggcattcaggggctgggcctgatccgcgtcgccagctatctggcgcaaccttatctgcagagcggggcgctggtcgcctgtctggagcaggccgcttctgatctccccttgtcgctggtctatccgcaaaaccgctatctgccgccggcggtgcgcgcgttttatgactggagcaggcgcgttctgcaatccccgctcagcgaggcctga

SEQ ID NO: 269165 - DNA, 930 bp, Klebsiella pneumoniae
atgaaaactgataattttaatcatgcggaaaaggtattggtgcttggagcgggacaactgggcgccgccgttctcgatgcgctggtgcctgcggtaatcgagcgccagggcacggtctcggtcatcgtctcgccggcggcctgggatgaagccggccagctgcggtcggcaaaccatcaggcgctggccgacgccggagccaccttcctcgccgtcgacatcgccggtagcgccatggagacgctggccgatcagtttcgcggattcaccaccgtgattaactgcatgggatttgtcgccggtccggggacacagctgaaaattacccgcgcggtgctggcggccggggtaccccgctattttccctggcagtttggcgtcaattacgatgtggtaggcaaaggcagcggtcagccggtctgggacgagcagtacgatgtccggaccctgctgcgcgcgcagcgggccacggagtgggtcattgtctccaccgggatgtttaccagctttctcttcgaaccagacttcgatgtagtgaatttatccaaccgaacccttcacgcccttggcagctgggatacccaggtgaccgtcacctcaccggcggatattggccgcctgaccacggcgatttatctgcatcagccgcggatcgtcaacgaggtggtgtttgttgccggcgaaacgacctcttaccggcagttggcggataccgtggagcgcgtaacgcagcagacgttcagcaaagccgtccacaccctgcccgccctgctggagcagctgcggacagacccggatgacgccatgctgcgctatcgcgccgccttcgcccggggggatggcgtgtggtggccgatgggcgacacctggaatgcccgccaccagctgccgacccaggacattgccggctggctgcagaccgcgcgctga

SEQ ID NO: 269166 - DNA, 207 bp, Klebsiella pneumoniae
atgaacaagttaattccactgatcgtattgagttgtctgctgcccctggcggcaaatgccagaaccatcaccgccaccggcgataccctggaccatgcggagagcaaaatccgccagcaggccgcccgcgagggcgtgactacctatcgcatcactgaagcgcgaatgggcaacaaagtgcatatcacggcgaaaatcgcggaataa

SEQ ID NO: 269167 - DNA, 879 bp, Klebsiella pneumoniae
atgcgcgacgctctgttcgatctctgccgccggtttgccgttgctcatgtcgatagcagcggggtggcagttaccccggttcccggtattactctggtgcgggccctgcatcctggtgacctgcaggcggctatcgccaggccgctggtggccatgctgctccaggggcgtaagagcgtgaccaccggcctggccagctttgactatggcccgggcgaggcgatggtgatcgccgcggatgttcccactaccagccagatcaccgaggccagtcagcgttttccctattacgcgctggtgctggagctggacctggctatcctgcgcgagctgcaggaggccgggccgtcagggccggatgaggcgccccgcgttggtatcgaaccgatgaacgccgatgtgacggatgccgcttaccggctggcaaggctgtttgatcaaccgggggcgctggcggtgctgggggaaggtctgcggcgggagctgcattactggctgttgcagagtgtccatgggccggccatccgggcgctgggcgccgtagacagccattcggcgcggatccgtcgggcggtggcgatgctgcgccgggattttatgcagccagtcagcgtcgacgcgctggccgacgccgctgggatgagcgtctctgtctttcaccgtcatttccgcgccatgaccacgctgtcgccgctgcagtttcagaagcagttacgcctgatccacgcccgccgcctgatgctggcggaagggatgagtattgcgcaggctgccggggaggtgggctatatcagcgtgtcgcagttcacccgggaatacgctcgcctgtatggcgcgccgccgggccgcgatcgtcgacgggaaaaaatgagcgcctga

SEQ ID NO: 269168 - DNA, 756 bp, Klebsiella pneumoniae
atgactaagattgcacttattaccggcgccaaccgcggccttggccgtcagaccgcactggatatcgcccgccagggtggggatgtcatcgtcacctaccgcggcagtctcgaacaagcggaagcggtggtcgccgacatccgcgccctgggccgcaaggccatcgccctgccgctggatatggcgcaaaccgccagcttcccggccttcgccgacagcctcggcagcgcgctggccagcgtctgggggcgggccactttcgaccacctgatcaataacgcagggcacggcgaattcgccccgctggccgaaacgcgcgaagcgcagttcgacgggctgtttaacgtccacgttaaaggggtatttttcctcgtacaaaccctgctgccgctgctggcagacggcgggcggatcgttaacttttcctccgggctgacccgcgtctcctatcctggcttctccgcctacgccgccgccaaagcggctgtggagatgctgagcgtgtacatggcccgcgagctgggcgggcgcggcatcaccgtcaataccatcgcccccggcgctatcgccaccgattttggcggtgggctggtgcgggacgacgcagaggtaaacgcgcagtttgccgccatgacggcgctgggacgggtgggcgttcccgaggatattgggccgatgatcgccagcctgctacgcgacgataaccgctgggtgaccgcccagcggatcgaggtgtcgggcggacaaaccatctga

SEQ ID NO: 269169 - DNA, 594 bp, Klebsiella pneumoniae
gtgaccactacaaaacaagggcgtactccgggacgtccccgccagtttgatgcggaacaggccattgaaacggcgcaacgcctcttccacgcgcgaggctacgacgcggtgagcgtggccgatctgacccacgctttcggcatcaaccccccgagcttttatgctgctttcggcagcaagctcgggctgtatacccgcgtcctgcagcgctacagccagaccggggccattcccatcgatgccctgctgcgagacgaccagccggtggtggcgtcgctcatcgccgtactgcaggaggcggctcgccgctatgtggccgatccggccgccgccggctgcctggtgctggagggggtacattgtcaggatgctgatgcccgggtggcggcaggcgaatggcatgctgcggcaagagccaaaatccagcagtatatcgcccgccatcgcccgcaggacgcgctgcgggtgactgactatatggatacgctgatgcttggcctgtcggcgaaagcgcgggaaggggatagtctgccgcgtcttctggagaccgtgcggctggcaggcctggcgctggagcgcatcctgccagcctga

SEQ ID NO: 269170 - DNA, 714 bp, Klebsiella pneumoniae
atgacagcgtttcacaacaaatcagtgctggttttaggcgggagtcggggaattggcgcggcgatcgtcaggcgttttgtcgccgatggcgcgtcggtggtgtttagctattccggttcgccggaagcggccgagcggctggcggcagagaccggcagcacggcggtgcaggcggacagcgccgatcgcgatgcggtgataagcctggtccgcgacagcggcccgctggacgtgttagtggtcaatgccgggatcgcgcttttcggtgacgctctcgagcaggacagcgatgccatcgatcgcctgttccgcatcaatattcatgccccctaccatgcctccgtcgaagcggcgcgccgcatgccggaaggcgggcgcattattgtcatcggctcggtcaatggcgatcgcatgccagtgccgggaatggcggcctatgcgctcagcaaatcggccctgcaggggctggcgcgcggcctggcgcgggattttggcccgcgcggcatcactgtcaacgtcgtccagcccggcccaattgataccgacgccaacccggagaacggcccgatgaaagagctgatgcacagctttatggccattaagcgccatggccgtccggaagaggtggcaggaatggtggcgtggctggccggtccggaggcgtcgtttgtcactggcgccatgcacaccatcgacggagcgtttggcgcctga

SEQ ID NO: 269171 - DNA, 495 bp, Klebsiella pneumoniae
gtgacagcgagggaacgtttttttaagaaactgcagcaacagcaaaatccgcggcggacagcggccctcgacgggtcggccgccgcggatatcgccaggtttcgtcagcagatggcggagctggctcagcagataagtcagtggtttgatggaaccggtattgaggtggtgatttcgacccgccatctccacgacctgagtacccttggctacagcctcaacagcggcatctgccgttacgatatcccggccattcgtctgcaaaacggcgagcgcagcgtcaatatcgtgccgcagcagctgttggatggcgtggaaaaggggatcgtgaccctgagtcttgaggcgccagacggcgcgggattccgggaggtgttttatctgagcctggccccggaggagggctggatgatccgcaaggcgcaccagcccccggaagcgcggcttatgcttaccgaagatcgcttttttatggcggtagacagcctggcctga

SEQ ID NO: 269172 - DNA, 543 bp, Klebsiella pneumoniae; identical to SEQ ID NO: 211725

SEQ ID NO: 269173 - DNA, 1086 bp, Klebsiella pneumoniae
atgggaagagaagcacagccgccgcattcccggctgaccccgcggctggaggccgacctgccgcggatcaatttttaccgcttctgccagcttctggaaaaacggcgtcccggccaaccgctgatggggggaaccagccatccggctgacgatccggtgcgtttttacccgcatccgggaatgggatttcccgccagcgaactgaaagccgtggaatacgatgaggccgatgacagcaggccgccggtcattcgcaccacctttatggggttgtacggtgtcgattcgccgctcccgacggcatatctcgatgatatcgcccagcacagggaagggcatgaagcgctgcagggcttactggatatcttcagccaccggatcatgacgcagttttaccgcatctggcggaaatactcctggcccgccacctttgagcccggcggcaccgatcgtctctcgcagtcgctactgggcctggcggggctgggcatccccggcacgacgcagcatatcgcctcgccggcgtcgcgctttctggcgctaaccggcgtgctgcgtcagccgggcaaaacccagcaggggatccaggcgctggtcaccctgctggccccggagaccaccgtcagggtgagcccgtacagcctgcgtccggtggcgatcagccagccgctggggttttacggcgatgacgacttcttcctggacggcaatacgccgctgggtgacgaagcgatggatgccagcagccagctcctcgtcgcccttaccaccgacaatcccgcggaggcgcagggctggaagcctgacggcccgctgtttcgggactttctcatcctgctgcgggtatacctcggctggcgattccgggccaacatcaccctgaccgcgccgacccgactgctggctgtcccgccgctgggggacgagccgttctggctcggtatgaacggcgtgctgggcgtgggtgatggcgagagtgaggacgatattcctcagacctttaccaccgagctgggtacctatacgggcctgcagcctgccacctttctacaaggaaaccgacgtgttacgtataagtttgactaa

SEQ ID NO: 269174 - DNA, 1755 bp, Klebsiella pneumoniae
atggacgatttaaccctgcgttattacgacgctgaaatgcgctacctgctggaagcgggtgaagagtttgcccgcgctcatcctgagcaggcggcaatgctcaatctcgacaaagcgggcgctcgcgacccctttgtcgagcgtctgtttgaaggttttgccttcctgatgggccgcatgcgcgagaaactcgatgacgatctgcctgagctgaccgaaggcgtggtcagtctgctgtggccacattatttacgtaccattccctcgatgtcggtcgtggagttcacccccgactggccggaaatgaaagagccgatgacgatggccaaaggctttgaagtgctttcccggccgatcggtgaaaagggcacgcgctgccggtacaccaccaccaaagcgatcgctctgcagccgttatccctggagcgcgtccagctggccaccgatacggatggccggtcggtgatcacgctgcgctttacctgcagccagctgacggactggcgccgggtcgatctcagtcatatccccctctactgcaacgccgatgcgccgctggcctgcgccatgcacgaggcctttaccctcaatgtggcccggatgtggctgcgcatccccgatgaggtggacagaaggccgctggacgggtatttcagcgcgctgggatttggcgaagatgacggcctctggcctgaagatggccgcagttttcgcggttaccagctgctgctggagtattttaccttccgcgaaaagttcatgttcatcgatctgcgcgggctggagacggtggtttttccggccggactggcgtggtttgaaatcgacgtcgtgctggcggaacgctgggaacatgacttccgtttcagcgaaaagcagctgcgcctgcactgcgtgccagtgatcaacctgtttccgctggagtcggatccgctgaccatcaattccctgcagacggaatacccgctgcgcccgatgcgcgtgcaggacggccacaccgaaatttacaccgtcgattccgtgatctcctcgcaccagcaggtttacgcgccgttctcaagttttcgccacaaaggcggcatgatgcgtcatgacgcggcggactattactatcatacccgggtgcgccgtggcccctccgggctgtacaacacctggcttatcgtcggcggagaagcctttgataatcataccgtaccggaagatgaaagcctgtcgctgaccctcaccggaaccaacggccagctgccgcgtcgcgcgctgcagagcaccgtgctcgatacggtgatgaaaaccacttccgccagtattgcagtgcgtaacctctgcgcgccgacgctgccgtgctatccccccgcccaggaccgttttcactggcgggtgctgagccatctgggcagcagttttctttccctgatggataacgcggaggtcctgcgcggcaccctggcgctgtatgaatggaccgacagcgagatgaatcgtcggcgtctggaagccatcctcgacgtgaagcaccgcgcaacagagcgctttgcacagggccatctggtgcgcggcgtacagattgaagtcaccctcgacagtcacggctttgccggacgaggcgatatatgcctgtttggcgagatgcttagccgcttcttcgcgctctacaccgacatctacttgttcaaccgcctgattatcattctgcaaccaaccggagaacgactggaatgggaagagaagcacagccgccgcattcccggctga

SEQ ID NO: 269175 - DNA, 1593 bp, Klebsiella pneumoniae
atgagcattttacaaaatttggttgccgccagtcagttggatgaaagcgtactgcgccagcaggcccggtcacgccaggcgcagtggcagtcctggcttgcgccaatcagtgacgcccaaccaaccggggacgatccgggctatgacgatgattttcagcgtatccgcgaggaggtcaataagatctccggtgtcgataccgaactgatttgccagctggcagaaaaactgctgactcagacctgcaaggatctgcgcgtgatcaccttttacgtgtgggcgcgtctgcagcgggatggtgaaaccggtctggcggagggcgttacgctactggcggcaatgcttgagcggtttggggctatgctccatccccagcgtgaacgtagctgtaaatcagcgctggaatggcttggcagtcgccggatgtcggacagtctgtctctttatccggaagtcgacatgaccactatgcaggtcattatcggggcgttattgctggcggaagccactttttccggcttggctgaagcatctcgccccgatctttccgggctatatcagatactggagaaccgcctggtgcaaagcggcggagcccacagtctggtgccgcagaccagccgcgaagaacacgatctgctaccccaacatacggacaccgcaccggtaatgcataccgtcacgtcaggtcgtgatttgctcgatcaggctaaggtgctggcgaaatatctgcgcgagtgtcccggcggatggctggcaggtcatcatctgatgaagagtgtgcgttgggatacgttaacggagttaccgccgctggatgcctccggccggacacggctattgcctcccaagcctgagagtaaagcccatcttaagcgtttgtatttacagaaaagctggtcggaactgctggagcatacggacacgctgttggcgcaaggcgtcaaccatctgtggctggatgtgcagtggtacgcctggcaggcgctgctgaaactggatgctgacagtgtacgggccgatatcctgtgccgggatatgaaagggctattggctcgtctgccggggctggaaaccctggcgtttaacgatggtacgccattcgccgatgaagtgacgctcaactggcttaacgaacgtgtcctggatgagatggccggatggcaagatgagccggtaatggcggcgaccagcgctgatgaggtgctgtcgctggagccagaagtgctcacccgcgcggacgatgaaggtattgagtcggcgctgaactggttacaggcgcagccgggctataccaccagccgcaatcggtggctgatgcgcttactgatggcgcgggtcagcgagcagtacggaaaaaatgaaatggcgctgcatctgctggcggaactcgacagccgcgcccgggaaatgacgctcgaacaatggaagccggagcttatctttgaggtcaaagcccgccgactccggctgctcagaggcaaggccgggcgcagtgaggcagaaaaaaatcgcttgctgccagaaatggagtcattgcttgccgggctcatcgctctggatcctgctcgcgccgcggtgctgtgcgcataa

SEQ ID NO: 269176 - DNA, 3447 bp, Klebsiella pneumoniae
atggaaactgataaggacaaaaaccagacccaggaaatttctgccgggatcactgtactgcttattgctgtggcagtaacgctggtgatcatgctggggggatttgcatactggttgattgccggagagcgttcgacggaatggtcagtgatttctccagttctgcttgtgtgcagcctcctctgggtcacacttgcctgcgtgatcgccctggctttccttgccgttcatttttggatcatcagtcgggccaaacgaacgactgcaatatcacagacaaatgaagccaaaaagaaggccagggaaaagcgcctgacgctcgccagagacattggcaccgcgctgcgcaaacgctactccctcttctggcggcgcaaggtccgcctgctgctggtcaccggcgacgaggcggcaatcgaacaactggtgcctggcctgcgtcagcagcactggcttgaaggcaaccgcaccgtgctgatttacggcggcagccttgcatcggagcctgaccgagaaaaatacatcgcgctgcgcaagctgcgccgcggtcgtcctctggacgggattgtgcgggtgatgccgtcgtctctgaccctgacgccgcagataagcgagagcgacctgcgtgggctggaaaaaatcagcgaactgctgggctatgccgccccggtctggttatggaaactgtgcgacagtgagtggccgcaggctgaccgcgcggtgcaggcggtaggggttagcttcccgttgcgcgccactgaggaagatgtcgcccgtcagcttgcgcagatgttgcccacgctacgggagcaggggatgcaccagatcgcagcagatacccgccacgacttcctgctgcgtctggggcagcagcttatcgacggggagatcgcacaatggcgccggcagctggcgccgtggctgaccgcctcgcggcagcggcttgcgctgcgaggcctgatgtttagcctgccagagcctcgtaccgtagatccgtatcaggagacggatacctcgcctgcgggccagcctcatctcctgacgctgcccgccacctggcaggggatcgtcgatgactgccgccgtttacgcgggcatcacgtgggaatggcgtgggagcagggcctggcgtgcggtctgctggccatcctcggcctgtgggcggcgggactgctgctctcctttgccctcaattacagtcagattgcttcggtagcgggaaaagcccgcgacctggtggcccacccctccgtttctgactatcaactgacggccctccatgccctgcgcaatgaggccggccgtctcgtgcacgatgggcagaagggagcaccctggtatcggcgctttggtctggaccatcatcagcaactattaaacgccgtcctgccctggtacggtgtggcgaatcatcgcctgatacgtgacccggccaatgccgcgttgcagcaggcgctcagcgcgctggtcaactccgcccccaatagcgaccaacgagccaggctggcgaaaccgggctatgaccagctgaaagcctggctgatgatggctcgtccggataaagccgatggcgcatttttcgcgcagaccatgaaaacggtccagccgacgcgaatggggatctcgaccggtctgtggcaaagtctggcgccggatttgtgggccttttatctctccctgctgcccgagcggccagagtggaagatcatcccggatgcgcaacgggtgagtcagagccgtcaggttctgttgcagcagctaggtcgccgcaatgccgaaagcaccttatatgagaacatgctcaaatccgtgcgtcgtaattttgccgatgtgtcgctggaagacatgaccagtggcaccgacgcgcgccgcctgtttaccaccgatgaagtggtcccggggatgtttacccgccaggcatgggaaggcggcattcagcaggccattgataaggcagccagctcgcgccgggaggaaatcgactgggtgctgagcgattcgcgcaaaacggtgtcgacagacctgtcgccggaggcgctgaaagcgcgtctgacccgacgctacttcaccgatttcgccggcagctggctgaattttctcaacagtctgcgacttaatccggcgatcaatatcgccgatgttaccgaccagctcacgctgattagcgatgtccgccagtcgccgctgattgccctgatgaatacccttgcctggcaggggcaggcggggcaacaaagggaggggctttcggacagccttattaaatcggccaaagatctggtgggcgggaaagacaagccggtcatcgaccagtcggccgccggcccgcaggggcctctggatgacacgttcggcccactgctccagctgatggggaaaaacacgggcagcaacgtcatgtcggccgatagcaccctgagcctgcaaacctatctgacccgtatcacccgcgtgcgcctgcgcctgcagcaggttgcgaatgcctccgatccgcaggaaatgatgcaggtcctggcgcagaccgtcttccagggaaaaagcgtcgacctgaccgacacgcaacagtacggtagcctgatttcggcaagccttggcgaagagtggagtggcttcggcaacactctgtttgtgcaaccgctgacccaggcatgggaaaccgtgcttctgccgtcggcggccagtctgaatgacaaatggcgccgatcggtggtcgccaactggcacaccgcctttgacggacgctttccgtttgccgccagcaaaagcgacgcctccctgccgatgctggctgagtttgtgcgcaaagacagcgggcgaatcgaacgttttctcacgacggagctgaacggtgtcctgcataaagaaggcagtcagtgggtgccggataaggtcaacagtcacggcctggtctttaatccggcctttctgcgcgcgatcaatcagctaagccagctgtccgacattcttttcaccgacggcagccaggggatcagctttgagttacaggccaggcctgccccggaggttgtcgagacacagctgacgatagacggccaaaagctgcgctatttcaatcagatggccgactggcagactttccgctggccgggggagacgtataaacccggcactctgctgacctggaccaccgtcaatgcgggcacgcgtctgttcggtgactacagcggtacctggggctttattcgctggctggagcagggtaaacgccatccgctggatcgcagccagtggatgatgagcttctccgctccggatggccgcaccctgcagtgggtattgcgctcccagcttgggagtggcccgctggcgcttctggcgctgcgcggattgaccctgccggatcagattttcactgtcgatgcggctgagagcgcacaggacctgacgacgggggtagggaatagtgacatggatgagatggaataa

SEQ ID NO: 269177 - DNA, 1182 bp, Klebsiella pneumoniae
atgtggttgcacgctggtgagttccaaccccgattgcagggttgcgcagtgagagctattcctacatttcctcgctatcgtcttgcgaaaccgccagttgcaaagcgctggttaggaggaggtgccgctctggttttgctctctggtatcatcgcggcaatggcagggaaatccggtgccaataccagtatcattcttttctgcatggttggaatggtattacttggcggtgttgtctggtttgtacgcacaatcttttttcgcctttcagttcatcattcacatacctgggagcgcgaagcagaaaatgagcgcaggcattggtgggaaatccatcggcgtcagtttgccctgaaagatattgtcctgattggcccggcaggcgctgaactttctgactggctgcgtgtgattaagcgagagcatcaggctccattagtcaggcaggaatccctggggaaatcgttgcgtattgccagaagtttctcttctgctcttattgaacgtgaaaaacaactggctcaaatgctggtattgcaatggaaaaggcagcgaggtaaggaattattcgtttctccggagaaatatttctggcaggggagccctgaagcctggcaagcctttgtggcacagctcattgagagttttccgggaattacagctcctgaattacctgagttatggcaaggggagaaaacattatccgtactggctaatgttcttgcggacaagaaacagctggctaattttttgattgccgggtgccagtctttatctcctgcttctgactctactcgtcctgccggtgaatgcgcagtactgtggctggctggaaaccagggggacgtcacattatcccgtggtgaattttttgagccttctgatagtgagtccctgcggcacgtcgccttgcgagccgaaaaacagagcgaacttaatgagtcgcccgaacggtgcattctcttctcacacccggagaaacctgaactcgccgattgtggctggaatgtgacccacaatatccaggatgactactggggcgatcctggaaagcttgatgcgctggttgtgatatcgctcgctgcaattaccgctaagagtgaagcaaaaccctgcggctggatagcgtcagacccccttcatactttagctcttgggatcgtaaaaccacatggaaactga

SEQ ID NO: 269178 - DNA, 258 bp, Klebsiella pneumoniae; identical to SEQ ID NO: 235241

SEQ ID NO: 269179 - DNA, 2406 bp, Klebsiella pneumoniae; identical to SEQ ID NO: 235242

SEQ ID NO: 269180 - DNA, 531 bp, Klebsiella pneumoniae
atgaaatctccctttctctttttagttacagcggtattgctgttaacgggctgtaaccagcctgctgaatctgactcagtcagcggcggtggcggaaccattgaagccatcaaccatacccactgggccatcaaccactttagtgtcaacgggcagtccggtgtcgatattatcggcccgtggcagggaggaggcggtgcgggttactttggtgtgcctccaaaatgggaaccgggaatgaccgttaaaattgactgggaaaccggtgttggcgatatggatggttttcctggctttggtgacgatgaaaaactccttaattggtatagaaaaatgaaattgttaaaccgggaacatagcttgatagtacctgttcctgattataacggccaaaaaacctgcggcatcaaaatacactttctcccgtgcgacaaagtaaaagtgacaaccagttgttacgattacggcaatccgaattacccgattaaggatccgattaagatggaggagcatgaagtatgtccaaaataa

SEQ ID NO: 269181 - DNA, 531 bp, Klebsiella pneumoniae
atgaaatctccctttctctttttagttacagcggtattgctgttaacgggctgtaaccagcctgctgaatctgactcagtcagcggcggtggcggaaccattgaagccatcaaccatacccactgggctatcaaccactttagtgtcaacgggcagtccggtgtcgatattatcggcccatggcaaggcggcggcggtgctggttactttggtgtacctccaaaatgggaaccgggaatgacggtaaaagtcgagtgggagacaggtgttggtggttcaaaaggttttcctggatttgcagatacgaaaaaatatttggcatgggaaaaaaaaatgaaatctcaaaatcgagagcatagcgaaattgtgcctgttcctgattataacggccaaaaaacctgtggcatcaaaatacacttccttccgtgcgataaggtaaaagtgacaaccagttgttacgattacggcaatccgaattacccgattaaggatccgatcaaaatggaggagccaaaagtatgtccagaataa

SEQ ID NO: 269182 - DNA, 429 bp, Klebsiella pneumoniae
atgaatttccagcaaacctatttatactggctggccggcgcggtactgctggtcgtggctatcatgtcctggcgcgacaaaagcaatccgcggcgtctgacaaccggtctgttctggggcctgtacgggctggtgttcttgctcggcgactggacatatcaactggtgggcgataagcgtacggtgaatatcgctgtcggcggggtggtggtcgtcctggcgctgatcgccggttttggcggcgtgcgcctcggcagctaccatcagcgtacccgggagagaaaaccgccagcgcgaaacgcctcggcaacaaacttttctttccggcgctggcgattccggtcgtcaccgtcattggcgtactgctgtttaacaatctgccctcatggcaggtggcgctcttcggaccgggcaaccacgcgacgctga

SEQ ID NO: 269183 - DNA, 918 bp, Klebsiella pneumoniae
atgggtctactggtgtcgttggatgttctgcttgaagaggccaacgtcactcgtgcagcacgacgcttagccatcagccagcctgcactctcagcccaactggcccgcttgcggcaggtgcttgatgatcctttgctggtgccggccgagcgcggccgaggtatgcggttgacgccacgtgcagcgcagctgaaatcacccctgcatgagttgctgacacggcttgaggatcttgtcgaggcgccctacgctttcgatcccagcacggccaagcgcgatttcacgatcgccctcaatgacaatgccgcgatgacgattggactggatctcatcgagtgcattcggaagcagtcgtatgcaggcattagattggccatgctccagataccccgggatgaggtcctggatcttgcagctcgcggccgcatcgacctggtgatcggcacccgagccttcatgccccctggtttgcgcacccatgatctggtcgacgacaggtttcaggtggcccaacgcaaagggcatcctcgcggcacggctgcaatgacgctggagcaatactgcgcttatgagcatgtgctggtgtctaccaatggcagttatcacagtgggatcgatgattttcttgcagagctggggcattatcgacacaccacggtatccgtgcagtactacacagcggtgccaccgatacttgagcgcacgaactgcctggcgacgttgcctgagcgcttcctacaccgctttgatcacatgatcgaccgcttcgaactcccattcgcattcgatccgttccagctgcaggtcggttggcatccgcgctttgacgaagatttagggcatcagtggctgcgtgaacagctgattgcggtgaggtctgttggtttccacgcagaactgagccagttaggcagataa

SEQ ID NO: 269184 - DNA, 393 bp, Klebsiella pneumoniae
atgcatacctatgaaacaaagcttgctttggccaagcagtttcatgccgcactgacccgccgcgactggcaggcgatccgtaagcttcttaccgacgatgccacctgggttctgcccggagacaatcagatctctggtccagcggtcggtgcggaagcagtcgttgccagagctgagctaattgccagcttcggcctgaatttcgagctcaagcacattctggtaagccgggataatgtcgcgctctcgctgcataacactgcacgccggaatgacctcgtactggacgagcatctggctacggtctgcaccttgcgcgatggcaagatcgctgctatcgagacctacctgtccgacctgccgggcatgaatgccttttttgccagggactga

SEQ ID NO: 269185 - DNA, 213 bp, Klebsiella pneumoniae
atgggcatcgtgaacatcgacgacgatctgcatgaccaactgcgcaaggcgagcgcagtatcgtgccggtcgatcaacgcacaggcagccttctggatcaggatcggcatgctgtgtgaaatgaatccaacgcaaagcttcaacgatatcgttgctcgtgaactgcgggccgcgggcgttgtggcgcaacccatcaagatgggggcgtcatga

SEQ ID NO: 269186 - DNA, 768 bp, Klebsiella pneumoniae
atgaccaaacggccagaagaaatcgcgctgatggcggagtcaggccagcttttggcacaggtgttcagccatcttgatcggctgaatctgattggcatgtccacgatgcaggtcaatgatctggtcgatgacctcatcgtccatgaattcaacgcacgcccggccagcaaagggcaatacggttacgcctacgcgctaaacgcctcccgcaaccatgtggtctgccacggcgttccttccgccgaggacatcctgcaggacggggacatcgtcaatttcgacatcacgctggagaagaatggctacatcgccgattccagcaagacctatctggtgggccaggtgtcgcagccggcacggcggctcgtgcaagtggcttatgaagcgatgtggaaaggcatccaggctgtccgcccaggtgccacgctcggtgacgtgggccacgccatcgagcggcatgcccgcaggaatggttattcgatcgtccgggaatactgtgggcacggtatcggtcgtgaaatgcacgaggacccccaggttttgcactggggcaagccgcgaacggggctagtactgcgcgaaggcatggttttcaccatagagccgatggtgaaccaaggacgacgttccattcgaactgaggacgacggctggacggtggttacgcgcgatgggcaattgtcggctcagttcgagcataccgttgctgtcaccgggaacggtgtgcgtgtcttgacgctgcgcccgggcgaaaaggcgttgcactga

SEQ ID NO: 269187 - DNA, 255 bp, Klebsiella pneumoniae
atgccacaggcattatcccctaacgctggcccactgttgctccccaagcatctgtgctacatcgagcatgacggcgctggtcgcgatggcgaaccgagccaagcctatggagcacagaccgataaagttgacctcaaagtcttcaaggagcggacggccgacaatcggcacaatttctgcttcaacttctccctgaaggataacaccaacccggacggcctgcccacctcggggctattccaatttcctgggtaa

SEQ ID NO: 269188 - DNA, 789 bp, Klebsiella pneumoniae
atgaaggtcgaatcgaacagcatagagatccatgtcgaggagcaagggcaaggcgatccgtcactcgtttttctgcattactggggcggctcctcccgcacttggaagcacgtctgctccaggctggcgccgaacttccatacgcttgctctcgatcatcgcggctggggtcaatccgacgcgccttcgatgggctacgggctggcagaccttgcagccgatgcagagggcgtgattgcagcgctgcacccgaagcgctacgttctgatcggtcactcgatggggggcaaggtcgctcagcttatggcttcgcggcggcctgccggactggccgggttggttctcgtcgctccttcaccgccatcgccaatgatcttgccgaaagaggcacgcgaaatgatggcaggagcctacgcaaaccgtgaaacagtggaggcgactatcgataacgtgctgacggccctcccgctgtcagcggaggatcgcgaacaagtgatcgcggacagcttgcgtggcgcgccagcggctaagctagcttggcccagagcgaccagcttggaagacatcactgggcaggtaggtgccatagacgtacctacgcttgttattgcgggtgagctggatcgcgtggattcgcccgaggtactgaggaaagaattacttcctcgcatatcgcaagccgtcatgaccgtagtaccaggtacagggcatttgtccatgttggaaacaccggatgcattgacaccattgattgagcatttctgccgttcgttgcctgagagggggtga

SEQ ID NO: 269189 - DNA, 927 bp, Klebsiella pneumoniae
atggatagattgctcagcatggcggtgttcgtctccgcagtcgaagaaggcagcttggtaagcgccgctcgacggtttggcctgtcaccgtcgatggcgggcaagcacgtttccgcgatcgaggaacagctgaaagttcggttgcttcaacgcagcacgcgcaagttgacgctaacggatgtaggaaggtcctactacacgcgatgcaagcgcttgctggaagaatatgaggacgcgaaccgcgaagcccaggacgcgcaacagagtgtgcatggaattttgcgcgtggctgcgccgacaacctttggggcactgcatcttggtcgtgttgtatcgaattatctggctgaataccccgatgtctcgatcgagaccacgctgagcgatcgctatgtcgatctactggcagatggcatcgacgttgctatccgcatcggccgtctgcaggactccgacctcgttgctcggcggctcgcctcgtgtcgcatgatgttctgtgcagccccatcctttttggcacgacatggcgagccgaaaaccatcgaacagctccgccaggcacctcggcttgctttctcccaggcggtttcagccggagactggagcgttacggatgctaacggccagacatatcacattgatggtgagatccggctcgctgcaaacaacatgcagatgctgctcgcggcagcgctgacaggggcgggggtggtctacggccctagctttgtgttcgagcagtccatcgccagcggtgcgcttcgtgtcctgctgcctgaccacaaaacaaaggatttggcgattcatgccatctatccgagcaagcgccatgtgtcgttgaaagttcgccgtttcatcgagcatctgagcatgagcttcgacgacacgcagccgtgggatctcatgcataggagcactacggcttga

SEQ ID NO: 269190 - DNA, 1407 bp, Klebsiella pneumoniae
atgggacaggcacagctacgacttttcagcccagccgatgaggcgggttgctatcacgacacagcccggcagggctttttctcgttgctcatggcgacgtgcgagggcagcggcaagaagcaggacagttaccggctgtcacagatgcccgtggtgctctccatgctcgaccacagccgggatacctggctgtctcaggctgagttcatcaagcccaatcgccgcgtggtcaacttggcccgcatcggcttgctgttcgccgatctggacacctaccgcgagccgtgggcgcaggggcgcagccccgagcaactggccgccgctgtcatgttccgctgctacgacgaaggcgtgccgccgccgtcgatcctcgttttctctggccgtggcgtgcaagcaaagtggctgctggatggcaccttgccgcgtcaggcgctgccacgctggaatgcctgccagcgttacctgatcgaccgtctggccgggctgggcgctgatccagcggccaaggatgcaagccgcgtgctgcggctggtcaatacggtgaacagcaagagcggcgaggtttgccgcgtcatccacgttgagcaaggcccggacggcgagccgatccggtacaacttcgagtatctggccgaggcgctactgccggtggcccgctgggacatcgaggccgaccgcaaggcccgcgccgaccgtcgccagttcaagctgctgccgggcggccaaaccggcaacctgcgcacgctcaacgggcggcaactggcgtgggatcgtctggaggacttgcgcacgctggccgcgctgcgcggcggcgtggccgagggcgagcggatgcagcacctgttttggcggctgaatttcctgctgctgtcaggtgcgacgcacaccggccagatgtaccacgaggccgccgcgctggcccgtgagcttgacccacggtggaactaccgcagcgccgagcttatgacgctgtacgccaaggccaaggcccacgaagccggggaaaaggtggagttcggcggcaagcagtttgcgccgctctacacgcccaagaacgacacgcttatcagcctgtttcacatcaccgacgacgagcagcgcaagctgcgcacgctcatcagccgggacatggccgcagagcgccacagcgagcgcgagaaagcccgcagacgtgccgctggggctgtcgatcgtgcttcctatctggaagcagccagcgccaagcaggcgcaggctttggccctcaaggcgcagggtctgagcgtgcgggccattgctgcacagatgggcattagcaagaccgctgccgggcgctacatcgcagagccgggagagtgtcccaagtccatgcgtattactaatggcgaagcctacgcccggcgcgtagcgcctgcctttgagtag

SEQ ID NO: 269191 - DNA, 387 bp, Klebsiella pneumoniae
atggactatagtccatacatttttgatttggcgaaatttaataatgttgatgaaatacggcgcgtggggtataaagtgatggttgaaatggaaccgttgagtctggaggtactgccgccctctcatttcaaggcgtttgcgaagaacgcaccgcatgagatcaagggcgctgtcatcgagaacacagagcgcgggctggtgatcgtgctgcacgttggcaacgagcggcgcattctcggccagtaccggggaggcatccggttttttcgctctttcgatggcgcggcggcagtgctgcggcagcatggcgtgctgcactggacggcgaatgcaaaaggctggattccgcgaactttggaagcgaaggagcggagttcagatggatga

SEQ ID NO: 269192 - DNA, 222 bp, Klebsiella pneumoniae
atgagtagcgggaaacttggcatgaaagcaggccgcccgagcgccgcgaaggctggccctaccttgtccgaccttgccgacaaggccgccaccgtccgggtgaatttcgacctcgaccgggccgagcacacgaagctgaagatttacgccgccaagaccgggcgcagcatcacggacattctgcgcgaactggtgcgctcacttgatgaaaagagtgattga

SEQ ID NO: 269193 - DNA, 639 bp, Klebsiella pneumoniae
atgcaagtcattgctgtactgaaccagaagggcggggcgggtaaaaccaccatcgccacccaccttgcccgcgccctgcaactcgacggcgcagacgtgttgctggttgattctgacccgcagggcagcgcccgcgattgggccgccgtccgcgaggatcaacccgtgcccgtggttggcatcgaccggcccaccatcgagcgcgatctaaagagcgtggcccggaaagactttgttgtgatcgacggagcgccgcaggctcatgacttggccgtgtcggcaatgaagtccgccgattgcgtgctgatcccggtgcagccgtcgccctacgacatttgggcaacctctgacctcgtggatttggtcaagcagcgcatcgagctgaccgacggcaagctaaaagcggctttcgtggtgtcccgtgcgatcaagggcaccaagattggtgcggaagtctccgaggcgctggccgggtacggcctgccgatcctgcaaacgcgcatcacgcagcgcgtcatctacccgagcagcgcggccagcggcaccacggccattgaccaagagccgacgagcgaggccgccgaggaaatccgggcgctggctgaggaagtgcgccgtttcctcaattgcaccatttga

SEQ ID NO: 269194 - DNA, 249 bp, Klebsiella pneumoniae
atgatgacaaccacaactgaagcgctttcagaggttttacgcgggtatggacgcgccgatgaaactgcattggcatcactgctggaggtcagcgactgggagcgcatcgcccggcaggagcttgagcgccgggctaccagcatcgtgcaggcgctggatgatgcgacccttgaggccatcgcagcgggcacgctcgacatgctggccatgtgccgacaggtggccgacgagatccaccaggccgcctaa

SEQ ID NO: 269195 - DNA, 981 bp, Klebsiella pneumoniae
atgacccaggcactgcacagccaagcccgtactacccacctgatccgtgaggaaatcaggaactcgacgctcccgcaggccgaactggccaggatgtacaacgtcacccgccaaaccatccgaaagtggcaaaaccgcgagtctcctgaagacaagtcgcatgcgccgaacaagatgtacacgacgctcacgcccgagcaggagctcatcgtggtggagctgcgcaagacgttgctgctgcccacggacgacctgctggcggtcacgcgcgagttcatcaatccagccgtctcgcgtgccggcctgggacgttgcctgcgccgccacggtgtctcggatctacgtaacctggtcgagcaggaaggcactgcgcccgccacgaaaaagaccttcaaggactacgagccgggctttgtgcacatcgacatcaagtacctgccgcagatgcccgacgagacggcaaggcgctatctcttcgttgccatcgaccgtgctacgcgctgggtcttcatcgagctctatgccgaccagaccgatggcagcagtggcgacttcctcaacaaagtccagcaagcctgtcccgtcaagatcgtcaagcttctgaccgacaacggcagccagttcaccgaccgcttcacggctggcggcaagaagaaggaacccagcggcacacacgtgttcgaccgcctgtgcaagcagctcggcatcgagcaccggctcatcccgcctcgtcatccgcagaccaacggcatggtggagcgcttcaacggtcgtatcagcgacatcgtcaaccagacccgttttggttcagctgccgaactggaatcgacgctgcgcaattacgtcaagatctacaaccacagcattccgcaacgcgcgctccaacacaaaacacccgttcaggcgctcaaggaatggcatgaaaaacgccctgaattgttcaggaaacgcgtgtataaccagccgggtcttgacatatag

SEQ ID NO: 269196 - DNA, 156 bp, Klebsiella pneumoniae
atgaatacggatattgtatcacttgcaaaacacattggcgacgctctgacggcccgccgccccgttcatatgccgcgcatgaagatgcgggagcttggcttgctcttgattgaactgaaggcgtatcgggaggccgccgcgaccgttacccattga

SEQ ID NO: 269197 - DNA, 426 bp, Klebsiella pneumoniae
atgatgcaaacagaacttaatcccctgatctgctccctggtcgccacccctcgccgtatggctgcaatgccccgctatgtaggccgtttctatgtggttttcgagtcgatgctttaccagcaaatgaaagggctctgccgcgagtatcgcggggcttattggcttatgtgggagctgtcgaacggcggcttttatatggctcctgggcgtcgtgatgaaatgctgaacatcgaggccatgaactactttagtggccaaatgagcgccgatgctgccgggattaccgcttgcctctacctctatagccatctgtcatttcacacagaaggcgctgaccaggagcggttttcaaggctgtatcacagcttgcgggattgggcttgtgagcatgacgaaaaagaggccatcttggccgcaatagactag

SEQ ID NO: 269198 - DNA, 279 bp, Klebsiella pneumoniae
atgatccacacagctaaccgcacctttcaccaactctatcgagaatggatacgcgaacgccgcgagcatatgcacaacgttttgacctgggagcgtgatcgttacggtgctcgcctcgtcggtctgttttatcgttactgcaaggtggccaacccctttccccgttgcactctgaatactcggatcaactaccgcgcccatgcggtgaatctgccagattggccagcccgcagcctggagctgaataaaatgtggctcagttggagagaaaaaaagtag

SEQ ID NO: 269199 - DNA, 561 bp, Klebsiella pneumoniae
atgaggcatcttttctggcgtcttaactttctccttctctccggggcaacaaacagcgcccagatgtaccatgaggccgccgctctttcctccgagctggatactcgttggtcttaccgctccaaagagcttatgacgctctacagcaaggcgaaatcctatgaggctggggaacgtgtcgagttcggcggaaagtcgtttgcaccgctatacacgcccaaaaacgacacgctgatcaacctattccagatctcacagcaagaacaagagcaactgaagacgattatcagcactgacgaggctcagaagcgccgcagagagcgcgatagactgcgtgatgaagaacgtcgccgcgccgctggccagcttgagcgtgaagcctatgaagccaactcattgagcaggcaaaagccctgggaagctatgggcatgagccgggctaaatggtatcgcctgggcaagccttcacctcaacaaaacagtgagacaagtccctcccctattactaatggcgaagcctcagcggttgcccttcaggcggccaggtgtaaagccgtttag

SEQ ID NO: 269200 - DNA, 423 bp, Klebsiella pneumoniae
atgagcggcgacgacaagcagcttgagcttgaagccctcgccgccgtgggcgaaatgctcttgttcgaccaagccagaggcaacccggaagaagccgcccgcatcctgcgatgtgcgcggctttttgctcgttcagaggatgccgcgcagcgtctcagcgagctatgcaacgaggcgggcagtgatgcgacttggcgcgaaaacatcgtggaggaactgcaagaccgagaggacttgcaagccgccgaggcagcgatggaagcccgccgacaggcccaacttgttgcgcaagcggatagtgccgacacggccttgcagaccctaatggacgaggtagcggcggacaccttcggcagtctcgatgaaggatatgcggcacaggcgcaggccgaggccgtgaaggcgtggcagggcaggcagtga

SEQ ID NO: 269201 - DNA, 321 bp, Klebsiella pneumoniae
atgccgacgaaagaaagcaatatcgtgaagcgaactcttgacctcaagaagccgccacagttgagcgccgagcagaaggcgcgactggatgccgtggcctcgatgccggatgagcagatcgactatagcgatgcaccctatctgcctgatgctgtctggatgaaggcagcggagcaattgccccacaccaagaagcaaatcacgctgcgcattgatgccgaagtgttggagttcttcaagcacaccggcaagcgttatcagtcgcgcatgaatgctgttttgcgctcctacgttgaggcgcacaaggcgcacgcgaaatga

SEQ ID NO: 269202 - DNA, 279 bp, Klebsiella pneumoniae
atggaacttgaatgggacgccgataaagcggcacgaaacctgaaaaagcacggcgtttccttcgaggatgccgagcttgttttttacgactccgggcgggttgaagcctacgacggacgcgaggactacggggaagatcgttgggcaacgattgggcttgcctactcggctgtcctgtatgtggtctacaccgtccgacacgaggaaaccatccgccttatctctgcgaggaaagcaaatgccgacgaaagaaagcaatatcgtgaagcgaactcttga

SEQ ID NO: 269203 - DNA, 192 bp, Klebsiella pneumoniae
atgccaagcgccgcagaatttcaggcgctgtccgatgagttgcggcagcttggggcggtgatcgtgcaggctgcgaacctgggcgatcaggagcttgcattgtgggccgtgggggcgctgtcatccgcagccgcccggcctgcatggtgggcgagagaggccgcagacagcgaagctgtgggatgcaaataa

SEQ ID NO: 269204 - DNA, 912 bp, Klebsiella pneumoniae
atggcacgtcagggcatcacttttgagcaggtcgccgccgtcgctgatgcgctggcaggcgagggtcagcagccgaccatccgggcggtgcgggagaagctgggcgacaccggcagcccgaacactattcacaagcacttgaccgcgtggcgcgaggcccgcccggtggccgcagccgctgcgccggaactgccgcaggcgctgaccgctgccattgccgccgagatcgagcgggccgcatcgcgggcacgcggcgagatcgagggccgtctggtgcaggcgcaggcggaggccgccgaactggccgccgctggcgaggtgctggaaggcgaacgcgacgagctggccgagcaggtggccgtgctgaccactgagcgcgacacgctggcaggcaaagccgcccagcaggccgccgacttggccgaggcgcagcagcgcatcgagcgcgagcagcaggcggcagagtctgcccggctggaggtggcaaccgcccggcacaagatcgaggcgcaggccgagcgcgtgagcgagcaggccgccgagcttgagcgcctacgcgccgcactggccgaggcacagcagggccgcaccgccaccgaacaacaggccgccgtgctggccgccaagctggaggcgtgcgccgaccgtgtgagccgcgcagaggcccgcgccgagcagatcgagcagcaggccgccaaggctgcacaggcccacgacaccgcccgcgccgcagcagcgcaggaaacccggcagacgcaggccgagcgtgacgaggctcgcaaggtggcagcagaggcccgcgagcaggccgcacgacttaccgggcagcttgaggcgctgcaacggcagcaggacaaagccgaggccgccgagaaggccacgaaggcaccgaaagggaaggggggcgagtga

SEQ ID NO: 269205 - DNA, 162 bp, Klebsiella pneumoniae
gtgcggctgaatgtgtccattggtggcggcggtgttgagctactggcgaccgggccgaagtggtacgacacgcggaaagagcagggcggcggtgccatcgacctgaccatgcacctgttcagattgtcatttgtggatgcggtcaaacggctgtcgccttga

SEQ ID NO: 269206 - DNA, 399 bp, Klebsiella pneumoniae
atggccacagagctgaccattggcaagctggcagacgccgccggggtgaacgtcgagacgatccgctactaccagcgacgcgggctgctggatgaaccagccaaacccttgggtggccatcggcgctatccggtggacatggtgaagcgactgcgtttcatcaagcgggctcaggcgctgggtttcacgctctcggaagtcggtggactgctgacgctggatgagtcgtgcgcctgtgccgaaacgcgagcacgggctgcacgcaagctcgcgttgatcgagcagaagatggccgacttggtcgtcatgcagcaactgttaggcgaactggtgcagcaatgtgatgcgggagacggcggaacgatctgcccgatcatcgaggcactgatcagagagtaa

SEQ ID NO: 269207 - DNA, 177 bp, Klebsiella pneumoniae
atggggatgcaactcaccgggaaaggctcgctggtcgcgagttcgctgaccgccatcggtgcgtcggtgtgctgtgtcgggccactggtgctgttggcactcggtgtcggcggtacgtgggtgggcgctctgaccatgatggggtcgcttcagaattcggaaattaaagcacgttaa

SEQ ID NO: 269208 - DNA, 216 bp, Klebsiella pneumoniae
atgatggagccactacgccccctcttcatcgggttgactctactgttcctgggattggcattccgcaagctctacctggtgccacaggtttgtacgccaggtacaccctgcgccgatccgcgcacgctcgtgcgacagcgactcgtgttctggatcgtcagcgtgctgctgctcggcctattggccgtgccgtggctcgccccgctgttctactga

SEQ ID NO: 269209 - DNA, 276 bp, Klebsiella pneumoniae
atgcgcaaactgctgatcgccgtgcttttcgccttgcccttcgtggcgctggcggctcccccgaaaaccgtcacgctcgacgtgcagaacatgacgtgcggactctgtccgatcacggtcaagaagtcgctggagaaggtgtccggcgtgagtgacgtccaggtcaatttcgaccagaagacggcgaccgtcacctacgatcccgataaggcccagcccgaggcactgactgaggcgaccgcgaacgcgggatacccctccacagtgcagaagtga

SEQ ID NO: 269210 - DNA, 213 bp, Klebsiella pneumoniae
atgagcgccattgtccttgagtccgtgctgacttgcccgcgctgcggcttcgccaagccggaaaccatgcccacggacgcctgccagttctattacgagtgcagcaactgcaaggcgctgctgcgccccaacccaggggattgctgcgttttctgttcgttcggctcggtgaagtgcccgccgatccagcagcagcttgggtgttgctcatag

SEQ ID NO: 269211 - DNA, 2529 bp, Klebsiella pneumoniae
atgccggtcggttttctgactcaagagcaacgcgacggttttggccgctatgttgattcgcccagccgtgaagagctggaacgttacttccacctgagcgatgaagaccgtgaagccatccaggtgctgcggggtaaccataaccgtctgggttatgccgttctgctgaccaccgtccgcttcgttggcgttctgccggacaagcccgccgccgtgccggtggaagtcctgcaggtgctttgccgacaactggcgattccagaccccgactgcctccagcgctatagcgatcatcgccgctggatacatgccaccgatattcagaaccgctttggctatcgtcatttcaccgatccgggcatcggctttcgcttgagccgctggctgtatgccctctgctggacgggcaccgaccggccgggagtgctgtttgagcgagccacctcgtggctgttcacacagaaagtcctcctgcctggtgtgtctcaactagagcgctttatcgcccagttgcgcagtcgggtcgaagaacgcctctggtttacgctgggccgcagcgtgactgaggaacagcgattgcaactgcaagacttgctgacggtggccgaaggcaaccgcagctcccggctggatcaattgcgctccggcccggtcatggtcagtggccccgcgttgattcgggcactgcgccggctcgatgacgtgcgcggcatcggcatcaccttgccggcggcggcgcacatccctcccagccgtatcgccgccctggcccgcttcgccaacacggccaaggtcaccgcgattaatcggctgccggcgtcgcggcggatggcgacactggtggccttcgcactctgcctggaggcgactgcgcacgacgacgcactggaagtcctggaggccttgctgcgcgacctgttcagcaacgcggagaaggccgacaagaaagcccgcatgcgcagcctgaaagacctggatcggtcggccgcgacgctcgccgccgcgtgcaaggtcgtgctggacagctcgatcagcgatgacaacgtgcgcgcccggctgttcaacgacctgccgaggaccaccctggacgccttgtccgtcgagctggatgcaacctggctggcagtagccgcgcgcctgcccgacaacccggcgattcaactgagcgagaacaccgagggcaagaccgaactgtcgctcggggcgctggacaagctggacgagccctgctcgttgctgcaactgcgggcggccgtgtctgacctgatgccgcgtgtcgatctgccggaaatcctcttggaaatcgccgcccgcactggcttttccgaggccttcacccatgtctccgaacgcaatgcacgcgccgacaacctggtcaccagcctctgcgcggtgctgttgggcggggcctgcaacaccggcctggagcccttgatccgcaccgacaacccggcgctgcgccgtgaccggctgtcctgggtcagccagaattatatccgcgacgacaccctgtcagcggctaacgccatcctggtcggagcgcaaagccaactggaactggcccaagtctggggtggcggcgaggtcgcctccgccgatggcatgcgcttcgtcgtaccggtgcgcaccgtgcatgccggccccaatccgaagtatttcggcaccggccggggtgtcacctggtacaacctgatttccgaccaattctccggcctcaacgccatcaccgtgcccggcacgctgcgcgacagcctggtgttgctggcggtcgtgctggaacagcagaccgagttgcagccgacgcaaatcatgaccgacaccggggcctacagcgatgtggtgttcgggctcttccgcctacttggctaccacttcagtccgcggctggccgatgtcggcggtacccgcttctggcgcacgcgcccggacgcggactacggcaagctcaacgggctggcccgccagtcggtcaaactcgacctgatcgccgagcactgggacgacctgctgcgcctggccggctcgctcaaactcggccgggtgccggcgactggcatcatgcgcacgctgcaaacgggagatagacccacccggctggcccaggcgctggccgaattcgggcggatcgaaaagactctgcacacgttgacctatatcgacgacgagtccaagcgccgcgccaccctgacccagttgaaccgaggcgaaggccggcacagcctggcccgcgccgtgttccacggcaaacgcggcgagctccgccagcgctaccgcgaaggccaggaagaccagctcggtgctctgggcctggtggtgaacatcatcgtgctgtggaacaccctctacatgacggcggccgtggaacggctcaagcagcacggctatccagtgctggaagaggatttggcccggctatcgccgctgatctacgagcacatcaacatgctcgggcggtattcctttgcggtaccggaagaagttgcgcgcggcgagctgcggccactgcgtaatccagacgacgacctgtga

SEQ ID NO: 269212 - DNA, 411 bp, Klebsiella pneumoniae
atgcgggtcgtgttggataccaacatcctgttcagcgccctgatctcgccacatggcgcgcccgatgcgatctaccgtgcctggcgggcggcgcgtttcgaggtggtgacctcgcggatgcaactcgatgaaattcgtcgagccagccgctatcccaagcttcaggccatcctacagcccgccaaggtgggcgccatgatcaataacctgcaacgggctgtggtactggagcgcctgaccatcgaggtcgaagccgatgatccggatgactcgtttttgctggccatggccttggcgggcgatgcggactacctggtaaccggtgatcgccgcgccggcctgctgcaacgcgggcacatcgaacgcacgcggatcgtcacgcccgccgtgttctgcgtcgaggtgctgtga

SEQ ID NO: 269213 - DNA, 240 bp, Klebsiella pneumoniae
atgaataccattcgctggaatgtcgccgtctcggccgacaccgaccagtcgcttcggatgtttctggccagccagggcggcggccgtaagggcgacctgtcgcgcttcatcgaagaagcggtacgggcacacatcctggagctgagcgctgagcaggccaaggccgctaacgcccatctgagtgaggcagaattgaccaacgcggttgacgaagcgctcgactgggcacgtaagcgctga

SEQ ID NO: 269214 - DNA, 930 bp, Klebsiella pneumoniae
atgaagatcggttatgcgcgagtgagcactcgggatcagaaagccgacctacaagtcgatgccctgaaacaggccgggtgcgaacgcatctaccaagacatcgccagcggcgcgaaaagcgcccggccggagttggacaaactgctggccaacgtgcggccgggtgatgccgtggtgatctggaagctggatcgccttgggcgttccctcaagcacctggtcgagttggtcggcgagctggcagagcgcaaggtcggcttacagagcctgaatgaccccatcgacaccacccacgcccaaggccgcctggtgttcaacctgttcgcctcgctggcggagttcgagcgcgagctgatccgcgagcggactcaggcgggtctgtcggccgcacgggcgcgtggccggatcggtggccgtcccaagggcctgccagccaaggctgaggccaccgccatggcggccgaaaccctctaccgcgaaggtcgcctgagcgtcagcgcgatcggcgagaagctgcacatctccaagagcacgctgtacagctacctgcgccaccgtggtgtcgagatcggcgcgtaccagaagagcgccaggtcacgcgaccagcagccttcggccgcgtcgccggcagagccgcccgccgccgagcgggtggccaccgtcaccctgcgcctcgcggtggtgaataacagcaagttcgtgcgcggccggaagcgggccacggagaacattgagcgctactgcctggagccctatggcatgaagcggctggatgccggccactatgagttgaccattccgtatcggagcgacgatgagctggacaagagcgtgcatgacctgctgaccgagatcagccaggaggccgacatgcgcaactgttttgtcgagatgggcgcctgggaagaagacaccgaaaagcgttggtag

SEQ ID NO: 269215 - DNA, 978 bp, Klebsiella pneumoniae
  misc_feature (953)..(962): n is a, c, g, or t
ttgaatagtattgctgattattccggtgttagaagtgttgaatcttatacgcctgcaagtatttccaagcttctcgtcagattattaaaacccaccgataatatgtcagtatatgatcctgtatcaggcactgggggtacattggttcaggtttttaattactttaatgagctctataatgaaaagccattattccatttatttggacaagagataaatgccaggacttcgataataagtcgaattaatttattcatacatggtgttgcccaatttacaataaaatgtggtaatagtctgtcagacccaaaatatcttgttggaaaagtggggccattttggagccaatatgacaaacagcttagaaagtttgacgttgtattaggacacccaccattcgctgtccggaattggggtagggaatatatagaatttgatgaatttcggcgattcatttatggtatacccccacaccataatggtgactatgcttttttattacacatgattgctagtgcaaatgaagatggtcggattggtattttgctaccgcaatcagcactttttcgaggtggatctgaaaaagtaataagagaaaatataattaaagaagatttaatctattccataatagctttacctccaggtttgctttatggtatagcaattcctttctgtatcatcattttgaataagaaaaagccagaagggcacagaggtaaggttttatttatagacgcatcaaataactttaaatcatcgcgtaagatgaatattcttatggattctgatgtggaaaagattgtaaatacctatgagacattttcaaataatggtactttttccaaactaattgatattgaaacacttttaaaaaatgattctaatataaatgttcgtaattatgtggatgactctgaagtttctaagagaattaaagatcttttgcagcnnnnnnnnnngatctacacagagtag

SEQ ID NO: 269216 - DNA, 1002 bp, Klebsiella pneumoniae
ttgcagcatcattctgattttaaaagatattcattttctgatcctaattttatattatcaatttcaataccaaagaaaattgataatgatgttgctaatgtcatttatatccacagaagttccgtctcccagcggttgagatttaatcttccttctgaagttaaaaatttaaaaaactactttagggttgagttgaatcctgatcttttgttaaaagaatatgcaggtctttattttcagtcggaactagggcgattggtgttatcacatttaccaatgggaactagtttgcccatcctctcgatggattacgtgaaaaatttacaaatccccgtaccacctatcaaaatgcaagaggaagtggttcggattgctaataaattggagataacaaaagacagaattagttctttttttgctcagttaacaactgagccaaagcagtataaatttattgaagatatcacaggtgagatgatttactcattatctagtttaagtgatgagaaacatttgaaatatatcatcagtgctggtgaaacaaggtatgttgagtttaagcagtcatttttcgctaatgttgataaaatcagaagcgaagataaaactatagaaaaagatccaagtgttcaatatgaaatcataaaggatattgcttcttttatgaataccgagggtggtacgctgcttataggtataaatgataaaggtaaaataaccggtgttgaacgcgaaatgtctagatttaaatttaagaaaattgataattatttccaagagttaggtgctcagctaggaagtcgtctttttcaagattatcatcattattgcaaattaacagaagttaaagttgatgagactattgttgttaaaatagattgtcgtcctactccattccctgttttcttggataatgagaaatttcatgtgcggacagatacttcgtctccatgtttgactggtgttgaaatgctaagatatattcaaaataaatttaaataa

SEQ ID NO: 269217 - DNA, 309 bp, Klebsiella pneumoniae
atgcaacatcatttttttctacttctactaaccccattcttttacgctcaagctggctcctccctggaatcaacccaactcgccctcgcgctgaaacaactcgacggcgtgaaaacctcgctggaacgcgctcaaattagcgccagcaccgatccaccgtcacgctactacttcgactacttacaggcgcagcaggacctcttcacggttgaacagggcatccgccgctaccttagcccggcaagggcacagccgcgcactgttcagcctctgagcgccagctaccagcgggagaaccccgatgactga

SEQ ID NO: 269218 - DNA, 852 bp, Klebsiella pneumoniae
atggattatcccggtctttatgacttcgcagatgaaaagtcggcaaagtatcaaaaatgtttctttagattactttttttagagtattttttattattgctagtttcttttataggacttgtgacgaaagttcatgccattgaggtttcttatgcggttattttttgtgttcttttaatgttaatgctttacaggaattttattaagcatgaacagaagtggtacaaatatagagcgctatctgaatcaataaagacaataagttggcgttatagtatgagaactcctccatttaatgagggagaaaaagcgtcagctgagaaatttatcaaaacaatagggggcattgttaaggataataattatatctctgatgagatagatgaaaaatatgcaaggaaagataaaataacaggagagatgcatataatcagagatttaccctataacgaacgaaaacaatactattatgataatcgcgttgttgaccaacgaaactggtatcttaataaagcaacgtataacaaaaaaataagtctgagatggtcgatgcttattggcttaatatatgtggcgtccataattatagttgttttaaatgcagtgaatatcaatggtgttcctgattttcctgttgatcccgttacaacactagccgcatctattgttggttgggttcaaataaaaaagtataacgaactagctgtgtcttattttttaacagcacatgaaattggtgacattaaagagcagtttaattacatttcatctgagagtgactttcttgagtttgttaacaatgccgagaaagcattttctagagagcatactcaatggttggctaggagatag

SEQ ID NO: 269219 - DNA, 675 bp, Klebsiella pneumoniae
atgagtgagcagcgaacgcctccgtcacgcccaccacagggaccgattggctggctgctgtcgctgatcgggcggctcatcgggctggttattggcgcgctggtgctacgggtagtgctggaactggcggggctgtatttctggtggccgcatgaggggactgttcatgcttatcggatgattatgcgggaactaggcgaactggctcaagagttacacatccattcgccagagagaaatacatacactcttttggactataccagtataaagtttttacatatagaaagatggatgtacaacctttcaaggcaggacaaactggtattttcccagaatgaagtagctcagatgataactgatgtattggtttacgtgctaatcagttttatgatacgtattttcaggctaattttaaatataccgctaatcctgctttttatagttttaggactgattgaaggcttcgtactacgagacctacgtcgatttggcgcaggatacgagtccggttttatgttctattgggctgtaaaaatagcggaagaatcgttgcttaaaatcatattttgttatctagtgctaaatattgcaataaacttgtttataacccttgctatttttgctagtttcattgtattagtaaaatcggcgcggtttaaaaaattcatctag

SEQ ID NO: 269220 - DNA, 924 bp, Klebsiella pneumoniae
atgcaactttacctgtgcgaaaaaccctctcaggcacgcgatatcgcccgcgttcttgacgcccgcaaccgcagcgatggttgcctgcataacgccaccgtgaccgtcacctggtgcttcggccatctgctgagcatggccgcgccggaggattacgatccggcgctgaaacactggcgggcagagcatctgccgtttattcccccggcatggcggctggtgatccgcccggaggtgcgcaagcagttccgcatcatcgagaagcttctgaaacaggcagatgcagtggtgattgccaccgacgccgatcgcgaaggcgaaaccatcgcccgtgaaattctggaacagtgccgctggcgcggtccggtccagcgactgtggctatcggcgctggacgaggctagtatccacaaggcgctcgctgcgctgcgacccggcgacagcacgtttccgctgtacctggccggactggcgcgcgcccgcgccgactggctggtcggcatcaacatgacccgcgcctgcacgctgatgaaccaccgtcacaaaggcgtgctctccgtgggccgggtacagacgccgaccctgcgcctggtggtggaacgcgaccggaagattgcctgtttcacgcccctggtggcgggtggacgcccggctgcatgctgggggcacttcctttctggcgcagtggcagccggagagtgcgtactgcgacgacgaagggcgctgtatccgcgaatccgtagcccgcaaggccgctgcgcgcctgcagcaggccggaaccgcgcgggtgatggatgtcaccacccggcgggagaaaacgccgccaccgctggccttcaccctcagcgccctgcagcaggtctgctcaaaacagtggggcatgggcgcgcaggaggtactggatatcgcccagcgcctgtatga

SEQ ID NO: 269221 - DNA, 354 bp, Klebsiella pneumoniae; identical to SEQ ID NO: 112491

SEQ ID NO: 269222 - DNA, 249 bp, Klebsiella pneumoniae
atgcaattggctaattatcttaatgttaatgaagaaacattatttaattatatattttccatttggtattcggaaaataaaaaccttgttaataaattcattttttgcatctttaactcttgttatcacctaacgagagaggagattgatttgcttgcaaaggaaatggagttagagggaataccgttggatgaaaaccttaacaaaaaaatgctgttcgatggcaaagatttattatttttagaatag

SEQ ID NO: 269223 - DNA, 1197 bp, Klebsiella pneumoniae
atgattattagagatacaactaacaaaataaaaagcgtctacacagaaataaaagatggtgatcttgatttgcgccctaatttccaaagaggtgaagtctggacattaaataagaaaaaattgttgattgattctatattaagagaatggtacgtcccaccaatacatacagtagcactaggtgttggtaaatcggaagtgctggatggacaacaacgattaaccgctatcaaggattttcttgataaccagtttgcagtagatggcaatatcgaaccaaaagatgaagagattcttgcattgcatgggaaaaaatttaaagatttacctatcgatgtacaaaagaaaatagagagatttggtataacaatttatgagattactgaatacaatttaggtgagccaagtgagttattctatagactaaatcaaacagttaaactaacctcgtcagaagcaagaaatgctatttttggagacgtgagagatgatatttcttcatttgtcacatatatggatgagcttggagttgggaggaatatattagggtttagcaattccagaatggcttataatgacttattatctagagtgtgtttgttgctggaaaaaggtagcatacgatatcaattaagtgatgcaacactaacaaatagataccgggatgatactagctttgattcagatatatcaaacgcaattaaatccacaattaaattctttggctatctatctaagtactcttctcaagaagatataaaaacaaatttaacaaaagcatcatcacttaactggatatatcttatctgttgtatgaatatccattccgatggtattgatgtcgagaagttatatagtgcttttatttatttagagactgcgaggacatgtatcaaaactaatgagcgattccctaaagatgtagttgatttttttggaattggtcaggcgaatctacgtgaactaatgatgatttacatagagcgttcttcatcacgggtaatgtccataggttctataattataagggatataatacagaattttgcatgttacatggctggaattgtgccagtacacttaactgatgttgataccaatcatcttgaaaaatttgccgatgcattaagacatgaaaatgatgttaagttcttaattgaagatatggccgaaatttggaaggaaactggattatga

SEQ ID NO: 269224 - DNA, 603 bp, Klebsiella pneumoniae
atgacatcttggaagttttatgatgacaatgctgaaaggttattttcagattacatctcattgaattttgaaacaatatttaatgacattgaaaaatatattcccacaccaccaaaaaaagtccttgatgtaggggctggctccggcagagatgcttctgcacttgcagacatggggttcaatgtagtcgccgttgaaccaagtaaaaaaatgatagaattagcttccgcttatcattcatccaagaatatttattggattgaagattcattgcctcgtttagtgaagttacgcaacatatcagatgaattcgatttaattctcataagtgccgtatggatgcatctttctgtaacagagcaacatgagtcgcttatgactcttaaacgacttttatctccttctggtaagctcattattacgttacgcttggggccagaggaaccagataggggtataaataaaataagtaccgaagaccttttaaatgaagcaaataaaataggattggtatcctcttacattaccagcatcaaagatgatagtttcaatcgcccacagattaaatggcagaaagtggttctaactaagctcattcaatga

SEQ ID NO: 269225 - DNA, 573 bp, Klebsiella pneumoniae
atggacggacagcagtcatcaaatacagaacttaagcttgaagtaattcgctggcatcaaaggttacaagagattacctacctcgaggcaggacaacacatgagggctctaaaccaactgatgtggcaaatcccaagttttgttattgcagttaatggtggattatggtacgcaacaacgttggctaatgaaaaatcgctatggataatttttgcaattttagcattctttgacgcgacgacaattatcactctttttcgattacgttctctaatcggagctaaaattaataaacaaaaagaaatagaagatccattaaataacccaatattaacacaaataagcgctgatactggcttcacattaacaccatcatcaaatccaaccggtttcagtcatattgtaatatgctgttggacagcgatgttacttgcatgtattacggttaacatgttcggatgttttttaccagatatcctttcaaagccatctcgaagcacatcatataaggctacaattaaaaaaatcaattctgaatacattatagaagctaaatcaggagaattaaaatga

SEQ ID NO: 269226 - DNA, 1338 bp, Klebsiella pneumoniae; identical to SEQ ID NO: 168643

SEQ ID NO: 269227 - DNA, 2934 bp, Klebsiella pneumoniae
atgaacggcgaaaatttatccgtcacattgcaccaccatactttattctccgagcttatcaagcgtcaggaatttggagtatggttcagagttgaagacttacccggggtgcgtaccggacgatttgaactgaaaaaaaatgtaatgccctatattgaaaacatagttgctaaactcctctacgccccggccgtatgtaatcaatcatttcttgcatgggaacgagactatctgacattcgaatttttcatacgaagcagcagatacgccctggaaataaagtaccgctacataatttattgcatcgaggatgggcttagaaatggcaatgaaaattatatacaaaaaataaaatcgcaatgcagttccaacgaagagcaaatttttattctaacggaaaaaataaaatgtgcgaaaccttcttttgatttgtctcaattatccacaactgtgttacagttgtcacaacaagaacgtaaaaaacacatttaccggctatacgatttttgtaagtttcagggtgaagaatttaaaacatctgaaatttcagaacgctataatgttgatttgcatatcatatcaaaatatgggcattcttatgcaaacgaactggctataagtttgcttgacgaggatgtctccgatgaccttgcctactttgaatggaacagaacagtaaccactttccgatatcctcttcaaaattcgaagaaatcacgagaaataagagcaaaaaaagttactctggtcattgaatatttagttagaaacaaatgtgaagtaactcattcagatataacaaatttaattaacctggattatcggttagtaaaagagatggtcaataaatgggaggaaagcaataatactaaaattgccagaagaaggatctggaaaaccatcccattaagcgaacttatatccacagtccatccacatcttcataccataccgctaacatttttagattcatctacaacgggtaaaccgttgactgactcgcaggtacgtatgatttatgaaattaaacaaccgagactcaggaatactgcatttttcattatggcaacttgttacagtaacagagtgaatgacataacctttttctattatatgtccagatttctctatgcaatggggctgaatgatatagacaaacttgactatgagtctttttttaaagcataccatcagggagagttaattcctgaagacaatgccggacagcgggcacgaataattcagacttattttcgattgttagtcaagcaaggtgattatctaagcaaactcagtgaaaatcagcgggaaatatttttaccttttactctgccgcgtctgtcagatgatctattctggaaaaaatccacattgcacagagaggtctcgcaggaacaaaaacataaaaggaagtctaaaacagctgttttacatcagaagttttattttcttcgggattttgtggaaaggcgaaagttacagattaatcggcttcaacaggagattgacaaggcttttatactgtttgaacaatctgcaaaaaatgtcccccttttatttgagtatacagaatctgttattatggaaaatcgggcagagcagacatatacccacaggtttaaagtctgggatgcgatgttactgagacaagcacatgaaccggttgcagcaaaaaaaacctattcatggcgcgatattgatccctctcacaccattcacaacaaagatgctaagtttgtcacttttgagggaagttatgataaacatcatcagcctgttgaagggctttggttcatcgaactcatcactcttgctgcgttatcaggttctccctcatctgaaatcactagccgatatggtgtctcaaagaggtcttttcagggaccaataacgacgccatacggccccacgaccagtcgatggcaatatttattgagtaaagatttaggtctgatatttatccctattgaaattttaatgacagacgctctgcttgcgcattctgccgtgcagataatgtcaaagactggcgctcgggcgcatgagttcctgcagataaggctggtacctgagcatctttatcgattgaatctgacagagaataaagaatgtatattatttaatgcagtacctaaagggagaacaaaagaggagcctttttatattgataataaatgcatggaaagtttgtatgaatggtggcgttatcagataagcagaatgcagaaattttctgtaattaaagcagccgcatgtctggggccaaaattaaaaaacgccagctacctctggcaaaatgatgaaaaacactttactcaaaaaaatatcaatggcgcactttccttcatgttacacggtctttcgctaaaaacttcagccggagagaatataaaggtcaccagtcatctgctccggcatagttttgcaactgaaatgcgcacgctgaatacaccgctggatgttctggcgcagttgatgaagcaaaaagatgtcaacgtcactgagtattatgcaagacatacaccatctcaactgattgaactacaacaacaaatcttcacacaacgccatgattataccaagagtcatatacgcactaaagatgagatatctcagcaacttacagaagccgtgggtaaagttggtgcattaataccggttatcggtggatgctgtactatcgctaacgcatgcccggccaagtttgcctgcattggttgtgcagggaacgccccggacccagccaaacgcagtgatgttttaatttacagagaggcctggtcaaagatggcttctctgtccagagaacagaaattaccggcggaagagagaaaagcgcgagaaattattggaagttgtaacgacatgctggaagaaatggatctgattgagcaggttgactccatcagacgtcatttacagcccccattttaa

SEQ ID NO: 269228 - DNA, 348 bp, Klebsiella pneumoniae; identical to SEQ ID NO: 168640

SEQ ID NO: 269229 - DNA, 450 bp, Klebsiella pneumoniae; identical to SEQ ID NO: 168639

SEQ ID NO: 269230 - DNA, 726 bp, Klebsiella pneumoniae
atgtcagattggtcgctttctcaactatttgcatcgttacatgaagacattcagcttcgactgggaactgcacgtaaagctttccagcatcccggggctaaaggggatgccagtgaaggagtatggattgaaatgcttgatacatatcttcccaaacgctatcaggcagctaatgcttttgtagttgatagtttgggtaattttagtgatcagattgatgtggttgtttttgacaggcagtactcaccattcattttcaaatttaatgaacaaataattgttccagcagaaagtgtctatgcggtttttgaagcaaagcaatctgcgtcagcagatcttgttgcttatgcacagcgaaaagttgcaagtgttcgcagacttcatcgtaccagccttccaattccgcatgctggcgggacatatccagcaaaaccactcattccaattttgggagggttacttacttttgaaagtgactggagtcctgcattggggatgtcgtttgacaaagccctcaatggggatttatctgatggacgacttgatatgggctgtgttgcatcgcatgggcatttttacttcaataacattgatagcaagttcaattttgaacatggaaataaaccagctaccgcttttcttttcaggcttattgcgcaacttcaatttagtggcactgtgccaatgattgacattgatgcctatggaaaatggttggctaattga

SEQ ID NO: 269231 - DNA, 936 bp, Klebsiella pneumoniae
atgaacgtaaaaccatcacttgatgaattgtttgagcggcgtattaacttccctgactttgagcctcaggagcgtctggctcgtttagttggtcttgatgagcacaaagatcgattatcaaaaatattaggcttgcttgtaaatccttatgggattcaggaatgggccaaaaaatatcatccagatgctcgtgcggctgttgatacagtactcagacggccacctttagttgtattggctggggacgtgggctcaggtaaaacagagctggcggaaaccattggtgatgctgtagcccggcaggaagatattgatattacgttgtatcctttgagccttgctacccgagggcaaggtagagttggcgaaatgactcagctggtttcagctgcatttgattacaccattgaggccgcagataaattaaaaaacacgaatggaaaagctcgtggtgcggttttgctgctgattgatgaagctgatgcattggctcagtcccgggaaaatgcccagatgcaccatgaggatcgtgctggtgtaaacgcttttattcgcggaatagaccggatcgccaatcagaaactaccagcggcagttcttatgtgtactaaccggttgaaagctctcgatccagctgtccagcgtcgtgctgctgaaattttaacattttcccggccaaatgatgaacaacggcactatttgctgcattcaaaacttacgggattggggttaaattccacggcggtagaagaattagtcaggttaaccggtccaagggaccctaattctcctggatttactttctcagatattacgcagcggctaatcccatcaataattcttgcggcctacccatataatgcagtgtcagtccattctgcgctacaggtagtcaataaaatgacaccaacacccgcatttattgaccgccagtaa

SEQ ID NO: 269232 - DNA, 519 bp, Klebsiella pneumoniae
atgtcttcttatagttatacggtagcagagacgcaaactttcagcgtaacccacgctcgtcacatggctgctaaagttgcaactgacttgcggcgcatgcaacgtttttatggttaccccagtgatgccgacattgaagcatacgaagaagaattggttgtgtttcttaaggctggatatttgggtgaggtctcttatggttttcagaaaaataataactggatcgagccgacccttcgatataccgcaggcgacttgcttggctcaggaacagatgacgatcccggaaaaatccgcccaggaaaagatgtatcgggtgcatccttctacagttttatgacttatagctcgaaatatctgaatgctactcaatcggaaaaagatactgctttgaaagatctaccattcaaacgggttggtgcccagtctccagggattaatggctacctcgaaaatgataagacttactcggccggtggccgctccctcactcgcactagcgtaaggaattttgtatga

SEQ ID NO: 269233 - DNA, 966 bp, Klebsiella pneumoniae
atgtcaacagaacatgtcgaccataaaactatagcgcgatttgccgaagataaggtaaatcttccaaaagtaaaggctgatgatttcagggaacaggccaagcgattacagaacaaactggaagggtatctttctgatcatcctgacttttcattaaagcgaatgattccatcaggtagtctggctaaaggaactgctcttcgctcgttaaacgatattgatgtggctgtgtatatcagcggctctgatgcaccacaggatttacgtgggttgcttgactatcttgctgatagattgcgtaaagcatttcctaattttagccctgatcaggttaaaccccagacatactctgtaacggtttccttccggggctctggcttagatgtcgatattgtccctgtattgtattcggggttacctgactggcgaggtcatttgataagccaggaagatggctcgttccttgaaaccagtattcctctgcaccttgatttcatcaaagcccgcaagcgtgctgccccgaagcattttgctcaggttgttcgtttagcgaaatattgggctcgtttgatgaagcaagagcgaccgaattttcgctttaaatcgttcatgattgaattgattcttgcaaaattactggataatggtgtggatttctcgaattatccggaagctttacaggcatttttttcctatctggtgagcaccgaattacgtgaacgcattgtcttcgaagataattatcctgcgtcaaaaataggcacgttgtcagacttagtgcagatcatcgatcccgttaatcctgttaataatgttgctcgtttatatacgcagtctaatgtggacgccatcattgacgccgcaatggatgccggtgacgctattgatgctgcattctatgcaccaaccaagcaattaaccgtaacctattggcagaaagttttcggttcttcattccaggggtga

SEQ ID NO: 269234 - DNA, 324 bp, Klebsiella pneumoniae
atggcaacccgtcttggcgaaaaacttcgcgatttgcgtaaacagcgtggattaacactggaaaaactcgctgacatggctggactcagtaaaagctatctatgggaactggaaaatcgcgagtctcaacgtccttcggcagaaaagctcactgccctggcagatgcactgggagttgggactagtttctttttagaagatgatcttcgagaaccggaagaaaggcatcttgatgatgctttcttccggggctataaaaaccttgaacctgaggctaaagcacagttaagaaaaatattggacacctttaaaaaggacttttag

SEQ ID NO: 269235 - DNA, 867 bp, Klebsiella pneumoniae
atgtccgaaaaagagatatggacgcctcaaaaagcagctattcggctaacaaaaatttgcgatactttcagtgagattcacggcacagaacgatttcctgttaacgttggtgagttgtctctgggggcagcagagttattccaatgggctgaccctatagtaaaaatagaacccgttgacatcaaaggatttgatggtgcattaattgccaatgaagcccgaagccgctggatgttactttacaataacggtttaacatcccctggtagaattcgattcactcaggcacatgaactgggacattacatacttcatcgtctaaatcgtgatgagttcagatgtagcagtgatgatatgctatcctgggaagataaaaatattgaatcagaagcagatttatttgcttcttacttactgatgccattcaatgacttccggaaacagttgacgccagacgttgatattgaagtattacgccagtatgcgattcgttatggggtatcgctgacagcagctgcattgaaatggcttgaatgtactgaagaaaatgccgtattcattttatctcgtgacgggtacatgaaatgggccttttccagcccggcggctcgccgtaacggagccttctttcgcacacaacgcaatgttgtatgtattccagaaggatcgcttgctgcaaaccagaacgtttcaatggaaagagcaggaatgaagatcccagcatcaatttggttccctcatgcagataaagacgcttcagttcgtgaaatgaaaatacaatccgagcaatatgaatatgtcataacccttctaatcctttcccgaaaaacaactgtatggcctccttttcacggggaaaatgagtaa

SEQ ID NO: 269236 - DNA, 501 bp, Klebsiella pneumoniae
atgattatgactaactctaacgaatggttttctctttcagatgagcaagtatccttaattaaaaaaatgcaggaagagtttccaattcctgtaggtgcaatagctaaagaattaggggtaacagttatgaaagcaactttacccgcaggaatctcaggtgaaattaaggaagacaacggccgttttgttataagagttaatcgtcatgatgtaaaagaaagacagcgtttcaccgttgctcacgaaatagcccacttcctgttacatagagatcgtattggagatggtataacggatgatattctttatcgttccaagctttcagactatatggaggttcaagctaatagacttgcagcagatatattaatgccctggcatttaattcaactaaaattatccgaatataaggagttccgagaagaagagaaatatgaaaaaatagctgacgaggcagaggtatcgactacagctattaaaattcgactcggaaaattataa

SEQ ID NO: 269237 - DNA, 1131 bp, Klebsiella pneumoniae
atgtttaatcatgatgataactttcaatatgactatgctccaatattatcgcttagcccttctgaaatgatggctttagaacaattgccagggaaggataaagacaatattttacccgtaataccgctaaaaggttgggccagctcacaacagcttgaaaactcgctattgagaattgaaaaatctattgacgacaggaagtggatagcatccattgataatgattacctgttgaataataagacttttctttttactgggaaatatcccagagaggttttttatcagcttaaagagttgttacaaccaacaaatggttatgataattggtataaatttttagtaaaaactatacatgccatacccgttgtaaatttagaggaatcatcagccctcgaattgcaaataaaaaaactatattctcttgatagaggtattgtttttatttttgacttgaaaaacatgactctttcttattatcacgatgtaatacatctgatttccaagatggggatacaagacttattgtttatttatgatatcggaactattaatggtgattataataattactatcaaccgatactaaacctgataaataagacaaaagaaaaaatcccttttgtgagggtggcgatatcgggaacttcatttcctttcaattttgctggctatcatcgaggtgaaaaccctatatttgaaaggttattatttaataaattaaaacaaaacattacatcatatcccacaatatattctgaccgaggtagtgcaagaattgaaaaacaaagtggaggcggtaatctacccccgccacgaattgactatgccttgaaaaacgattggcgtttcattaggcatgaattttacgacccaaaatctcctggagagggagaaaaagaagaactgtactctttatgtgctaaagaaattatggaacaagagtattggtcagaaaacttacatctttggggaactcaaatgattgaattaacatctaaaggtgacaaatttggcataaactcggcgcaaaaagcaactgcagttagaataaatttgcacctttacacccaactacattacaacgatgaattagaaagcattgatactgatgaagagtgggaggattaa

SEQ ID NO: 269238 - DNA, 1035 bp, Klebsiella pneumoniae
atggatcgctttatcgagtttgcgctggtcgccgcccgtgaagcgctgacccaggccggctggtcgccagcatctgcggccgaacaggaacgtaccgccacggtgatcgccaccgggatcggcggcttcagcgagatcgccaatgcggtacataccaccgatgaacgcgggccgcgtcgtctctcgccgttcactatcccctcttttctggccaacctggccgccgggcatgtgtctatcgcccacggcttccggggccccatcggcgcgccggtcaccgcctgcgcagcgggtgcccaggccatcggcgatgcagcgcggatgatccgcagcggcgaggcggatattgccctctgcggcggcgcggaagcggcaattcatcgcgttagcctggccgggtttgccgcggcaagggcgctgtccagcgcctacagcgaccagccggaaagcgcttcccgcccctttgaccgtgaccacgatggttttgtgatgggagaaggcgccgggcttattgtgatcgaatctctggagcacgcgctggcgcgcggggccacgccgctggccgagctggtgggctacggcaccagcgcagatgcttatcacctgaccgcaggcccggaagacgggaacggcgcacgtcgggccatggagaccgctattcgccaggccggggtgtccgcggaagagattgatcatatcaacgcccacgccacctcaacgcaggtcggagataaaggtgaactggcggcgattaaaacgctgtttggcgcccatccggtcgccattacctcgacgaaatccgccaccggccatctgttaggcgcagccggcgggatcgaggccatcttcaccattcaggccctgcgcgatcaggtggtgccgccgacgctgaacctgcatcaccccgatgaagaggcggcaggtctcaatctggtggcgctgcaggcccgcccgcagaagatgcgctatgcgctgtcgaacggttttggctttggcggcgttaatgccagtctgctgctgaaacgctgggaataa

SEQ ID NO: 269239 - DNA, 645 bp, Klebsiella pneumoniae
atgtatattttttggtttataaattggatagaaaaaaattcaatcctgcttattgatgaaattgaaaattgtatatcagtatatagccaagagtatttgatggattaccttgcgcatgtgtcctcgcaacgaggcatttggattttgctctctagtcactctgaaacaattttaagtaaagtaggtattaaaaatgcaaggctaatttcgaatgttagtaacgttggtattagcgtagtttccccaaaacatgaaagaaaatattttacagcgttaggtatcaagcctagaaagaaaggcattttcattgttgaggacaagttttcatatatgtttcttaaaggcatgttgaatcgtgctgcttctgatattgcttatgattatcatatagttagttttcaggatggtgagtcagatatcgaaaaagtagtaaaacattttaaccctcataaaaaaattaattttgatttattagctgtgtttgatgcagatatgcgtgataaaatatcgaaacttatagggaaacaaatccccgtagtttctttaccatcaattgatggattaaacccagaacaggaactatggaatgttttatctaaaggctgtctcttatacacatctccgagcccacgagaccgaggctga

SEQ ID NO: 269240 - DNA, 600 bp, Klebsiella pneumoniae; identical to SEQ ID NO: 227469

SEQ ID NO: 269241 - DNA, 357 bp, Klebsiella pneumoniae; identical to SEQ ID NO: 230162

SEQ ID NO: 269242 - DNA, 429 bp, Klebsiella pneumoniae
atgcagtatgtgaaaacgcgcccggccctgaatgttgaagagtccgaccgcctgtccttcatgccgtacatgttcggcatggattttatgctcgcagaattgcaggtgtatgcactggcaaaaaaatggatgcccgaatatgaagtcgaattctggcattacatccgcttaccggagggcggcggttacatgatgcccgattgtggccgcgttcatctggtcagcacggaaagctggtttgaccgcactgtgagcgccgacgcggcgggcattattctgacatcgctggccgttaatcgccgtctggcggcccaccatgacagcggcaacccggccctgacccacctttacatgctgcgtgatgcccagctctggaatctcattaccttccacccggaatgcaacgctatttacgccgcgctggactga

SEQ ID NO: 269243 - DNA, 354 bp, Klebsiella pneumoniae; identical to SEQ ID NO: 223602

SEQ ID NO: 269244 - DNA, 180 bp, Klebsiella pneumoniae
atgatgatctcatatcaggaacttgttcgcaccttccttatctttctcaacacctatagctactggcgtatcatcaggatgcggctcaaaccactcaatggcaccactgatattacctcccgcctgagcaccaacaaaaacaccaatttcacctcccccctgtgcttcaggtattgttga

SEQ ID NO: 269245 - DNA, 201 bp, Klebsiella pneumoniae; identical to SEQ ID NO: 214892

SEQ ID NO: 269246 - DNA, 273 bp, Klebsiella pneumoniae
atgcctgatctgtcgccgttggattcgtggttaagagttagcacgtgggacacacaccactcttcggatgaggagagattttataaatcaatttataggttaattttattaaatgataaattggttgagcctcaatatatccgtgattacattatcaagtatcatgcaaaaggcaataagcatgagcatttagataacattgccagtgtctatgccgagaaatatgatgttatctttagcttcttatatgaaaataaaataaatctaaattga

SEQ ID NO: 269247 - DNA, 729 bp, Klebsiella pneumoniae
atggttgctcgatggttattacataaaatacgtttatgggattgccgtacatcaaatggagtagatcatttcattgctaattctgagtttatatctagaagaatcagaaaagtatatggacgtgaatcaaaagtaatttatccaccggttgatgttaatagattcgggttatgtgaaaacaaggatgattattattttacagcatccagaatggttccttataaaagaatggatttgatagttgaggcgttctcacaaatgcctgataaaaagcttgtagtaataggtgatggttcagagatgtcaaagattaaggcaaaagcttcaagtaatattgaactattaggatatcaaccaaattcagtgatgcaagagtatatgcaaaaagcaaaagggttcgtatttgcagctgaagaagatttcggcattacgccagttgaagcgcaagcgtgtggaactcctgtaatagcttttggcaagggtggagcattggaaacagttcgtccatgcggggttaataaagctactggtgtatttttttataaacaagaaattaagtctcttgtaaatgctgttcaggaatttgaaaaaaatatcgatgtatttaatccacaacattgcagagaaaatgcaattcgcttttctgaggaaaggtttaagcaagaaataacccagttcgttgatcaaaaatggtccgcctttaaaaataacaaacaaattatatactag

SEQ ID NO: 269248 - DNA, 2187 bp, Klebsiella pneumoniae
atgtcggtaccgaaccagacaccatataacatctataccgccaacgggctgaccactgtctttgcctatgagttttacctgatcagcgccagcgatattcaggtgacaatcaacggcaatgaagtaacgtctggctataccgtgtctggtgtgggtaatactggcggtggtgaagttacttttctgaccgcgccggccaatggcgctacagtcatttttgaacgcgttacgccgacataccggctcaccgattaccaggacaatggcgacctgctggccgatacggttaacaaagattttgaccgtctctggatggccatccagcgtgcttttatttatctcggcgtagcgctgatgcgccctttgtttggcggcgggccgtttaatgcaaatggatataggatttctaatctagccgatccggttaacgaacaggatgctgctactaaaaaattcgtggtggataacgggaatactaacctttcacgtacgctgcgggtccctgaaaattatgtaaatgaacttccttccgttagtgagagaagagattcattattagggtgggatagttcaggtcggccggtaccaatttttgcaatgacagatacagccgatcttgctttaaagatggcttcaagtgaacagggtctgggggccgggctttccaacacaacgctcgatattacagtacaggattacattgataactcctctccgaggatctcagattacaaagtcacaaaaggcgctgatgcgactctggcatttgcaaaggcatttgctaaagcagcagaaacaacaggggttgtaattgtcgatgtgagctgtgtggtggatacaattgctgttccatcaggaataacaatcaggatagctgactataagacagtcacccacaaagccaacgcatcggcgcatatgtttatcatgccctccgattcgttaatcaaggcaaataatagaaaaggccgcttgaggggaaactccgcgaatcaatcatcgatacgtcgttgtataagtgctgttggcgtttccaatgcgggggttgatagtgttgatatccgtgatttcaacagctacggggcgtattttgaaaactgcgaagacaccttctgcttaaactcaaccatccgggacattacaggtggtgccgtagaaacagccgctggccagtatattactaactgtaaacgccatgagtcccggtataacggcatcagagacactggcagcaatggaattaaatttagagcagattctctaggcttgactatcgggtgcaggtctataggtgataaggtctaccgcgctggatttatcgggatagcaaacggaacgtgtcgcgatcatattgtggaaggcgcctattgtgaagggtgtgtagacaacggatgtgatatgaatggctgcgataacgctaaatttataaattgcgtgtcggtcaattgccaggatggattttatatgggagaaaacaacataaataactgccatataaaaggatgctcggctcggttatgtaaaaggtcaggggtgggctctctagggtctttaacccggtgcagtgtgtccgatactaacatcgatagctgtggtagtggtatttactgttctggattcgtcgggtttaaaatacgtggaggcagtatcaccaattgtgttaaacagacttataccgacaacgaaacgggtactgtaaagacgagcaccggaaacggtatcgatttacaatcaaacttgtcggggtgctaccaacctgatatctctggaactactttttatggtaatgcgggttacgatattgcctttggtagttctggcaccattggtaacttattgcttggcgaatgttctttccaggactcagctggggatggaaaaattaactatggcggcgctactcttgccgatccgcagattagaaactcccagggatatattgtctcccggacgcaggtgtataatttggctggagatggcactacactggattttacgctttcactgccacagacggtcgctgatgcaaattatcgtattgtttctgttgtacctgattggctaactaccgtcagatacctagataataccaaagggacttcctatttcattatttcatttggtacggctccgccatctggaacacgtcgtgtaaacatttcgtttgaacgcctgcgtccagtttaa

SEQ ID NO: 269249 - DNA, 408 bp, Klebsiella pneumoniae
atgagaaaaatgctattgattgttaccctgttactttctggatgtgtaacatttacgcaaatgaatgacgggttaaatgcattgaaaggaaaggataaaaaaatagccttcgaagtgttaggctatcctagccaagaacaaactttcgatgatacgaaagtatatacatgggtaaactctgtaaatgatatagctgcgctctcgtctccacaaattacaacggggacatttggaaacaaatcttttaacgccactactttgcaaactgattacgtccctgttacttacagttgcaaaattcaaatagcaacagatacatcaggaattattaaaaactataactacgatggcaatatgggtggctgtgaatcttatattcaccggttaaacaattactttaaaaaatag

SEQ ID NO: 269250 - DNA, 408 bp, Klebsiella pneumoniae
atgagcgacaaagatatcgagcagcaaatacaggctaaaggcttaaccgcgccgcgcattactccgcagcacattgagaccattattctcgaagagcattattttacagcttatgatggtattcgtgctgccaacatgggtgtaggtgcagcttggacggcgcataaatcgactgatttgctgaccttctgcgttctggtgttaaagaacggcttcaccgtcaccggtgaaagcgcctgcgccagcccggaaaacttcgaccctgaaatcgggcgaaaaatcgctcgcgacaacgcggtgaataaaatctggatgctggaaggttatttgctgaaacagcgtctgcacgatgagcgttctgacgtatgggaaaacgaagacgactgtcgccgcgcattagaaggttaa

SEQ ID NO: 269251 - DNA, 603 bp, Klebsiella pneumoniae
atgaataacacgcttcttcctccttctgccagcgcgtggatgcgtggcgccgaagctgccacggcgaagctgtccggaatcacggtagccattcgcacgctgtggacgccgacggcatgcccggttgatttattgccgtatctggcgtgggcgctgtcggttgatcggtgggataagaactggccggcagagaaaaaaatagcgtcaatccagcaatcctactggcttcatcgcaggaagggtacacgcgcagctgtgcggcgagtaattgaagatatggggttttctgcgacgtttgcggagtggttcgacgtcggagacgaaccaggaactttccggcttgagattgatgttaatgaagtaggggtgacaccaaaaaccctggacgaattaaaccggctggtaggtgatgccaagccagtgagtagacatctggcgcaactgattatcgcaaccagtaccaggggggcggcattagcaggggtggttataaccgagggggatacagtgactgtctatcctcccggttttgaaccagatggaagtatttgttacgacggtcagcagcattattccggcaatgtttatttttcaggaaagtga

SEQ ID NO: 269252 - DNA, 612 bp, Klebsiella pneumoniae
atggcgggtaagaaattttcggctattctgaccggagccggagaggccgcactagcggcggccgccttatcgggagtgccggtcgggttttcggttatggccgtaggtgatggcggcggaagtctccccgagcctaatccggagcaaacgcagttagttaatgaggtttaccgcgcaccgctgaatcgactgattattgtcgaacagagggctaacattatccgtgctgagatgcttattcccgcccaggctggcgggttctggttaagagaggccgccttatatgatgatgccggggtttgccttgctgttgcaaacctacctgaatcatacaagccgcagcttaccgaggggtctgggcgtttgcactctgtaaacctctggattgctgtaaacaataccgccgatgttgagctaaaatctgatccgtcagtcattctcgctacggttgatgaagtaaaggctatttgcattctagggttggaattcgcccattctgaccctggattcttggtcaggtcaaatgcagcctttggttggattgctctgttttcattgcctcaccagaatctaacattggttggattctctgatgcaactctctcgcgctaa

SEQ ID NO: 269253 - DNA, 249 bp, Klebsiella pneumoniae
atgtctgtaaaaaataaggcgcgtgaccgacttcccggtggccgccttaagtcttatcgtcgtgtcggttcacattttgccagttgtgccagatggtttgataaatcgccgtcctggtatcgcaatatgatgatgaccaggcctgagcgccgtgaagtcagaaggcttctcaatcaggtaatgcgtggtcatgatgctgacggcattgcttttccggtcagtcatcgtccgtttgtttattggtggtga

SEQ ID NO: 269254 - DNA, 2226 bp, Klebsiella pneumoniae
atgaccatctacaacggcttatttgagccaaagaaatcggcgattaaagactgcggcgccgtgcagctggcgatcgccatcgatgcgccaaacaaaaaagtggccgaaagcattatgaccggcaaactctgggaatcatacccggccaatggtgacaactatttcaaaccgaaactgtgggaacacgttgaaggccagccgctgccgactgttggccagttcgatgagtcattcgcccagcagcatacttttgacggtgaaaaatgggtttctactacgcaggatagtgcttccggaagtagtgctggtttacctgccgacgatgaagtgatcgacctgatgaccgtttccgcagaggaacgctttgctgccgtcctgctttttagcaccgcggcgattgatggccatctttattctcaggttgtggattatttggataacctgaaaaaccatgacggggaatttgaagaagaagaccgcttcaactttaacgtgctgtgcgccctgcaaaataatttcccggtgcaaagcatgcatgtggaaggtctgaataaccttgttcagggtattttctcccactttgaaaaccagacgccaggcaaagcggctatctctcagttcgttaaacgctggcttgagaatccgggcaagcgcgacgagctggcccccggcgtatataaaaataccgctctcagcaccagcaccagcaccagcaccagcaccgatgataaaacacacgtggtaatttctaagcgctggtataaacacacttatgaaacgctggatcaggagatcgctaccgcccttctcccgctggcacctgatgcgccggtactatccggaaaccttctggacgctaagaagatgatttccgatggccgggaagattttaaacgctggtctgcatcgctgcacaccactccgcagatactcaaatacgaccgcgccagcatcttcggtgtggtgcagaacgtaccggcgaaagatacctaccatttccctgacagcctgcgccgccacatcgattcatggctggaggcaaatggccgctttgaagaaaccgaggcgggatccgttaaagaaccagagacaacgcaaaataccgcctcaaacgtgggcgaaaaagaggaagtgccgccgtcggttgtaaccgatacccaggccaaacaggcgcgtgagacgctcaacgatatgggctatggggtatatgcatctggcgagggagccgagccggaagagaagttaagcgttaaggctgaaaaagtggcaggcgaagccgctcgtttggctcgtgatatcaacctcaaagatcgcatgccagatgccggagatttgattccagcaactcaaccaaatgaaaatatagcctcaaaacaaattgaatcatatctatctgaattgagtgacgaccaggccaaagcaaaccttagtgtctggaatagagtccagcgcacagatccggccttcgtcgaaaagaacagtttcggcgcagggcttcactcaatccgggcgcagtacatgctgatgcgcgcaacggaagttttcggaatggaaggaaccggttggggcgttgatatcaaagaagagcgcatagatcgaggtgtgccgcttatggagccaatacaggaccaatcaggaaaaataattggccagaagccggtaagggacggggatggctcattattctgtttatccgtacatacaattcggattgaactctggtacctccgggacggaaagaaggggcgcattccggcttatggacatacggattacatcaccaaggggggtgatggtgcattaaaaatggagaaagaagccgccaaaaaatcactgactgacgctacaaccaaagcactatcccacctcggatttggtgcagacgtttacatgaacatgcataacgacaatgaatacacctcaaaattgaatgagatattcgaaatcaaaaaagccagcgaaagcattgaagatatagtgcggcttcgtcaggaattagacgacgaccttacctccgttgctgaaaccctatctactggagtgtctgttaacgaagttgaaaaggtgtttggcactattgcccgaaaactcgaagtgcaccgcaaggatgcagaatcaaaaggtgacactcagcgttctagatacctcagtggccggttacgccgcctgactgatatcaaaaatggacgtatcgccgaactgaataaatccgaggagaaagcataa

SEQ ID NO: 269255 - DNA, 576 bp, Klebsiella pneumoniae
atgacttccaccactgctattgccatcgctgccgactaccagagcttgctgcaactgctggaaagctctgatgaactgactccggaaatgatcgccgatacccttgaaggcatggaaggagaactggccgataaactggattccatcatggttatcgcacgtaataacctcggcaatgccagcacctgcgatgatgaaataaaacgcctggccgaacgtaagaagtcctttgagaataaggataaggctctgcgtaagtatattctctcctgcctgatggcggccgggctagataagctgaaaacagccaaaaacacgtttactgcccgtaaaggtagcgtcagcgtcatcattgatgatgttgaaaaaatccctgacgaaattgatggtattcaattggtcgatgtgaaaacagttattatcccagataagaaggcaatcaaggagatcatcgaatcggcacaggcagcagcggcccagattaccgctgacggcggagagataccggaagaactgttaaaaccagtgccgggcgctcgccttgagattggcgaacgttcattacaggtgcgctga

SEQ ID NO: 269256 - DNA, 186 bp, Klebsiella pneumoniae
atgctcaaaatcaccctgaagcgaggggatgccattcacgttatttttcctgatggcaccaaaggtaagatcgaagcctgcgcacgttgcgagtttgattttcattttccctatagcgtgaaaatcaccagagaaaatggtgcgctaaggaataaaccaaatcagattaagcataatcagaaataa

SEQ ID NO: 269257 - DNA, 246 bp, Klebsiella pneumoniae
atgcgacacgaaaacgacatcatctcaagggaggagatgattgaactaaccggaacccctcttaaaactaggcaatgcgaagcactgcgccgggctggtatcttcttcatagaaagggctgatgggcacccaaaaacaacatggggccacttcactaacccgataaaataccgcaaccagaacaccgaagagttgcaggatgaagaaccagatttcggagcggtattcaatggccggaaagcgtaa

SEQ ID NO: 269258 - DNA, 468 bp, Klebsiella pneumoniae; identical to SEQ ID NO: 185229

SEQ ID NO: 269259 - DNA, 195 bp, Klebsiella pneumoniae
gtgccgttcgaaaccttcagcgccgaggcgctgcgcgagcacgagcaccgctttccggcctcgtcttttgtccgggagacggtcggcgtcggcagcgtctccggcccggtggcctggctgctgagtcagggaaacctgtccggcgaaaccctgcgtgagcagggcgtgaccattactttgggagtaacacactga

SEQ ID NO: 269260 - DNA, 612 bp, Klebsiella pneumoniae
atgaatccgaccagtaagaaaaatattcttgtcctggcggccctgggggctgccgccctggcggcagcgagctacggcgcttactggtggcataccgggcgctttatgcagaccaccgatgatgcctatgtcggcggcgacattagcgccatctccagcaaagtctccggctatatccagcagctggcggtgcaggacaatatggcggtgaaaaaaggtgacctgttgatccgcattgacgaccgcgattatcgcgccgccctcgcgaaagccgccggagaagtggcggcgcagcaggccgcgctggccgatatccaggctacccgccagcttcagcaggcgaccattgccggctctgcggcctcgttactggccgccacggcggcaaccgaaaaactggctaacgacaaccgacgctataacgccctggccgcgtcgagcgcgatttccgcacagatccgcgataacgcctccgccgattatcgccgggcgcacgccgagcaggagaaggccaaagcggataaaaccgtggccgaacgtcagctggcggtgctggatgctcgccagcagcaaatcctggctgccctggcgcaggcccaggctaacctctag

SEQ ID NO: 269261 - DNA, 231 bp, Klebsiella pneumoniae
atggctgacatttttcgcggcaaagtaacacgtaataaaaaatatctggtttccggttatgcagtaacgtcaaaaggctatacgcgcagtgcagaggcaaccgtagaagcgcttaatcgtgatgaggcgataattctggcaacagctcaattacgctgggaggggttaacgtactttaaggccctcagagtgctggaaataacatcaccactaatcagcaagctgcactga

SEQ ID NO: 269262 - DNA, 603 bp, Klebsiella pneumoniae
atgactagcagcctgttaccgccggggtcgtctacgctggagcgcaggctggcgcaagcctgttcaggtatcagtgatttaaacgtaccgctgcgtgacctgtggaacccgtggaaatgcccggaaaagtttctcccgtatctggcctgggctttctccgttgaccgctgggaggagacctggacagaaaccgctaagcggcaggcggtcagcgatgctttctggatccatcagcgcaaaggaacggtggcggcagttaagcgggtgatcgaggggctgggatattcgatgacccttgaggaatggtgggaggtggccgaccctgcaggcacattccggcttgaaatcgatctccacgaaataggcataaccgagccgatgattaccgaacttgagcgaattattggcgatgcaaaaccggtcagtcgtcacatatatcagctcactttatctaacggcatacgtggaatggtgtggggaggctccgcgtcatatgacggtgaggttataacagtttatccgaagggttataaacctgatgggagttatatgtatgacgggactatcttctatgacggtaataataatttttcggagggttga

SEQ ID NO: 269263 - DNA, 780 bp, Klebsiella pneumoniae
atgattttatataaatatgtagattcaaaaacagccgacataatcattaaagattcaactttaaaattctcaaaagcgacatctttaaacgacccttttgaactaacaagcttgcattacggtactaaccatcaagatgaggaacaagaaatacgttttatttctgcatgtatgtcatatgggattctatctttaactcgtaaccccttaaacccgctcatgtgggcacactatggtagaggtaaaaaaataaatgggggatatggaataacgctggatagagaaaatggctctcatgcaggagtagtattagggattgacgttgatgaagcagggttaaacaatcacggttccaacatcattccggcaaagttcggtagtgttatatatacgtcaaccaaacctaaatctccctttgtggactctacaaatcgccacttttttgaagggatacagcataatttcaaccctgaaatattagaggctctccaaagaacattcctctacaaaccatcctactggtcttatgaagaagaagtaagagttataagaaacgttatccggagaaataatgaaatccagaaaataaacacatcatccattaaggaatattacatcggatttagaaactcctttaataaaaaatatctaacccaaacaaaaagaaaaataaaaaaagccctccctaactgcgaaatatatgtatgttgctatgataaatccgagtggactttcaataaaataccaatcgatgaggcaataattcgttgtattggttaa

SEQ ID NO: 269264 - DNA, 897 bp, Klebsiella pneumoniae
atgattgatgaatcaaaaatattagaaaaatttgcaagtttaaatgaaaaagagttagatgaactcaatgaaaggatgcacgccagaactgaacaggaatacagtcggtttgaggaaggttataaaataggcgtgtgttatttatgcgggaaaaagttcgaaactataagtaaagaacaaccttgtcttcattggttattacgacgttgtaagttcaaacccaaagatttaaaactaatatattctaaatatggctatagtaatatagcggcttttttaagatggtgtgctaattttgagaaacctttagtaaatattaatgatataacatcagaaatgaaaaatgggaaagttatatcaaacaccattaaatggaaaaatatcgaatggacatttgactgtagtgagtctgacttcagagggcatcctaattcagcatctgactttcctcactaccatttccagatgagaattgatgggaggcagtttataaactttaattcctaccatttgccattcagtcaggaagatatctttgcaataacaatgtcaagaaatcacccagataaatttactcacaattttggtgatcaaggtgaaggaatggatgttgccatgcaacttgtaggagatgatgcggcgacagcttttgaacatatgcttttggcggaggatcaagatgaggctgtttaccatatctcaactacagtgatggcaagagaaggtgaaactatttccggtgatttaatagcgaaactatttgaagaatctaagagaaccggtgagcctgtaagcagcttattgcataaaaatatgcccgagtctgcagaagttaaatcctatatttctgctagtgataacacgccggaaataaaaatacgtactgagcataagtag

SEQ ID NO: 269265 - DNA, 291 bp, Klebsiella pneumoniae
atgataactacttatggttacgactatcaatatcttcccaaaggccatgtgagacctattgatgatggagacattgtaagctgctcctcaaaagataatccgctgttagtacttccaaatgtaggggattatgtaaacatttcgaatgacgattctcgttcttcattcgcaggaattgttaaaacaaaatattttaattacgtaaggattagtgacgagcatgttcactgcctcataaatattgttgttgaagaagctgatgttgactgggggacgctaatcaaagaataa

SEQ ID NO: 269266 - DNA, 2082 bp, Klebsiella pneumoniae
atgaaattaaatgcagacagaaacaaattattcgctaaccaagaagctggaagattgtacacaatccttaatgagttagatcaagaacaaaaattgcatcttcaagagtccgaattatactacgattttcctttatacaaagatgatgacgacaacttggttatttctccattaatgttagtctctcgactgtatgggattattattttttatctttcagattgtcatgaaagagatgctgaaacgacgctaccaaataatgacacgttgttagaaaacatatatagccagatttattctcgccttttaaaacaaaaagccttacgaaaaaacaggagagaactgaacataactgttgaatctgctatttttgctccatatgcagatccacaaaaagaatatgatactgatagtgaagtcattgtatctaaaacatcaatagaaagattcatagaacaatttgaaaaccctataagtgaggatatttatagtgaagcagcttcgaccattgaaggcggaaaaggattaattagagtaaaacaacgtgatactgatggtttttctgaagaatcaaaagtacaaatcgttagcaagctagaatcatcaattgcacgatttgatagcaatcagctaggaagttgcgtcaatgaagtagaagggattgaacgaattcgtggcttagctggctcaggtaaaacagtggttctggcaatgaaagtggcaatcactcatttgcgcaaccctgataaaaaaatactttatacttttagtaccaaagcgttatatcaacacgttaaaagactaataacaagattctatagacaattcaatgatttggatcctgactttgaagggacaatagatattcttcatgcttggggaggaggcaatgcgccaggagtatattataacacctgtcagaataactctgctcgattcattaattttggcgaggcacagcgtgttgctcctaaagaaccattttcatatgcatgtagaaatttaatagaaaattatgcaatcaaaaagcaatatgactatgtttttgtcgacgaggctcaagattttgatagctctttcctacaactttgtctgaaactggctcataacgacaaaatggtatttggattggacgtcttccaaaacatttttcagacaacagcgccaacaattgaagaaatattaggtgaaggtaaaaatttaagtttagacaagtttcttaatagttgttaccgaaccccatgcgcgacacttatatgtgcccatgctgtaggtttaggtgtttatggcaatccagtgcaagctataaagacacctgaggactggaaaaatcttggttatcaagtggaaggtaatcatggtgaacgctttgtgtctggtgagaaaatatctgtatttagaacgattgaaacatccccaacattatatgatgcagataaagataaactaataataactcagcaccatgaaaatttatcatcagaatgccaatgggtagcgcaaaaaatacaaattgatatcgtgagcgaaggtctaaatgcttccgatatattgatagtttgcgctgatgacaaacactataaaaattattacaaccaaatctcatattttttatctgagtatggaatagacgtaaacaatgttaatgctgataaatataatattagtgatttttctgtggataacaaagttacttattccacaatccataaagcaaaaggaaacgaaggatatagcgtttacataattggtagtgaatgtttatatcacaacccaaatgtaaaaaatagaaacttacttttcacagcgatgactcgcaccaaaggttggcttacaatgactgggattggatatcctgccattgaacttttcgatgaaattcagcaagcaaaaaacaacattccttatcttaaattcaattatccatcaggacagacccttgataaaatcgagatcgacctacaaagatttgctcatgatgaaagtccggaagattttcaaaaattacttgaggctcacggtgtcgacgggttaaaagctttattacgcgagtatgaagcgaaaaggatgaaaaaatcatga

SEQ ID NO: 269267 - DNA, 672 bp, Klebsiella pneumoniae
atgatcaacttagccacatttaatacaaccgctaaagcgtccattaatcttgtgcgaaatgttgatttactaggtaattataacaatgacgtttattaccctgacaatatgcctggagagctacgccctttaacttacgaaaaagcatgggaaaaatgcacatcaaatcaatggtttaacatacaacttgacgatggctcattattcattttcaagtataatagttatacctacttaatgacacctgttaaaaccttggactacagagagtatttggatacctattatccagaagatgagtggcaagatgtagaggagtacagagtaatgataagtcaagaatatgataattacatcgatactcacacaaagaacttcccgcctatgcctgtaagatatgatatagatgatgaacattattgtgaacattctcatccgtactgccactttcatttcggttcagaaaatgaaggtagaatagcaacgaagaaaatgctgactccgttatcatttaccgcgttcattctacgctcattctatccgaaagcatggaagatatatgctgaatcacagttaattgaagagcatctggattcatttagtactgggttacaagttgcgccccaagaatattgggctaacagagaaaataaatttctgtccattggctaa

SEQ ID NO: 269268 - DNA, 936 bp, Klebsiella pneumoniae
atgttaagaattcctgactcagaatggcggatcgttgatggggtcccccaactttccgttgttttcttgcggaaaatgacgcctcaggcaaccagatttactcaatgggtacagcggacacatgccaaattgcttaaggctcccgaaaatgtcctgtcgtgctgcacatccggcttgattgacggtgaaattcccgataaaaacggttggctttccgctggtgatgcccttgccctgctgacttacagcattcactccagccagaacgggcatctcattgatgccattgagcaaaaatctggtctgatactcccggtgaggcccggtgaaagccgtcttgaggggcaatttgctgtcaaattacgcgatttgatagttgaattaagggaccagccgcatttcgtccactatgagcttgtacagcaaaagcagatcggtccctacagagtggatttcttcctcactgagcagtggtacaccgatatggcaaaaggaaaaaccactaaacgccagttcatcattgaatttgatgaggaggctcatagaacgacacgttatcagctaaatgataaacgacgggatcggtggttacggaaaaatctgcacggtataaagctaatcagggtcagacatgcagaacaggaagtatggctggaagcggtccgccagctaaagcggttcgtcagtctggaggattgctatgcccactgcctgcaaattgcctgtatcagcctttctgaatccacgctaaggataagcagcgagtcagcccggaaagcctatgatgcaacccataacgaatgcagttttctgctaaaaagcccacgtcagcctctcagtgagatgggtaaactgctggacaggctgacaatcccctttgataaacgcagggacagatacttccaacgtaaaaaattgaggtcatacagcatataa

SEQ ID NO: 269269 - DNA, 576 bp, Klebsiella pneumoniae
atggctactgttggttacgcccgtgtgtccaccaccgggcagagtctggatacacaactcgaagccttatccggatgtgaaaaagtgtttcgggagaaaatcagcggggccaaagacgaccgccccgggttacaagccatgctggagtttgtccgtgaaggcgactccgtgcaggtgacgaaactggaccgcctcgcccgtaacacccgccacctgctggaaatatcggaatacctgcaaggtaaaggtgtcgcgttgaatatactgaatattggcatcaatacggccacaccgactggaaagctcatgctgaccatgattggagctattgccacgtttgagcgtgaaatgatgctggagcggcaggccgaggggatcgccttggcaaggcttaaaggcaagtacaaaggccgcaaagcgacagctatgtgtaaatctgaagaagttcgagatttggttaaaaaaggcgtcagtaagccagagatttctcggcagttaggcatcggtatcactagcatttaccgaatcattcgcgataaacaagcaggactactaaatgtcgaaaatgatagttag

SEQ ID NO: 269270 - DNA, 207 bp, Klebsiella pneumoniae
atgacagtatgcagattatgtcagtgtgagccaatggtgatgacaaagccggaaaccgacggaatcacctatttttatgtgcattatgtggaatgttccggatgtggagtgggtactaaacgcttttcagatcaggagatgaatatagaaagtgctatcaataacgcattttctcaatgggaagaattaaataaaataaatttttga

SEQ ID NO: 269271 - DNA, 1929 bp, Klebsiella pneumoniae
atgttagaaattgaaaatttgaatcctttctctcttgcaatcacgccaattaaatttaacactcaattatctttattagtcggaactaatggttgtggaaaaagcagattcttacaatcgcttaaattggatggcagcagttgcataattgatggtaaaaaaataccatcatcacaaatcgtttatttatctccaggtgatatgtcatttggcagcatccaagaaaaaaattcatttcatgatataaatgaacatcaatcgaatagcctttatgaattatataaacgatattcagggggagatggaatcattgaaaacctcgccccatcaaaaagaaaccccgatgacaaagactatgactttgaatcacttggggtaaatagagatgaattcgttaagcgtcttcaaattgtttcatatacggtagaaaaagatatagacaatctgtcaaaagatgacttagagagtttttatcgtactaacaacagagggttattctctctgcaggatataacatccgagtttcacttttacataactaaaatgaatgaagcactatacaatgaatggctaaaagagactcaacaaattgagaataaaaaaatctctccgaaaacattcaaaaaactatatgataaagaaccatgggttgtttttaatgatatccttaggtcggcctttgaaggtaagtactctatatcttttcccacaagccatgtcgataaaggctacattcctgtattacttcttaacgaaaaaataagcatcgaaatgaacaacctttcttcaggtgaaaaagtaatgatgtcttttgttattgccgtgtttagctgcttgtacaaggcaaaaagaattaccacatcagaaataaaaattttacttcttgatgaacctgacgcccatttacatcctaagatgttaaaaacattgcattcatttcttgagcaaataatagaagaatttgaatgttatataattatagcaacccattcaccaacaacagctgctctggctcgagaaaaaagcatctatttacttgacaacaatttaatttctgctattagcaaatataatgcagttaatagtttgatggatggaatatcatcaattcaattaaatgttgaaaaccgccggcaagttttagttgaaagttcttatgacaatgacatctaccaagaagcatttgatttcctagtaagaaaaaacatcattggaagtgacattcatcttgattttgttagttcaggaccaaaaatagatgatgagttaataaaaagtaaattaagtcaatttatagctaaagatattgattcagaaaaaatagaagcattcattaaaggtattaatggagtaggttcttgcactcatatcttcagccaggtcacatcgtttcataaaagaggtcaaaacaacataaggggattagtcgattgggataaagaaaacaaagatggaaacggaataatagtattcgcaccagatacatcgtacgcaatagagaatattttactagaccccattgcgctaaaaatacagttataccagatcgacaacagaaaatttcaattactaaactcagcgggcgagaaagttgatttgggctcttggcttgaaaatccggattctctacagaatgaagttgatatgtttatgcttgacatgcttgaatctccaaacaataatgatactgaaatacattatatgaacggcatgataataaaaagtgactcaaggtatctgaaaacaaaagggcacaactggaacgaaaaaatcaacaaaaaatatccatgtctacgcaaattaacaaatggacaatttgaaacattgaaattccatcttttaaaaaaatctatgatagatgcaacccgaggggatttactgccaatttactttaaagaagctttcgaacgattaataaaacttggatag

SEQ ID NO: 269272 - DNA, 1419 bp, Klebsiella pneumoniae
atgtttggtttagatgcttttcatctggcacggatccagtttgcattcaccgtttcgtttcatattatctttccggcgataactatcggtcttgcaagctatctggtcgtactcgaaggcctctggttgaaaaaacgcagcgcagtttacctggatctctatcatttctggtcgaaagtctttgccgttaactttgggatgggcgttgtttccggactggtaatggcctatcagtttgggaccaactggagcggtttttctcaattcgcaggtagcatcacgggccccttacttacttatgaagtattaacggcctttttccttgaagcaggtttcctgggcgttatgctgtttggtcgcgacaaagtaggacccggcctgcatttctttgctacctgcatggtggctctcggaacattaatatcaaccttttggatcctggcttccaacagctggatgcacacgcctcagggatacagtatcgagaatggtgtagtcgagcctcaggactggataaaaattgttttcaacccatcattcccatggcgtttggtgcatatgacgacagccgctttccttgcaagtgcgttcttcgttggggcatctggcgcatggcatctgcttaagggcagggacacgccagcaatccgcaaaatgttctctatggcgttatggatggcagccattattgcgccgattcaggtatttctgggcgatgggcacgggctaaacacgttagagcatcagcctgcaaaaattgcggcgattgaagggcactgggaaaacaggcctggtgtagccacgccgctcattctgtttggcattccagatatggagcaggaacgaactaaatttgcacttgaagtaccttaccttggcagcctgatcctgactcacagtctgaaccaacagatccccgcgctaaaaagctttccgcctgctgacaggcccaactctaccgtggtgttctggtcatttcgtatcatggttggtctgggactattaatgattacccaaggtattttaagcctatggctacgttacaaaaaaaaactgtacgcctctcgaccgttcctctggttcgtcttgctaatgggaccgtccgggttgattgccatcctggcagggtggtttaccaccgaaataggaagacagccctggactgtttatggccttcaacggacccgtgaggcggtatccgcacacggcgagctgcatatgagtatgagtcttatggcctttattatcgtttacagtgcggtgttcggtgtgggttatatctatatgatgcagctcattaagaaggggccgcaaaccggtgaaggtcagtatctacaggaggggggcccggggaagttgcgcacaccagccaggccactttcagctggcaattgtactgaggacggcaatcatgattga

SEQ ID NO: 269273 - DNA, 123 bp, Klebsiella pneumoniae
atgaatgaatattcctttacgctcctgattctaatattgatgatggtctttgtgttgattctcgtttggtcaggagtcgatctcagagatatgagtgcctgtaaggggggaaactttgactga

SEQ ID NO: 269274 - DNA, 180 bp, Klebsiella pneumoniae
atgaaaattgttttcgaggattcagatttttattcgctagaggttatagagatagcaaaacaatttttgctctatttcgaccgttgcgataactgtggctgtgagggttgctcagaatgcaattttcttggtgttattcagatcagaaatcttgatggcacggagtgttttgatgaatga

SEQ ID NO: 269275 - DNA, 996 bp, Klebsiella pneumoniae
gtgactgttatcgttgacacaatttcgttttcgtttcagatttctgctctgagagatttaggcgatttttatttttctcggcctgttgggttcggtccgtggccggttcagccagaatctggtgataaaattcattatcaggagttgtgctgcactgctctggaggaccgcatgaggttcattttcagcgattttttcgctatgtcgttatcaccagctactggtcgggggagattggggtatttcgatcattgccgaataactgatttgtctggggttgttgaattcggctatctggcgtttggtggaaatagggataccgcgcactgttatctgaatggccacgcctgtaaagaatttttcgagaaaaaacagccaattgaactgcacaattttttagtcgaaattctccgggttaattgtttgaatcgtctggatctggcctacgatgattattcaggtgcaactggttttgactctgttattgcggcgtatgatggtgacgcgttttactgcgggaaaggccccagaccgaaaatgactacaattcaatcgagaacaggaaaaattctcggtggaacaacgatttacatcggctcgcgccagtctcaggtttattggcgatcctacgacaaaaatgccgagcaggggattattcagcctgaaacgccgtggtggcggcatgaggccgagctaaaaagaataagcgtagatttattgttagatatttcagcggcttatgccggttgcaacgattttgctcgcacactggctgattctgagcctgttcgtgttcgtacaaaaattgaaaaaactgctgctagtctggattctcagattcgttgggggcgtagattaataggcaaaacgctccgctctctaatagatcattttgatgctcctacggctctggcgctactaactgctggagaacgtggtcgcctgcacctgaccccaggtgaaatttctgtctatcgaacggcgttgcaaatttga

SEQ ID NO: 269276 - DNA, 300 bp, Klebsiella pneumoniae
atgaacaacgtgattaactggtttgaaattccggtcgccgatatggatcgcgccgtcgcgttttatgagccggtgatgcaagtgtcgctgcgtcgcgaaaccatggactgcgccgagctggcggtgttcccgcatcaggatccggccctcggcggcgcgctggccaaatttgaaggtatcgcgccctcggcgcagggcgctattatttatctgcatactgatcatcttgccagccacgctggagcgcgttgcctcggcgggtggggcctgtgtcttcggcccgctgacgctgccgaatga

SEQ ID NO: 269277 - DNA, 894 bp, Klebsiella pneumoniae
atgagaaaattaatcttagttgctactgttgccgccagttttctgctcgggtgcgaccagaagagtactggcaagcgtgaaaccttgtctgaagcgcttgttgctaagtcactctctaacatggttcccgttaagggcggcgagttcataatgggggattttgggccgttagtcggtgaaaaactgccttacagcataaaccaggatgataaggtattacataagattgtattaagcgatttttcgatatcaaaatacaaaatcaccaatgatgattataataaatatttgcagataacaggggtaaaaaaagcacccatccatatttttttaaaaaattatccatccttgcaaaaaggatattattctgttggtgttacctggcaacaggcaaaagactattgtcagtggttaggtaaggagtctggtaaaaaatttgatttaccaacagaggcgcaatgggaatatgcagcaagatccagagggcaatacattccgtttgcaacgaataatggtgagttcctgcccggtaaaaacatccccagccaggatgagctgagtgaatatactgatggagcaggtattcctatttatccagtggggaagtatcccccaaaccccctgggtctgtatgatatggggcttagtggctcagaatggaccaatgactggtatgcgtcagattattactctcattctccggtaaacgatccccagggacctgcgcagggtactaaaaaagtcctgcgtggatatattggcggcgacagacagtacgctttaaccatgttcaggcaatcaaaattgccagttccgaagatcgataaagacgatgactatgaaaaatatggtgttggcccgcagtatgtatttcgttgtgtcgttaataaataa

SEQ ID NO: 269278 - DNA, 2583 bp, Klebsiella pneumoniae
atgtcgttgcgagatttatctgggtggttgattaagaatcaaggattcttaagaaaatatcaggcattagtcgctaactcgataaaagatcaatttccacagttaaaatcagatgtaatcccacagattagttctgaggatgtcggctatcttttaacatgtgctagttctttggctttctcaagtgatgagaaatgccaagatgcagccttaaggattgcacagtattgcttattgaatgaaaaaagtgaagcaagaaaagatagtgctgcattaattcttgattcattatctaataatccagcaatacaacttgctgaaaatagggggtatcttaaccctgatttcgaagaaagattacccttaaaggctcagttagaactaactaaaagaaaaattctatatacgattgaaatagatgctgataagcatatttatgctaataggtttcaatcagagttttgggatgcggtacaagaaaattcatgggttagtgtctctgctcctacctctgtaggaaaatcatttatcctggaatcttgggtagagcagtttgtaaaaagcaataagaattgcttagttatttatatcgtaccaacaagggcattgatttcagaagtatactctgagttgcaaaaacgtttggatcctaatttaacaaatatagttaatattcagacactaccattgagtaatgtataccagagcgaaaaatctaatgtcttcatatttacacaggaaagattaaatttattctacaatcatttctcacaaattccaaagatagacgtcttagttgttgatgaagcacacaagatcggtgatggtggaagaggtgttattcttcaacatgtaattgaactgacttgtctaaataaccctgattcaaaagttatctttgcaagtcctttcaccttaaatcctgaaatattgctcagtgatgctccaatattaaaaaacaaaagaactataaaaagtgactatgttacagttaatcaaaacttaatatgggtagaacaaaaaccacgcaagaccaaagattggttgatgtattattttgcaaacggtgaaaaacgcgagttaggaaacttttctttagaaaatgcaccatctcctgaaagtaaaagattgccttttgtagctctttgtttaggtaagggggcttctggtaacgtagtttacgtaaatggagccgctgaagcagaatctacttccaagctaatatctgcaagtatagaaaatgagaccgaggatgaagaaattttagctctcgttgagcttagtgagacaattatacataaaaatttcgcattaaatcgcactctaaaaaagagagtcgcttttcattatggcaacatgcctttaataataaagggcgagattgaacgattgtttagtaaaggtaagattgattttttaatttgtacctcaactttagttgagggcgtaaacatggcttgtaaaaatatttttataagaggccctaaaaagggtaattcaaccccgatgcgagaagaagatttttggaatcttgctggcagagctggtcgttggggaaaagaattccaaggtaatgtcatctgcatcgatagcgacaatgaaaaaatttggaatggagaacctccaaaaaccaaaaaaaatatatttataactcgcgccacggatgctatttcccatgatatggataagttggtttcctatattttttcagagcatcattttggtatgtctgagcggaatcctaatctccagagtctatttggttatttatgttcatcattttatttttataatggcttggataataatccttacatggaaaagtacaatataaaaaatatcgatgttttaaatgaagcaatatttgatgtttttgattctttaacttttccacacgaattggttgtgcggcatcctggtataagcccgcttttaatgcaaaacctttgggatagattttcgcgggatacaaacaaacctgtagagagattactgctttctgaacctggtagtaatgatgcgttagattcctatgtatccgcattctctagaattagtgatactctgagtaagaagctaggttataattcaaaaggagcttacgtgcaggccttgctagtttccaagtggatgaaaggttatcccctagcaagattgatctcggatagaataagatataacaaaaagaaaaatattgttttcaaagaagcgactttaatccgaggggttatgaaggatgttgaagagatcgctcgctatcaagctccaaggcttttaggatgttataatgatttattaaaaagcttttatctttcgatagatcgcacagacttagcaaaagatgttgaagatatcggtgtttatttagaacttggtgtaagtttaaaaactcagatttcactaatagggcttgggttttcaagaactgctgctgtaatgatttcagagcttattcctaatgatagtttagatgaggaagaatgcattaattggattaaggacaataaagttgacatggaagaacttccacaattagttcaaaacgaaatacataatatgtttcgtaacttttgggtagaatag

SEQ ID NO: 269279 - DNA, 942 bp, Klebsiella pneumoniae
atggatgcactgcatgtcgcgcttgaaaatctgattagagatgatggtcaaacactaaatagttattttagtgaggttaaagttaattcattgattgaaaatacaaatgcaacttgtcattttcattgccttaatcttgacgggaatggacgtcctagggtagacgcgttaatccaattcttgaccgataaagtagttgattatgctattccaaggaaaaaaatcaatgaggcagtgaaatattttaacgaaacacaatcaacagcgaaaataacaaaattagcaaaccaagccaaaaggttatttactaggcttgcaaatagtggcgaaggcggtgaatttatcctttttttatttgcagagcaattccttagatttccacaaataatttgcaaaatgagtctgaaaacgagttctcaaatgcattaccatggtgcagatggaatccatattggcgtagataaagataataaaaaattatgtttatactggggcgagtctaaactctattccaatctgagtaaaggtattactgagtgtatggatagtatagctccattacttcaaagttctatgggaatagagggcgctgagacacgtgatatgcagttgctggagtcgcacttaaatgttgatgatatagaactggaacaagcgttgaaaagattcttagatcctgatagcccggattttaataagttggaatacagaggaatatgcttagttgggtttgatcttaaagattacccacaagggcccagttcaattgatatcactgaactagttgctttgattaatactaaagtcgggaaatggtcaactagtgtgcaaggtggtatagttaataaaaaacttgatcgctttgctatgcatgtttttattcttccttttccttcagtaaaagcatttagggctagtttaattaaagcattggagagttga

SEQ ID NO: 269280 - DNA, 948 bp, Klebsiella pneumoniae
atgaataaccataacgaatacaatttattttactgccagactaaaaaagatgtccaggattgcattgccgcaggcattgatattaactctctcatacattggggtgaaaatgcactgttcaataactgtcacaccagtgcgattcaggccatgattgaagcaggaattgatttagaccatacagatcattacggaaataatgcgctatttatcaattcttccccagaaatactcagcctcttaattgattcaggcattaacattcaccatacaaatgacaagggggagaattgtctttcccgccataggtatgacagagcaagcacagaaaccctcattaatgcggatgttgatattcaccataaagataataatggtcagacccttctttataataacttggataatctctgctttgattatttggtgaataaaggttgtgatcttaatcatagggataacaatggcaacacggttctggatttgcctgaccataaaagttacaaatatgattttatcgtaatggctcttgctcgtcaccttgataaaattgatactcctcctacactttttaaacacttaacgattaagtgcttacccctaatggcgttgctgcatgaaaaaggtattcatttcacggtagctgaacactgtacattttcactttacgtgagagaaatgaaagctttttttatcgaattaaaaacctacaccgatatcggccatgttcaatttcacaatatggacaataaacacattggcagctatacggggatcgagagagtaaaatggtttattcgaaatggtatcagaatggacgacgatatactcagacagcgttccgactccgataaaattttatcttatatcgcaggaagagagaaaaaagacctgttaaaagaaatgaagccagagatcccccgtgcacctgtgcgaaaaagactctaa

SEQ ID NO: 269281 - DNA, 2091 bp, Klebsiella pneumoniae
atgcctcagcaacaagatgcacagccattccagttaaaatatagtcataacatcattgaacatcttggattaaaactctatcagaataggcctacaaatgttttggctgaacttgtatctaactcttgggatgctgattcagagaacgtatggattgatattgatgctaacaatcttgctgtttacgatgatggcacgggcatggacagggaaacccttgtaaatcactaccttattataggaaagagaaaaagaacctcaattaatattgaagattgctctcctaaaaatagaaaatatatggggcgaaaaggaattggaaagttagctccatttggaattgccaagagattgtctgtcgttacggtcagcgaaattgataatacttgttgctggttagaagttgacttaacagaattattgaaagagtcgaacgaaaatgaactgacagaattcagctataaacctgaagtaatttttgattcaactccaatttcagaaataacttttgaaaaagataagcatggatacgttaagaaattcgtcgaaaaaatagaatataaaagtggcacactaataattatggatgatctttcgttaaaaagaaagatccctaccaagcaccttatggaatccttaggtcaacgatttactgtaactttattgagagatgattttaatgtcatcgttaatgatgaattggtaacagaaaaacaatcattgccagaattttcatatcgagaaccagccacagggtttgttgatgaaacaatcaacattaatggtatagatcgaaaggtaagacattgggttggctttgtacgagaagctgaatggcctcaagatcaagctggtgtgggcgtttatgcacatggcaaaatcgcccaagatcgaccttttgtatttggcttgaaagggagagaaatttctactcgctatatgtatggagtaattgaagctgattggctggatgaattagacgaggatattgtatccacagaccgtacaagcattaactggaataacgattatacagaggaaatgtataattggggtaagaacctggtatcaaaatggatcgcaaattacaggaaatttcaaaaagaagaaaattcagggaaggtattgcgcaaaattaaagaactgcctgatataccaaaaatcacagaagaggaaagagaagccattaaagatatggtttgtaatatgagtcctaaaatttataaagatgaacagttacaaaatgaagttatcacacaattaacttcagcatggactcatagaccaacacgaaacattattaaatctctctgggacagaatcgaagtttcggaaggggatgaacaaaatttcattgaaactctgaatgatataaccaagtatcttgttcctgagtctctttcattatcagtaagtgtttcacagcgtatttatgcattaacaaaattgcatgaacttagcatagttggcacagaaacccaattacaggcattacttgaaagcttcccatggatattaggctcagataaagggaaagtatatgccaatactgctttaaaagaattggctcgtaaggcaattttagatggcgtattacccggtcatgcggatacgagtaaacaactggctgattcagctaatgcaggaacaaggcctgactttgcattcttttcggatgcaaataaatctacaatcattatcgttgaacttaaaagcccacaggttccactacagtatgagcatgttttgcaacttttaacctattattattggatgaaatctcattatcccacttcaaaaataacaggttatttagtgggcaaaaatgccggttcaggaattgagtgtgacgatccgaatatacatgtaaaaacatgggatcagatctgcttacattcccgaaaagactatttagaactattagcttcgatgttaaatggtatatcagaacattatgatgactcgcgagtttatgatgtaatagagttgggaggcgaagcgacgaaagaacttctgaaaaaaatggcagatgtaaacactccactcagtgagttctttgaaaacattgataaaaagttgagattgaaatag

SEQ ID NO: 269282 - DNA, 1071 bp, Klebsiella pneumoniae
gtgtttagtgcaatagacctcttctgcggtggcgggggactaacagttggattgaagcaagctggctataatgtcttggctgctgttgagcttgattctgtagcggcagagacttacaaagcaaacaatcataatacaactttgatagaaagagacatcagacatgtttctggtgcagagattttaaagtcaataggtctcaaaaagggagaactaacccttttggctggttgtcctccttgccaaagtttttcaacgttgacaagaaattactctagtgaagatagtcgtaattcattgataaaagaggttttacgtttgatctctgatatagagcctcaaatgattatgattgaaaatgtcccaggaatgatgggtaggggaaagccgttcttaaaagaattcatggacggtataaaggctcaaggttacatagcaaattttggtgttctgcaagttgccgattatggtgtaccacaggataggaaaagatttgtcttactggcaggaaaagggtttgaaataaaaatacctaaggctactcatagcttaaacgataatgaaaatttaaaaaagtggataactgtaaaggaagctttagctggaatggttaaaccaatatccttagatgaagcaaataagaaaggagggccaaaagcttttaactggcatgttatccgaaaacaaagtgatatcaatattgaaaggctaaaatatctaaagcccggccgtccacgtttcgatttacctgatcatttaagaccaaactgtcataaaggtgataattcatcttttagcaatgtatatggacgaatgagttgggataaagtatccccgactattacagggggatgtaccgtactgagtaaaggtagatttgggcatccggaagaaaacagaacactatctgtaagagaagcggctcgtttacagacatttccagacaactttatttttaatactaattttatcgatagagtatgtcaaataattggaaatgctttaccatgtaagtttgcctaccatatgagtaaggcttgcttagactcattaaaaatgcttaaagaataa

SEQ ID NO: 269283 - DNA, 123 bp, Klebsiella pneumoniae; identical to SEQ ID NO: 80537

SEQ ID NO: 269284 - DNA, 609 bp, Klebsiella pneumoniae
atggatgcgctggagcgctacagcgaaatcatcaccccctgggcgacgaaggttgctgagaactttaccgccgacattgcgcgccagaatgaaaagcagtggcgtcagcacagccggaacatcagcgcagagctgcgcaacatggttgaccgcgcccccgtaggtcaggtgatgaaatccatcgtcgccgagcaaattaagtacatcaaatcgctgcctcttgaggccgccgatcgggtgtatgacattcagaacaaagccatcgaggccgttgtgactggtggccgcgctgagccattcgcgaaagagatagctgcgtccggtgacgtgtcacgctcacgagcgaaccttattgcccgtaccgagcttggacgcgcaaccggcgcgctggatcaggcgcgtgcgctgtcaatcggatcgaatggttatatctggcgtacagccgaagatggcgacgtcagacattctcatcgggagatggagggtaagtttgtcgaatggggtagacctccaacgcttgacggcatgaccggtcacgctggcgagctcccgaattgtcgctgttacaaagaaatcgtcttccccaaccctcattcttatctcgcctga

SEQ ID NO: 269285 - DNA, 942 bp, Klebsiella pneumoniae
atgattacttttgatcaggcaaccgttgatagctctggtgcctttctcatcggggagctggagcgactcgaccagacgctgaacctgccgctggtgggttatacctggacccgcgatattcagttgcgtgaagacgtttctatcgcagatgacatttccagctggactaacaccagctttggcgctgcgggtactggcgcaaatcctaacggtaaaaactgggtaggcaaagactccaccgctattgctggcgtgaacgttgatatcggcaaagacggcaatccgctgaacctctggggtatggaactgggctggaccgttgtagagctggcagcggctcagcaggtaggtcgcccgattgatacccagaagtacgacgggatgcagctcaaatggcagatggacaacgacgagcaggtttacatcggcgatgatgcgctcggcctgaaagggctggcaaaccttgtcggtgtgacgctgaacaacgcgccgaagacctgggcgaactccactaacgacgagatcctcgatagcgtgaacagcattctgtcgaatgcatgggcagcatccggttattccgtcgtgccttctgatctgcgcattccgccagaacagtattcactgctggcgagccgtaaagtttccgaagcgggtaaccagtcgctgctgacctacctggctgtgaacactatcgctttccaccagaacggcgttccgctggaaatcaaagcggtcaaatggctgaaagggcgcggggttggcggtaaagaccgtatggtcgcctacaccaacgacaagaaatacgtgcgctatccgctggtgccgttgcagagtgttcctatccagtatcgcggtctgtatcagattgcgacctactacggcaagctcggtgcggttgagccagtgtacaaagaaaccctgtcctacgtggacggtatctga

SEQ ID NO: 269286 - DNA, 369 bp, Klebsiella pneumoniae
atggcgaaagaaaagctggttaccatccatgttcacaccccgtttacgctgacgctcggcgatcagtcaaaacaggagtttggccgggggcggcataatgtgtcggaagaggtcgcggcgcactggttcacccaggcgcactctgagctttccgaaagcgtgattagcaacaccgatgatctgcaacccattatcgacggcctgcaagcgcagattgccgataaagatcagctgattgccgatctgaaagaagcgctgctcaagctgcaggagcagaacgacggcctgcaagcgcagattgctgccgcccagactggcggtaatggggcgaaagatgtcaaagaatcaaagcctgccaacagtaagtga

SEQ ID NO: 269287 - DNA, 1161 bp, Klebsiella pneumoniae
atgacgcagggcttacctgtatccaacgttgtaaacgttgatgtgatcatctcgccgaaagcggctactggtcgtaacttcggcgcgctgctgatcctcggttcttccactgtcattccggtgcaggagcgcgttcgcctctatgcgtccgttgaggacattggcgaggacttcggagtcgacagcccggaatatgaagcggcgcaggttttcttcagccagtcgccgaagccgacgcaggtttatattggccgctgggcgaagacgctgacctcttccgaaggtggaagcgtggaaaccattgtgcaagctgttaatgcctgcctgcaatataccaactggtatgggctggttgtcgctgatgatgttgttgatggcggtgatgttcttgatgctgacgacgtgattgaggttgctaaactcatcgaagcgtccagcctgagccgcattttcggggtaacatctgccgacgccgagattatcagcacgacctcgacgaccgatgttgcgtcgaaattaaaggctggcaagtatgcccgtacctttattcaatattccaccagcagcccttatgcagcggtttcagctttcggtcgcgcgtttactgtcaatttcaacggcagcaataccaccattaccctgaaattcaaacaggaaccgagcgtaacctacgaaacgctgacggtaggacaggcggcggctgtggatgcgaagaatgcgaacgtgttcgtgtactacgccaacgacacggcgatcctgcaacagggtgttatggcgaacggcgacttcttcgacgagcgccacgggctcgactggttgcagaactacgttcagaccaatctctataacctgctttacaccagcaccaccaaaattccgcagactgatgccggtgtgacccgtctgctttccaacgttgaacagtctatggatcagtccgtcacgaacggtctggtagcggctggcgtgtggaatggtggccctatcggacaactgaattccggcgatacgctgaccaaaggctattacgtctatgcccagccgctggtgcaacaggcgcaggccgaccgcgaagcgcgcaaagcaccgttaattcaggtggcctgtaagctggctggcgcagttcattatgccgatgtgcagatcaacgtggttcgctaa

SEQ ID NO: 269288 - DNA, 441 bp, Klebsiella pneumoniae
atggcaacttattcttttctcgatgtaaccgcgtcgctcaccgggccgacaggcgttatcgatcttggtcagggttctgcgaactctgaggaaggtatcacccagactatgggcggcaacaaaaacaccatgaccatcggtgccgatggcgaagtgatgcacagcctgcacgccgataagtcaggcaccattacggtgacgctgctgaaaacctccccggtgaacaagaagctgtctctggcgtataacgcgcaaagccagtcctctgccacctggggcaataacgtgatcgtcattcgcaacacggcatcgggtgatatttctactgcgcgttcgtgtgcattccagaaacagcctgatttcaataacgccaaagagggcggaaccgtcgcctgggtattcgactgcggcaagattgaccagctgctcggggagttttaa

SEQ ID NO: 269289 - DNA, 426 bp, Klebsiella pneumoniae
atggaattcgaaattaaaggcgtgaaatatcgcaccgcaaagctcagcgttttcgaacagctgaaggtgtcccgcaagctgttgccggtgctggccgggatggtttctgacttccggagcgttcaggagaaaatcagcagcaaagacaccgaaggcgcgatggctaccatcctgccaaaaattgcgaatgctgtgtccgatctgagcgatggcgacgtggacgctatcctgttcccctgcctttccgtcgtttcacgcgagcacatgaaagcctgggtgccggtctgccagcatggcgaaatggcgtttgacgatatcgacctgctgaccatgctgcaactggtggcgcgggtggtcgccgactcgctgggaaattttttgcaaggactccctaccagcgagacgcccaccccgccagcggaataa

SEQ ID NO: 269290 - DNA, 2019 bp, Klebsiella pneumoniae
atgagcggtaacgcagatacgattaaagatttccttgtttcgctgggattcgatatcgatcaggctggcgctaataagtttgaagccgtgctgaaaggcgttaccgcgaacgttctgaaggtcggcgcagtggtggaaggcgcagcgctgagcactgtcggatttaccacccagatcgcgaacggtctggataaaatttactgggcatcccagcggacgggggccagtgtccagggcatcaaagcgctgggctatgccgcatcgcagaccggtgccagcgccgagtcggctatgtcctcccttgaaggactggccggtttcatgcgtagcaatccgggggcggagggcttcctgaaccgtctgggcgtacagacccgcgatgccagcggaaagatgcgtgacactgccgccatctttactggcgttgggcaaaagctcaacaacatgccatattaccgcgcgaagcaatacgcgcagatgcttggcatcgatgaaaacaccctgatggcaatgcgtcgcggtatcggccagtttagtggcgaatacactgcgatggcgaaggcgatcggctataacgccgatgtggccgccgtcagctccaataaattcatgacctcgctgcgctcctttgggctgatggcaggcatggcgcgggataaaatcggctccagtctcgctgatggacttgctggctctctcgacaggctgcgtcgacaaattctggaaaacttcccgaaaattgaaggcgcgataaccagcaccgtcaaagggattctctgggctggtgagatggtaggcagggtaatttaccgccttattcaggccgccagtgatatccgggcctggtggatcgggctggatagcgacacacaaaagcttattcagacgcttggtggcttgcttgttgcctggcgattgctgaacgcagcaatgctcgcctctcccgtctcgtgggttttggcgctagctgcggctatccttttgctctacgacgattacaggacgtggaaagagggcggaaaaagcctcattgactggaaacagtgggagcctgcaattgaaaaagccaaagcagcaattctatggcttcgcgacaaactgctcggactgaaggacgatgttggaggctggcagaacgcttttgaagtgctggcaacgttcgtcgctggaagttgggcagcaagaatgctgcttggtattgccaaagtcggtcgtgggtttagcccaattcttgccgcaatggctgctatcagcgcctgggataaaattggccaaatccaggaagaggcaaagcgagaaggaaaagacgtaggtcaatacctggtcgatcgcatgaaccagaagcagggtagtactgatggtcttctgggaggtgctaaccaggcgcttaatcgcctctattcatggtgggacagcattaccgataccggcggcgcgaccaatgcttatgatgcttatgggacagtaaaacgcccacaggcaactaaggcaggcgctcagctgctgggttggatggcacccatgatgggtaagctggaagcgatgtataacctcccggcaggactgctccgcagcgtcgctctgacagagtcgggtggaaatcagtttgctatttcaggcgctggagcccaggggctattccagtttatgccgggtacagctcgtgatatggggttacgcggcaatgacgtttttgaccctgtaaaatcagcggaagcggcagcacggtatctctctatgctcctgcaaaagaatggaggggacctgaacaaagctctggcctcctataactgggggattggtaatgtgcagaaatacggcatggcgctgatgccacaggagaccagaaactacataccccgggtgctgagcaatatgccgggtggtggggggcaatttcaacagcagaacacctacaacatctatggcggaagtgctcaggagatagggagggaggttagccggcaggttgatgaaaaagcgttggcgttaagcagaaatcaagcggggatgggttaa

SEQ ID NO: 269291 - DNA, 624 bp, Klebsiella pneumoniae
atggatattctctctaccttgtttcaccagcagaaacggcgacttggcccaaatacaaacctgattgttccgagtgtggttatttctgaaaagcataatgacacactggaaattaccgaacatccggtggaggtcggtgctgcaatttctgaccacgcctatcgtcggccatatgaagtggtgatgcaggtcggttttgctggtggcggttcgctgcttgatttgctggataccacttcctttggggtaagtgcggggctgagcccgaaggaggtctatcagaacctgctggacctccagaacagccgggtgccgttcgatgtggtaaccggaaagcggatttacaccaatatgctgatccgcgcgatagaggtaaccactgatcgcacgtcagagaatgtactctccgctgttctgacgctgcgcgaggtcattattaccagcaccactaccaagcaagtagcggctaaagccgatatgaagttgggtgccaatacctcggcagtgcaggatagcggggtaaaaacgtctaagccggtagctaatgaatcagcgcttaaatcgtcgggggtctttgatgggcttaaaggcacgaggcttggcaacattataggtattcagtaa

SEQ ID NO: 269292 - DNA, 303 bp, Klebsiella pneumoniae
atggcaatcagagaaataccgctctcacctgagaaccagaagttttctatatctctggcggggcagaattatcagatgtcggtatcgtggcgcgcatcattctggtgtctggacatcatggatagcggaggctctgacctgattaagggcattccgctaatcaccagcgctgacttactggcccaatacactcatcttgggctgggatttgcgctttgtgtgggttgcgataacccggcgaacgaaaaccccaccgaaaccgatctcggtataagcagccatctctatgctgtaacggagtga

SEQ ID NO: 269293 - DNA, 1068 bp, Klebsiella pneumoniae
atgtctcaaaactggatgcggcattttgagctacagcttgtcgactcaaagggaaacaccactgattttggtggcttcaaggtcacgtttaacatcgactggtttaatatcagcagcgaaacgcgcgtgggcaccttcaaaatctataacctcgcggcatctaccgttaacaaaattgtaggtaaagaatttacccggatcagaatcatcgccgggtatgatggcattgctccggatgtttctgccagtcaggttggcgttgcgcgaacggtaaaccccgatgaagtggggcagatggacggccgaaattatgggctgatctttgatggcgagatccgctataccatcaccggcaaagataaccccattgatagctttgtgctgattcaggcggccgattcccatcgggctttcgttaccacgatgaccgcacaaacccttgccgccgggtatacggttgcagatttcaaccgtgccttgatgaaagactttaacgccaatggcgtgacggaaggtaacacaccggccatgccagcgacggtatacccgcgcgggcgagtgctttttggcatgacccgcaatcttatggataatgtcgccgagcagtgcaaggctgactggatgtttgttgatggcaagcgggaaatggtggcaagaaatgaagtggtgcacgatgctatcaaactgaatagcgagacagggatggttggcatgccgcagcagaccatcggcagtggggtgaatgtccgctgtctgattaaccccaacattcgaatcaatggacttatcgagctggatcagggctcagtgtatcgtacggcgctgggtagcaacgatatagctatgacgcgggggcgcatcaccgaccagaacaataacggcaacatcaccattgaaggcaccacggcgcaacctgccagcatcgcaacggatggcgtttatattgtgcgcgggattatgtacactggcgacacaaggggccaggcgtggtacatggatatgatgtgcgaagcgcgtggcgcggcggatctccgttcggcgtcgtctttacagcgggaggtaggatag

SEQ ID NO: 269294 - DNA, 357 bp, Klebsiella pneumoniae
gtgaaaaagtggattgttatcggactctgtttccttcctgggttatcgtttgctgcgaaccctggcggtatcacgcttcagtgtggtggctataaattagagttgattcctgattcactgttcaggattaatggggagaccgttacctcccagaaaattaaaacgctcggcaacggcaatggaatgaaggccgacatgggtcttatgccagccaaagacggtaacaattacgggttcgagtttattcgtcgccctggtaccgaaacgcgtttcctgaacgtccaactgctgcagaacagcatggacgcgccgaaaatcatcgggtcgtttccctgcaaaaaaatccattcgaactag

SEQ ID NO: 269295 - DNA, 1200 bp, Klebsiella pneumoniae
atgtctttggacctcgacacactcggcttatcggcaacggtaaccgctgaggggataagtgcgcccgactatcagaccgttctggacaccatcaccggctattttcagcagatttatggcagtgatgcctacctcgaaccagacagcaaagatgggcaaatggtcgcgctggtagctcttgccgtgcatgacgctaacaatactgcaatcgagatctacaactcgttttcaccgacgacagcgcaggccgcagcgcttagcagcaatgttaaaattaacgggatcacgcgaaaagtagcgacaaactctactgctgaccttctgttaaccggtacggcgggcactactatcacgaatggctccgcacgggataaaaacggcattatctggaattttcccgcgagtgtatcgatcggcgttgacggtactgtgctggtgacggccacatgtgcgaatagcggttcggttgcggcgatggccgggacgattaccactatcaacacgccgacccgtggctgggcatcggtaaccaacccggcggcggccaccataggcgcaccggctgaaaccgacgcagagctgcgcatcaggcagggacaaagcgtagcgctaccatccctcacaccgtttgaggcggtagatggtgcgatagcaaatatcagcggcgtaacgcgacacaagctgtatgagaacgatacagataccactgatgcaaatggcctgcctccgcactcaatctcggccattgtcgaaggtggtgatgcgacagtcattgcaaacagcattcgtggtgtgaaagggcagggcgtaacaccctacggtagtacggtgattgttgtgcctgataagtacggaaacccccacccggttggtttttcaaggccggtcgatgttcccatttacgtgaaaattactatcgagccccttacaggctacacatcccaggtcggcgaagagataaaggcggctgtatctgcctatattaactctctggcaatcggcgccagcgttcttctcagtcgcgtttactcaccggctaacctgggcgtcgttagtggaggcaatgcccggtattacgacattaccgaattgctgattgggacatcttcggcaggagtggctgcgaccaatatcgtaatagctttcgatcactccgcatcctgcagggttgcggacattaatctggaagtgtctgtatga

SEQ ID NO: 269296 - DNA, 885 bp, Klebsiella pneumoniae
atgcctaccaatgattttaaagcttttgcaactggaaacagcgcaaacgtaatttctcaggctgattatttagcccttgctgcgttagtaagcggattttcatctggtaaagcttcttccgcgcagataaataaagccctacgccagagcacggttatggcgtcggtccttgcgcaattcatctcagattctgcaggtgttgatgttctggataatgggaatacagctcagattcttgcgaaccttaagaccggcatgacggctcttacgccggggcgacttattaatgttcagtattttactgcaggtggacagtacaccccctcggcgggcatgaagttcattctggctcacatgattggcgggggaggagcgtcgggtggaacgccagcgacttcatcatctcagactggtggtgttgccgccggtaacagtggtgcttacgcatatatcaaagcgtacgcatctgatattggtgcaggtaaggctgtaagcgttggtgctggtggcaagtcacaggtaaatggcgccgggtttgcaggtggtacaaccgcaattgcagatatcgctgatgttactggcgggtatgggtcaggcccgggatcagtcggcgctactaccgcagttgcgcagccatcatatgacaagccagttatcaataagtataacaagaccgaggtgcttgctttcagcctaggttcgcaggcgtggaactttcttcaggcagcgacaggatcgggaaccggatggctttctccagcatctcctttccctggtggtgagagagggcgtggggggtctggtatttttgttaacgcaagctccgctgctcaggctgggcttgcgggaaatgatggcgcaatactgattatggagtacgcgtaa

SEQ ID NO: 269297 - DNA, 396 bp, Klebsiella pneumoniae
atggttccggaaagctatgcagttgttaactcagatggcctgataattaatgttgttgtctgggatggcgtcacagaatgggcgccacctgaaggcactcaggcagtaaggtgcggagataatctttgcgggattggtggaacatacaaagatggagtttttgccgcgcctcctgagccggaggtaccaaaagaggatttgatttctcaggcagagcagcaaaaggctaatcttatagctgaagcaagccagacaatttccatacttcaggatgcagtcgatctggaaatggcgacagaagaagaaaaaacgcagctaactacactaaaaaaataccgcgtgcttttgagccgggttgacacttcaaaggcgcccgatatcaactggccaaaataa

SEQ ID NO: 269298 - DNA, 1728 bp, Klebsiella pneumoniae
atggaacaattcaaacagttcagtattgagaagcaggctgccattaactcgctgctacagctgcgcggcatgctggaaacgctgggcgaaatggagatcgatgtcaacgacgatctgcaaaaaatcgcgtcggccatcacagccgttgagtccgacgtgttgcgcattgccctgttgggggctttttcggacggtaaaaccagcgttatcgccgcctggctcggcaaaatcatggaagatatgaatatctcgatggacgaatcttctgaccgtctgagcatctataagccggaaggattacccggagaatgtgagatcgtagataccccggggctgtttggtgataaagaacgagaaatagacggcaaacaggtgatgtatgaagatctcaccaaacgttttatttccgaagcgcatctgcttttttacgttgtcgatgccactaatccgcttaaagagagtcacagcgccatcgcaaaatgggtgctacgcgatctgaataagctgtcatcgaccatcttcatcatcaacaaaatggatgaagtgactgatttaaccgatcaggcgctgtttgcagaacaggcggccatcaaaaaagagaacctaaagggcaagctacagcgcgcggcaaacctgaatgcgctagagcttgaacagcttaatattgtttgcattgcttcaaatccaaacggtcgtggccttcccttctggttcaacaaacctgaacattacgaaagccgctcacgcatcaacgatctcaaaacagttgccgctgagattctgaaaaccaatgttcccgaagtgctgctggcgaaaactggcatggatgtggtgaaagatatcgtcacccagcgtatcaccagcgcccagctgcatctcagcaaactcagcacgttcgttgcgaaaaatgatgaagatacttcgcgttttacatgcgatatccagcaaagccgtaacgaggtcaaacgtctggctggcgaaatgtttgaagaacttagtttgctggaaaagcagctgatgagccagctacgcccgttggagctggatggcattcgcccctttatggacgacgaactgggctataacgatgagggcgtcggctttaaattacacctgcgtattaagcatattgtggatcgcttttttgcgcaatcctccgccgtcacgcagcgactgtcggacgatattactcgtcagcttaattccagcgagagcttcttaagcggagttggcgaaggggcatttaaatccctcggcggcgtgtttaaagggatttccaaaattagcccggagacgattaaaaccacgatttttgctgcacgcgataccattgggcaattaacgggctatgtctacacctttaaaccgtgggaagcgaccaaactggctggcggcatcgctaagtgggctggtccggccggggccgcatttaccatcggctctgatctatgggatgcctataaagcgcatgaacgtgagcgagagctggaagaggcgaaaaatgagttgacccggatgatcaaagatccgttcagcgatatctatagcgtcttgagttcagatgaaaagacgttcgctttctttgccccccagattcaagagatggaaaaagtcatttgcgatctgacagaaaaaagcgacaccattcggaagagccagcaaaagctaagcatactccagcagaagctcgagcagtttaaccgttcgagcgagcagcaagtgtcctga

SEQ ID NO: 269299 - DNA, 1701 bp, Klebsiella pneumoniae
atgagtaacgcactagatcttcaggctagtaccacgtcagtacgttcgcaacgaaagtcctcattgaatattcaggagctcctgaataaaacgctgcctcacctggttcagaccataatcaggaatgagagattaaaaaacaccctacttcaggttgatggtctcattatcggtaccggcgaggcggattttaccaaagggaatacccgctacgccttacatattgacgataagaccttccatctgctggacgtacccggcattgaaggcaatgagtcacgctatatcagccaggtgaaggaggctatcgccgaagcgcatatggtagtgtacgttaacggtaccaacaaaaagcctgaaaccgccaccgccgaaaagatcaaatcatacctcgaatacggtacgcaggtttatccgctggttaacgtgcgtggatatgccgacgcctatgaattcgaagaagatcgccacgatctgatgcagcaaggaggcgcaggagaagcgctgaagcaaaccgtcggggtactgcaaccggtgctgggctccgatgtgctgcttcccggtaactgcgttcaggggctgctggccttctgcgggctagcctatgacgatgcgacgcaaagcaccactatccacccctcgcgcgcgcacaacctcgccacgcaacagaaacgctatttccagcacttttcttctcgtcgggagatgcaggaatttagccagattgacgccattgcccgcgtcattcgcggtaaagtcgccacttttcgcgaagatattgttgaaagcaacaaaggcaaagtgcgagagtcactgggtcagtatctacaggtactaaacacgcaactcaccaatcatcgcgcatttctaaagaaaacagagccggaatttgacaaatgctgcgtcgcctttgctaacgccattgcagcctttgaacgccgaatcatcaataaccgccgtaaccgctggaacgactttttcaatgatctgatggaaaaaagcgacgacattgttgaagacgattttggtgataaagaggcgattgcccagcgtattagccagcagtttaaatcgcgtcgcgtcgaggtgaaaaaattaatgctccaggacactgaggagggcgttaaggccttacaggagcagatgattcaagcggtggctcgtttgttgcaagatattaagcacattgagttccagcagcatgtcgatttcgcccacggcggtgaattcgaatttggtcgcgagatcgcgctgggttatgaccttgggttaagggatttcggctcaatggcctttaaaatcggcagctacgccttaagcggcgccacagtcggtagcgccttcccggtgatcggtacggccattggtgccgtagcaggcgctttagtcggcgtcgtcatgaccgttgtcggtttctttaccagcaaagcgtcgaaagttcgcaaagcgcaggggaaagtgcgcgacaagctagaaagcgccagagataaagcgctggacggtattgatgatgaggtccgtaacctggttgcggctatcgagaatgaactgaaaagcagcctgctgcaaaaagtgaatgccatgcatacggcattgcagcagccgatcgccattttcgaacagcaaatcacgcaagtcacccatttaaaaaatcaactcgagaacatgccttatggaacaattcaaacagttcagtattga

SEQ ID NO: 269300 - DNA, 669 bp, Klebsiella pneumoniae
atgaataccgcagaagactttaaccgcctctatgccgacgtttcacgcaatattcagcagacgctgactgatatcgctgcacttcatgttgaaaatgaagagggaaagcagcagctacaatcgatggtcactcagttgcaatccctgcaggatggctttaaccagaagctcacgtggctgcaaaagcatgccgaatgggacaaatttaccctggcattctttggcgaaaccaacgccggtaagagtacgataatcgaatcgctgcgcatcttgtttgacgaagaatcccgccgccagctgctgcaaaaaaaccacaacgacctggaaaaagccgagctggaattacaggaaatctcggaacgactgcgcagcgacttagggcggatctatagcgatgtagtggataaaatcaccgatatcagtttttccgctctgcgtctgatgcaaattctcgacaatgaaagcgccctgcgtcacaaacgggaagaggaagagagcaaggaacgcctgctggttgaaaagacggaaagccagtcgcgattgcaaattctgcaaaaacacaccagcgccaaaacacgattaaccctgtgcattgccgccgtcatctcttttgtcgcaggcgcaggcgcgagcgccgccgtggtgttcaatatgatggcggggcaatag

SEQ ID NO: 269301 - DNA, 1185 bp, Klebsiella pneumoniae
atgtccacccccaaacgcttccgttttactaatcagctcattaaatccctgccccctaacacatccgatgcacgcagtaccgatgccgaatacagcgacaccgagatttccggcctcaagtgtctggtcagcagaagagaaggtcgtaaaaagtttttgctacgctacctttatcatggacgaaaacgcgccatcgccattggtcactggcctgaagtggacgtcaatcttgctcgtcagattgccatagaacacaaacgttcccttgccaccggcactgaccctaagcaggagcgtgaaaacaagagaatggagctgacgttcgatgaactctttaatcagcattatctgccatgggcaaaatccgctaaacgcagttggggaaaggatgttcagcgctaccgcgatcatatccgtcccgccattggtcagaggctgctgagcgatatcacaccagcgagcattctgcgccttcagcagacgttaagtacttccctgtcagcggctacctgtaaccgtgtcatcgtactcattaaagccgtctttacatgggccggaaggcaaagcatgacctctgttcatccggcaagggtggtacagcttctcagggagaacaacgcccgacagcgttattttaccgaggacgaaattcgtcgtatttttctctccgccgataacgataccagccccgtcgcggcccgctatgtcaaactgctgttactgaccggccttcgtcgtgatgagctgcgtctggctaagtgggagcatgttgacccggttaaacgcaccctgtggctccctgaaaccaagaatggctatggacggattgttcaccttaactcactggcgatggacgtaatcagaacgctgccaacgcagcggggaaatccgtggttgtttattggtaaaaaacagggaatgccgctgagtaacccggttaaagcctttcagcgtatcgtgcgtcgggcgggaattttcgacaaggaagtgtgtattcatacctgccgccattcggttgccgccctcatcgtgtcctacggcggaacactgtatgacgttcaggctcaactggggcaccgcagcagtcagtcttcacaacggtatgcgcatcttcatcctcagcgcttacagaacaccagtcagttactggcggaaaggataacggctcagctaccgtccttgtga

SEQ ID NO: 269302 - DNA, 357 bp, Klebsiella pneumoniae; identical to SEQ ID NO: 121102

SEQ ID NO: 269303 - DNA, 1926 bp, Klebsiella pneumoniae
atggtaatacacatgaataaaaaagtgacaactaatgttcctaaggtttccgggattaagcgtattcgcgtttttgctgaccgcgataaaaatttcaccaaaatgtcggaagcaattatcaggcgtgctgaaaacactgaggtcggtgaagatgatatcgcttcactcggtattggtgatgggctgccacggcattatgtgaatacggctaatggccttttctacatcggtggacagaaacctgtgcaggtttgtaccacgccagttgtgcctgtcgccctgttttgtggaaaagataaggagtccggtcttgggatcagcctgatgaccggtaacgggctgggtaagtatgttaaggccctggtgcgctttgaggatattgttcagagcggtgctcaggtagtaggcaaactggcagatcgtggattttgtgttggctcctctccacagcagtttgccctttttgaccgttttcttcagcgctgccggagtttaccgctgcctgtctatctgatggcagatgcgatgggattcgtttcggaggatatggcctttttacatggttatgagcccgttgtgacctctctgaccgggtttgattatctgctgccgggattccgcgtgcgtcccggactgcacaaaggtggggctctggaggagtggattaacctcatccgggaaaatgtccatggctgggcgcagacctttgcgctgagtgcgtcctttgcttcgatgcttctggttcctgccggtatggatgtgggcatgtttcattttcacggcgtatccaccaccggtaaaacgcttctcctgatgctggctgcatcggtccatggtgatggcagcgagccgggtagtggggggaatgtaaatattattcgctggaataccacgcctaacgcgatggagcgccttctcgctgactattccggtctggtcgcctgcgtcgatgaactgggtgcgagtaatcataagcaactttcctcactgctttacaacattacgtcaggtacggcaaaagagcgcctgaaccgtggcctgacggcagatgagccgtttaaatggcgcatgtttattctctccaccggtgagatgtcaatctccgaaaagctggctgaacagaaagccgtgttacagggagggcaggagcacagggccatcagtatggaactgttgcctgaggatgctcaaaaaccggatgaaccggtatcagaaacacgtgcccgtgcagatgcactgaagactgggctggcagaggcttatggtcatgccgggcctgcatttatcggcaaactgttatccgggaaaaatacggctggcggtcttcgcacctacgcagagttttcatcctggctccaggaacagacagatgattgctgtaacgcactggaagaggccctgagggatgaggggcgtgatattacccgcgttcagcggcgcggactgaaaagatttgcgctggtatggctggcaggagagaaggcgctgaaatatggccttttacctttcgaaagcgatgcggtggctgaatccgttatgtccgctgcacgacgctggctggatgataaccagaatcagtataacccggtgcgtaacatgctggaggagcttcagctgacgctggtgacaaaaagcagcaggcactttatcaccctgcgtgacgaacatgcccgatgcccgggagatatgtggggattcgtccattacaaaaccggcgacttcctgatttatgaatcggtgtttgaaaagctctgttctgaaaagggacttaagaccgttgatgtggccagaccgttagagcgttccggttatctgcttggcgaaagtgccggacactataaaaaaagagcgctgaagacgatggcgcagtcttactaccaggtcaaaaaagcgtttctgaaatgcaatgtgatgaccgaattttaa

SEQ ID NO: 269304 - DNA, 1413 bp, Klebsiella pneumoniae
atgggcttgaaagtgatgccacgagtaaataagcttatcccattgttggccgacatattaaattactcattatcatctgaattttcagaggaccatgtacatattatgaatgttaattaccctttaaataaaataacgcaagtgctggatgaaaagagcatcacagctgctcataaaaattccttcaatgtagatgtggaagctcaggggtattccgactctggagtatctgatgttgtagaatatccaggggttgcacctaaaaatactggaggtgtttttactaaagccctttttgatgaatataaaatccgtgcagtacaagctgcacaaacaatcgagaccagcgataagaagttaaccggacttaaggcaatattctatccatcaggtcgcattaaatttattgtccgcaaaagtattcgcggaaagaatatctacgttgccgtaggaggctacccggaaatttcaattaaagatgcaagggagcatgcctttaaaataattcaggagctcaagaccgccgttgaggcttacggtgagcgttttcttactcacagtaaaatgacgtttaatgagcttgtggatgagtatgagaaaagcgtactcagcacgggcgttaagcgttcagctaacaccgacctttctaagatccgtaaatacctgcgccctcttctcggtgacaaaaagctggcaggtatgacggaggcagatattctgagctatctgcataatctcgatctcaagcctgccacccgcaaccgccatctggcgctcattaaagcggtgtttacctgggctatacgcatgggatacatcagccgttctccggcgctttatatcaaagcgctgcctgaagtgacgtcagatcgccgcgccatggatgactcccagcttcagcgctggatggaagtctgtgagtgctggcgtaatggtaaacccgatcatgaagcccttactcttctcatgttccttgccctgacggggctgcgtctgggggaaacccgtcaccttcgtcttgaagatgtggactggagccgcaaggttatcacccttcgccataccaaaaacggcaaactacgccgtgtaccggtatgtgataaggctttcgttcttctgacagaacagcgtcagcatctgggtgatgaaggctgggtatttccgggcaagggaaccgacaatccggttgctgagccacgtcgcctgcaaaaacgactttgtgaggctgcgggtattccaccgttcaccatccatgagatgcgtcatacctttgcgacaaagctcattgagagcggggccgacattcacaccatcaaagatttattgggtcacagcactatcaaagtaaccgaaatatatgtgcacagttcgcccgcgcgttaccacgaagtcgttaaccgggcgatggggtaa

SEQ ID NO: 269305 - DNA, 354 bp, Klebsiella pneumoniae; identical to SEQ ID NO: 119113

SEQ ID NO: 269306 - DNA, 432 bp, Klebsiella pneumoniae
atgagtaagaaaaaagtcgctaccgaagccgtcgtcaccgaaagctataccgtgttctacaggggtgaagccgagaaaatcagtccatacagtaagggactgctgacgtatgagctgggtaaggaggatgaaaccggaagccttgccctgcgtttaaccgccaatggcgaagggggcctgttctcccgtgaatggatagcgcttgatgcgattcacgccattctggaacagcagccagacagctttccgtcccgtgtatttcgcccactgtttggtcagggcagcaccaataacgcagggtttcttgccgctgtgctcagaagtccggatatctgccttatcgaagcggacagcagcagactctttatgcaccgttgttatgccgactggcaacatcgtatgacgcagcttgctgcgctcagtcaggactaa

SEQ ID NO: 269307 - DNA, 429 bp, Klebsiella pneumoniae; identical to SEQ ID NO: 119111

SEQ ID NO: 269308 - DNA, 465 bp, Klebsiella pneumoniae
atgtaccggcttctgctgctgaacttcgtggattcatttatcgataactgcattctgtcctgcgtcgatgaaccggcttacggtggtatcgtgcagtgcgaactgctttttggccttgccgcacacagcggtatctatgtgggtaatggcaacattgttcatcttgacggtgacggcatcgttatcagaagtcaggccagcgagtttcttgaccggctcgatggctggaactccgctatctcggtgtataccgactgtatggatttaactccacagggctgtacgcaggccgctgaacgggcaaaggcggcagtgggtcagcgctatacctacagcctgctggattttaactgccaccggtttactgcccgctgcgttaccggcaattcatgccctgatatctggcttgccagacacctcgatagatttcagaaaggggaccgatggcgcgtatggcaacgatga

SEQ ID NO: 269309 - DNA, 240 bp, Klebsiella pneumoniae
atggcgcgtatggcaacgatgaatgttaatcgtcgcaggcaacacgctaccggacagggagaacggcttatccggctgaccatggtgctgttttacggtcagacaatatctgttcgctacatcacccggcagtttgacgtatctccccggaccgcaagacgggacctcgctcagctggcctttgtgctggaatccgctggccctcaccgctggcgactggctccctcgctgaaaccctga

SEQ ID NO: 269310 - DNA, 384 bp, Klebsiella pneumoniae
atgaaaattttaaaactgttaaccgccgcaattctgctttccgccttcagccacagcgcgttcgccgacgagcaggctgacgctcagatgataaccaactcgaccttctgcgcgatgtactccacccgcctgacccagaccagtgacagcggccttcaggtaaaaggcgttaatctcaatgcccgcttcaacggaccggtattcaacagggtacttcaggtgatgaacaagacctatggcagaacctggctcgaatcaaatgcccgtaacggcagcatgaccgccatgcaactttcgcagtcggagcttctgtataacccggaatatgcccggcagtgcgatgcttttgcggataaagtggaaaaggaatggcgcggaaagtaa

SEQ ID NO: 269311 - DNA, 750 bp, Klebsiella pneumoniae
atggctacctaccgacacgaccccgaccttgagtttctgcgccactgccatcgtgacgatctggatttactggtttctgtgcttatctgcgatccgaaagacggactggcacgcatcacggaaacgctgacctatgatcctcagtataaaaaacacaagcccaaccacccgcgctactgggatgccattgccgccgaggttcagacgtttggggcgaacagctttgccacgctgctccgctggggtaaaggggtgctgtaccgggaaattctcaccgatgcctgcgataaaatgaaggtgaactacaacaacaaatccagtgttgaaaccattgaaatgaatctgctgatgaagatcctggagaaaagtcttgagaagatgacgcctgaccagctaaagaccgtggcggaagaattgcagacaggctacagcaaccccacgccggagttgctgaccatggcaatccaggcggggataaaaacatccgggtttgcggcctatcagatggcacttgttgtcacaaatggtgtggcgaaagccctgttaggcagagggcttaccgttgcaggaaatgccatgctgacgcgtaccatgggcgcttttgccggtcccgtgggctgggtgctcagttctctctggctgctgattgatttagccggtcccgcataccgggtgacgctaccatcctgcatttttattgcctacatgcgccagaagcatctttattcacctgagaatactgacgtttag

SEQ ID NO: 269312 - DNA, 714 bp, Klebsiella pneumoniae
atgacgctgataacacaagaaaacgaacatgacagactggcaacccgcctttccatcatcctgagccgtttgtttcagggtgaaaagctgcatatcgggacgctggcagaagaatttggagtgacgacgcgaacgctgcgacgggatttcaacgtccgtctgacgtaccttgatattgaacagagcaacggcgtgtatcagcttgcctcacattactttcgtcgccgcacggaacgggatatgaagatactggcgaggttgctgcatcttgaccgtctgttacccgcgatggatgccaaactgctgagcctgatgcttgacggggaacgtccctcgccatacaggattatgctaccggagccgcgccagaaacccacccttttcggtgatttcagcagactgacgctcgccatacttaaccagacccaggtgcgtatcagaaccgacgaaaacgtcagccataccgttcatccctaccgtctgctttgcagccatgcggagtggtttcttgccggatgtacgtcatcgggcgtgttcgttatttccctgtcccgaatcaggctggttgaggtattaccggatacaacgtttgagatcgataacacactcatttcgctgattgaacagtctgactttatggaagccttaccccacatgaacattattcatcagataatgcattacggggcaaaacaaccgaataatcgcaattaa

SEQ ID NO: 269313 - DNA, 219 bp, Klebsiella pneumoniae
atgcttgatcttttcactattcgttctgactttgatgacaaagctgaactgatatacgattacctcaatgaggtcattgccaaatgttatactggcagcgttgtttatttcatgttcataattcctcaggtcagtgttaagtcttgctgttgcatctacaagtgcgtattctttatcgataatcataactttctcacttatcatgttaatgtgatttaa

SEQ ID NO: 269314 - DNA, 219 bp, Klebsiella pneumoniae; identical to SEQ ID NO: 121106

SEQ ID NO: 269315 - DNA, 1263 bp, Klebsiella pneumoniae
atgagtgagctgagttatctggaaaagttactggatgggacggaggtagtgtggaagactctggatgatatttctgtaaaaatatcctctggaggcacacctaaaactggcatagctgaatattatgatggagacattccttggctacgaactcaagaagttaatttttgtgacatatgggatactggagtaaaaataactgaatctggagttaaaaactccagcgcaaaatggataccagtcaattgtgtaattattgcaatgtatggagccacagttggtaagttaggtattaataagataccaatgacaactaaccaagcttgcgcaaatatagaagtaaactcagaaatcgctgattataaatatgtattttattttctatccagtcagtatcaatatataaaatccttaggctctggctcacagacaaacatcaatgcagggatagttaaaaaactcctagttcctatcccatgcccggactccccaaaaaagtcccttgctatccagtctgaaatcgtccgaattctggataaattcactgcccttacagctgaacttacagctgaacttaccatgcgtaaaaaacagtacaactactatcgcgaccagttgctgagttttgaaaagggtgaggttgaatggaagacactaggggatgtaaccaaaaaatggtactcaggtggaacacctacagcaggaaaagctgagtattacgaaaatggagatatcccttggttaagaactcaagaggttaaatttagcgatattgacagtactgaaataaaaataactcaagttgcgttaaaaaaatccgcagcaaaatggattccagaaaattgcgtaattattgccatttcaggagcaacagcgggacggtctgcaataaataaaattcctttaacaactaaccaacactgtggttgtttagaaattgatgattcaaaggcattatatcgatatgttttccattggataagtttcaattatgaaaatattaagttgctgggacaaggtgccagaggcgatctaaactcaaccattatcaaaaatttcaaactgcctataccttatgcaaccgatcctgataaatcacttgaagaacaagctcgtattgttgaaattctggacaaattcgacacattgacaagctccatcaccgaaggcttaccccgtgaaatagaactacgccagaagcagtacgagtactatcgtgatttactgttcagcttcccgaaaccagaaaccgccagcaactaa

SEQ ID NO: 269316 - DNA, 339 bp, Klebsiella pneumoniae
atgagcgtaactataaaagacgatcgactcaggactatcgcgacctttgatggcaagaccctgaaagatgatcgactgaggaccatcgcaacgtttgatggtaaagccctgaaagacgaccgactccgcaccatcgctacctttgacggtaaaaccctgaaagacgaccgactccgcaccatcgcaacatttgatgggaagaccctgaaagacgatcgactccgcaccatcgcaacttttgatggtaaaacacttaaagacgaccgactcagaactatcgcgacagttaatggtaatgtcagtattgttgttttggcgtttgctgctcggctgttttaa

SEQ ID NO: 269317 - DNA, 297 bp, Klebsiella pneumoniae
atgttgaaagtgatttacttatcaaaaataaatacagtacacattgtcaatgtatctgaggtttactatggctggggagtggacaaaaaatcaaagtatcctgttaacacatcggcagttttcccaaatgaaaaagtgtgtgtatggaatgtatcttttgcactaccagagtctattagaaaaaatgtgatgatgatggtgcttatgggtattttcttgaatttaagaaagttaatgggaaaacagttctatataactttacctctttgtttgattctcttcccgacggaactttag

SEQ ID NO: 269318 - DNA, 201 bp, Klebsiella pneumoniae
atggttggcatgacgtacagcgagaacggaaaaagtgcgaatttagaactgcgtatccatacttttcgcggcatatcgttacatttagccgaaaatggacgtttgatcgcaaaacagagctatgttggcaaagagggcgccgaagagcgcggcaggggtgagaaaactgaatttttttcatttttgatttttttcatataa

SEQ ID NO: 269319 - DNA, 771 bp, Klebsiella pneumoniae; identical to SEQ ID NO: 237218

SEQ ID NO: 269320 - DNA, 228 bp, Klebsiella pneumoniae; identical to SEQ ID NO: 247847

SEQ ID NO: 269321 - DNA, 336 bp, Klebsiella pneumoniae; identical to SEQ ID NO: 237217

SEQ ID NO: 269322 - DNA, 207 bp, Klebsiella pneumoniae; identical to SEQ ID NO: 248078

SEQ ID NO: 269323 - DNA, 228 bp, Klebsiella pneumoniae; identical to SEQ ID NO: 267105

SEQ ID NO: 269324 - DNA, 300 bp, Klebsiella pneumoniae; identical to SEQ ID NO: 229134

SEQ ID NO: 269325 - DNA, 909 bp, Klebsiella pneumoniae; identical to SEQ ID NO: 248080

SEQ ID NO: 269326 - DNA, 1287 bp, Klebsiella pneumoniae
atgccacagattgaagaattgcgtcgtcagcgtgcgggtatcaacgaacaggttcaggccctggcaaccattgacgccagcggcagcacgctgactgcggagcagctgacggagtttgcgaacctgcagcagcagttcactgatatcagcgccaaaattgaacgcctggaagccgccgaacgtgctgcggcgctggtcgcaaaacccgtgaaagcgactcagcaggcccccggcattattgttaagcaggagcctaaacagtacaccggtgctggcatgacccgactggttatgtctgtcgccgcaggcgcagggaatctgcaggacgcggcaaaattcgcttcagaagagctgaatgaccagtccgtatcgatggccatttccaccgcagcggcgtccggtggtgtgcttattccgcagaacctccacagtgaggtgatcgagctactgagcgaccgaaccatcgtccgcaagctgggtgcccgtcccgttccgctgcctaacggtaatatgacgctaccacgcgtggccggtggagcaacggcaagctacacaggagaaaacaaagacgccaagacatcagaaacacgctttgatgatgtaaaacttacggcgaaaactctgattgcgatggtgcctatttccaatgcactgattggccgcgccggattcaacgtcgagcagctggtcctgcaggatattctgaccgccatctcagtgcgtgaggataaagcctttatgcgcgatgacggtaccggcgatacaccgattggtatgaaggcgcgcgcgacgcagtggaaccgcctgctgccgtgggaagctgatgcagcgatcaacctgaacacagttgacgagtacctggacaagatcattttgatggcgatggacggcaacagcaatatgatcagcagcggctggggcatgtcgaaccgtacctatatgaagttgtttgggctgcgtgacggcaacggcaacaaagtctatccggaaatggctcagggattacttaaaggatatccggttcagcgtaccagcgcgatccctgcgaatctggggaccgggggtaaggagactgagatttactttgctgacttcaatgatgtggttatcgctgaagacggcaatatgaaagtcgacttctcgaaggaagcctcttacatcgatgccgatggcaccctggtatctgcgttttcccgtaaccagtcgctaatccgcgttgttactgagcatgatattggcttccgtcatccggaaggcctggtgctgggtaccggcgtcctgttctaa

SEQ ID NO: 269327 - DNA, 261 bp, Klebsiella pneumoniae
atggctgcgaaaaataaagcagtggagccggaagaaacaggcacacaggacaaccatgcgaccgtggtcgcacaggcagagcgtaaatccgttgtgttccttgggccgcaccaccgttattcccgtggagatatcgcgtactttgaaggatcgcgcgccgaagaactggttaagcggcgtatcgcggtatggccggaggatgccgaacgtgcgctgaaaccgaagccgggagacagcgattttgatactgacattggatga

SEQ ID NO: 269328 - DNA, 912 bp, Klebsiella pneumoniae
atgaattactacattgctataccaacctataatggtggtagtgtttggaaggaagtagtagatgcaattaagaaaaatatctcctcagatgtttttatccatgtcatcgattcctcaagtaaggatgaaacagtttcaattgcaagagaagcaggttttaatatcgtaactattggagggcatcaatttaaccatggtggaacaaggaatcttgcagtatcgaactttgctaaaaaatatgatgtagttatcttcctcacacaagatgcaatacctgaagctggatttattgagaatattatctctgtatttgaaaaccctggagtcgcatgtgcatatgggcgccaactgcctcataataatgccaacccattagctaagcacgcaaggtattataattatcctgctgagagttatattgccagtagagaaacagtaaaagaaatgggactgaaagctgtttttatgtctaattcattttcggcatatcgattatcagtatttgaagttattggtggttttccatcgaatacaattctttgtgaagacatgttttttgctggcaaagcactgctccgcggccataagatagcatatgtcgcggatgccaaagtccgacattcacataattattcagcaatagaggaatttaaacgttattttgatattggagttttccatgaatgtgaaccatggatacgtcataacttcggtggtgctgggggagaagggaaaaaattcattctttctgaactaaaattcttggccgaacattatccacattggatacctgtcgcattcataaataactttatgaaaattttagggtacaaactgggacagcgttataaacatattccgtatagtgtgattcagagatttagtatgcacaaaaaattttggataaaatga

SEQ ID NO: 269329 - DNA, 711 bp, Klebsiella pneumoniae
atgaaaaaaggtttattgatgttcaccctgctggcggcctccctttcaggaacggcgcacgccgatagcgcggcaattaaacagtcgctggcgaagctgggtgtgcagagcaccgatattcaaccatcgccggtttccgggatgagcacggtgctgaccgacagcggcgtgctgtacgtgaccgacgacggcaaacatatcatccaggggccgatgtacgacgtgagcggcgcgcagccggtcaacgtcaccaaccagctgctgctgggtaagctgaacgcgctgagcaatgagatgattgtctacaaagcgccgaaggagcagcacgtcatcaccgtcttcaccgatattacctgcggctactgtcataaactgcacgagcagatgagcgactacaacgcgctggggatcaccgtgcgctatctggctttcccgcgccagggtctgcaaagccaggcggagcaggacatgaaggccatctggtgcgcgaaagatcgcaacaaagcgctggatgacgccatgaatggtaaaggcgtgcagccggcgagctgcagcgtagatatcgccaaacattacaccctcggcgtgcagatgggcgtcaacggtacgccggcgatggtcctcagtaacggcatggtgctgccgggctatcaggggccgaaagagctgaaggcgttcctcgatgagcacaaaaaaacagacaagcggtaa

SEQ ID NO: 269330 - DNA, 168 bp, Klebsiella pneumoniae
atgtatttttatctcaatacctccagccacgccagcaactggcgcaacaaccgtaagatccacgcccgtaagtttctggcaactccagagggtaaagcctggcttgtgagaaagcaggaagaagaagcagagatcaaattagcgcgagcggctaacgcaatgttttaa

SEQ ID NO: 269331 - DNA, 393 bp, Klebsiella pneumoniae
atggcgatcaatcgtctggtttgccagtgtttggctttgtctattctggggactgctgctttcggagttcaggcggagactcaatctttcaaatgtgtttacccgaaatacagtgatcacgagggtattcataatgcaaaaaatcctatggtcttctcgttcatcatcgacaccaagacgaacaaagtgtacatgactggcaatgttagctctgtggaggtgacacctgtccctaatggggtaaatggaaactctttcatagaaactacaccagtcggtaatgttacggttacaaccgtgatggctaatggcgagtcggtgcatagcaggagtatggtttatcctgatggcattttagcttctcaatactacgggacttgcgcaaccaactaa

SEQ ID NO: 269332 - DNA, 12588 bp, Klebsiella pneumoniae
atggcaaataacataattaaagggcgcaagggtggcggctcaaagcagcgtacaccgacggaacagccggatgatttacagtccgttgcgaaagccaaaattctgctcgcattaggtgagggtgaatttgcaggtggtttaaccgggaaagatatttatcttgatggcaccccgcttgaaaatgctgatggttcgcaaaacttcagtggcgtgtcctgggaatttcgacccggcacgcaggctcagacttatattcagggtattcccggcactgaaaatgaaatcagtgtgggaacggaagtttccagcaagacagcctggacccatacctttactaatacccagctttctgccgttcgtgtccgcctgaaatggccgtccctgatgaaacaggaagatgacggcgacgtggtgggcaataccgtcaggtatgcgattgacctgcagaccgacggtggcgcctggcagacggtgctggaaaccgctgtcacgggtaaaaccacctccggttatgagcggagccatcgtattgatctgccccatgccggcagtacctggacgctacgcctgcgtaaaatctctccggatgcaaacagtgtcaaaactggcgacgtgatgacgctgcagagctataccgaagtgattgacgcgaagctgcgttatcccaacaccgcgctgctttatatcgagttcgactccagccagtttaatggctccattccgcaaatttcctgtgagccgcgtgggcgcgtgattcgtgtgccggataactacaatccggaaacccgcgaatataccggcgtctggaccggcgggtttaaatgggcctggacggataacccggcctggatctattacgacattgttacagctgaccgttttggtctcggtaatcgtctgagcagcgccaatatttcgaaatggacgctgtaccagattgcacagtactgcgatcagctggttcctgacgggcgcggtggtgacggcatggagccgcgctatacctgtaacgtctacgtccaggaacgcaacgatgcttacaccgtgctgcgagactttgccgccattttccggggcatgacttgctggaacggtgagcagattgttgtgcaggctgatatgccgcgtgatgtcgattttacctatacgcgcgccaatattgtcggcaaaccccgttattcgagcagcagcagccaggttcggtacaccaacgccctggtttcctggtctgatccggataatgcttatgctgatgcaatggagccggcgtttatcccggaactggtttcccgctacagttttaaccagctcgaaatgaccgcgattggctgtacgcgccagagcgaagcccaccgtaaggggctgtggggcatactgaccaacaacaaagaccgggtcgttgagtttgatgtggggctggacggtcgcattcctcaacccggttatatcattgccctggcggatgagttgctggccggacgggtcaacggcgggcggatcagcgcggtgaatggccgggtgattacgctggatcgtgatgtggatgccaaacctggcgaccgcctccagctaaacctgccatccgggatctcacagagccggaccatccaggccgttaacggacgccggcagattacggtcacaacggcgtacagtgagacgccagaacgggaatgcgtctgggccgtagaatctgatgacctcttcctgcagcagtaccgggttacaggggtaaaagagaacagcgatgccaccctcacgatcaccggcgtggcacatgacccggataaattcccccgcatcgataccggcgctattatcgaccagcgcccggttagcgtattgccggcgggcaaccagtcacctcctgacgatattgtcatcacatcccgctcggtcgtgaatcaggggatcagcgtcgaaacgatgcaggttaactggtcagcggtcagcggtgctattgcctacgaggcgcagtggcgccgtaacgacgggaactggattaatgtaccgcgcagctcgaccacctcgtttgaggtcagcggcatttatgccggtcgttacctggttcgcgtccgcgcgatcaatgcggcggagatttcgagcgggtgggcgtattccgaagagaaaaccctgaccggcaaggtcggcgagccgctggcaccgctggcactggcaacccgttcgctggttcatggggtccaggttagctgggagttcccgaccggctccggggatacgctgcgcacggaactgcagtacagcaaaaatcaggacggcagtgcgccgatgccgttatcagacgtggcctatccggggaaaagctatcagcagatgggcctcagtatgggcgcagaattctggtatcgggcgcgccttgtggatcgtcttggcaatgaaagcccgtggaccggctgggtccaggggatggccagcgataactttgatgactattacgaaaacctgaccgacgctatcaaggatacggctgcctgggaggaaacgcagcgcaccattagcgaaacgcaggaaggtatccgcaatacgcagcaggaactggagcagaccgctgaagctctgcgtaaggaagccgaagaccaggcgaagcaggtcagccaggatattgatgcatcggcgaaaagcatcactgctgatgttgacgggaagatctccgccgtgaataaaaccatcacggatgagatcacctcggtcaatgaggctctcgattctggtctggctcaggcaaacaaaggcgttcaggaggcaaaatccgccgtcgcagatgcgaacaagcagatcgcaactgtgaataagtcgctgaccgacagcatcacccaggtaagacagtcagtcactgataccgctgcggaaatcaacgccaccatcgacctggagattgccagggtcagcaaaacgctggccgatggcgatgccgcattgaatgcgcagataaagactgccgaaaatggcctgaagcagtcgctgtctcaggtcaacaccacgctgaccagtgcggtgaggcaggagaccgcggatcgtatcgccgatgttaacgcgaaggcgtcacaggccgctgatgaactgctggcggcaacgcaggggattgaggcgagtatcgagagcctgactcaggtgatgaagaccgccgatgaaaatctggcgcgggaaatgtccagcctcgctgccggcgctaatatccagttcgactcgcaggttatctggcatttcaacaatcagacgaccgagggctggaccggcagcgccggcgtaccgggtgtgtcacaggatggctggttacgcccggcggacagcgccaccgatccgtacattacctctcctggcgggctggctgtcgatggtgcggcgtaccgtttcatcatgctgcgctttcgtaaaaccggcaaacccgtctgggcgggtgagatccgctgggtgtctgccggcgaaaacttcaataacacgaagcgatacattgttgctgagccggaatatgccgatggggtggcaaccctgacggtgcgtgatattccgtggacagggaacattgatcgtattcgcctggacctgacgaaccagcaggatgccagcaactttatcgaattcgactggatcgccgttggccggccagcacccggcgccagtacggcggctctgcaggatgtgcgcagtacgctgagtaacgcgctgaccgccgaagcgcaggcacgcagcacgctggcggcgcagatgcgtggctcctatgatgggagcgatctggagaaagtcacctccgggctgctgtaccaggaaaaaaacgcgcgcgttaccgccatctcggcggaagttaaggccagagagtccctgcagacgcagtttaacgacaacaaagctgctgtttctggtgaactgagttctctgacgacagagcagaacgcgcaggcgagccgtatcggtggactggaaaccagcctcgggaaaaaagccgatgcggccgcgctgacgtccctgacgcagaaagttgagcaacagggcgccacgctgacatcgcagggcgccgcgttaacatcgctcactaaccgggttggccagacggaaacgggcctggctggtacgaatgaggcgctgagcgggctgcagtctgttgttacccagcatggtgacaggataaccagccagggtcagtccatcacgaaactgacgagtgatttgggcacgacaaatgccgcgctggcgaagaaagccgaagcggctgcggtcactgccttaacgcagcaggtagagcaaaacggccaggatattcgcagcaatactgacagcatcaccagcctgtcgaatcagctggtcaatggccaaccgaatcgctggtcccgtcgactctatcctgtgcagctggctaccgccgggacagtcccgtcattcagcgatgttcgcgccgtggcgccaacggtcgtggatgaggtggccgacgcggccaaactggactttacatccgccggcagctatctgatcgcgctgtattcctgccaggtgaaagtggccgcagataccaccatcacactggcgcccggcgccagggtttttgatgataccggcgccatatttgtgaatggggttcaggtcgcctggggtaacgccagctggaataccgtcagttttgaactgaaagccggctggaacaccgttgagtttctggtgaatcagtggaccggccaggcgtatatcaacctgggtctgaagctgtcagacaaggttgctgagatgtactccggtctcggggtttccgcgctggcaaacgcagccggcgtgctcagctcgaatgtcagccagattggcaacgatgtggtcagcaattcgcagaacatcacccagctccggaatgcgctgacgcagacagacgcgaacgtggccagcaaagcggatcagacggcgatgaactcgctaaccggacgagtggagaagacggagtccgggctgacggcggctaacgccaacattacctcgctgaaatccgctgtacgggccggaaacgcatcaggcggggatttaattcccaacccgacgtttgacccggcgtatgaccagatggggttcagcgtggtagccacgacggctgaggaggtcccgccgggctgcccgtatggttatgcggcccgaattgccagccgggatcaccatcctaactttgctgcgttcccggccacgcttaacgatgtgattgagatcagcgcactggttgcctgcggcgccggcacggcgaattttaatctgtatgttggcaccgccgttcggccagatacgagcaccggtgcgccactcatggcggggggcgggaaatcaccctccgtgacctggcagagaaccacctggcgcttcaaggtcacgcaggcgatggtggacaggggttatatccgcccgttcctgcagatctcgcagaacagcccgtatggcaccgtatggttcgttacagactggcatatgcgaaatgtgacagcggcgcaaaaggttcaggatactgcggatgccacggcggcggcggttgactccctgaccaccaccgtgacgcaacagggtaatctgctgacctcgaccggcaaccggacaactcagctggaaaacgggctggcaaccaccaatgccgcagtggccaaaaaggctgatgcgacagcggtgcagaatttgaccaataccgtcacacagctgggcaacgacctgacggctgcgaacagcgccatcacgaaactgaccggaaatctggcgaataccgataaagcgctggcgcagaaagccgatgcgacagcgctggccacgctcgacacgaaagtgacgcagcagggcaaaacgctggagagccagagcaattcgctgacgaacctgtcgaacagcctctcgcaggtcgcggcagatatcgatgccagcgggcagataccgggtaacctggtcgtgaatccctcgtttgaacgcgggctggatggttacgccgggcggtcaaccgcgaccaatgtggtggaggtttccgttcctcatagcgggacgcgggcgctgaaggttgatccggggaatgtgactccggggcaatacatcccgtttgttcaggggcgaacctatgaaatcggggtgtgggtcaaggaacccggagcgacgacggataatggcgcggggaacaacaagctgcggatcggcaactctgccggccagccggtttttgagcgtccatacaacagcggtacggtggggacaaactggaccctgatttccggtcgctggaaagcgacggagacagccagcctgccggtgacgctgagtaactatctgattagcggcagccgctacttcgatgacttttacgtcactgacgttaccgaccgggtggacatcgatgccaccgccggcgccgttaccggactgacgagccgggtcagcacagcggaaggggccatcacctcacaaagccagcagctgacgaacctgcagaacagcctgaacacgaccaacagcaatgtgtcgaagaaggccgatgcaacggcactgacttcggtcgataaccgggtgacagaggcggaagggaaactgaccacacagagccagcagctgacaaatctggcgaatgtgctgacggccacccgcaacgccggcgacaacctgatcccgaactttgattttctgcagggcagcacggcctgggatattcagtatcctgccggtgtgacctttggcgatttcggggacgggaaagcgggggtccgactgaaccggacgactaacaccagtccggggatcttctccaacaacaacaagccggtgccgctgaatggccagcgcaagtaccgggtggtggtgaaggccaaaggtgtttccggcgcgatgagtctgctgatccgtcgccagaacaaaatcggccagacggacagtacgtatgaggataaaacggtcacgctgaccactgactggcaaaccatcacctgggaaaccggattgacggctgccggcgcggacgggcagaacttcaaactttattctcatcctacaaacggtgaaatctggctcgattccgtccgggtgtttgatatcaccgatgaaaccaacattaaggcgaccagcgatgctgtttcgtctctgaccgggacggtgacgaaccaggggaacaccctgacatcgcaggggcaatccatcacggcgctgaataacgcgctggaaggggtcaaaggcgatgtggcgaagaaggctgatgcgtcggcggtcagttcactgaccaaccgggttacccagactgaaaaggatatccgtagccaggccgacagcctgaccagcctgaatacatcgctgaagcagcaggcgacacggggagccaacgtactgccggacggcagttttgaatcctatgccgtcggcgatgttctcagtaatgcccgcgccgttatcaccagtgaagctgcgcacagcgggaccaaaagcctgcgtgttacgcgcagtacggagtacaacccgaacgcgacggataataacgatacccatatcttttcaggcatgcaggttcgcgataacgcggtctattacgtggaggcgtgggttaagttgccggctggctcgaccgccgatccgaccgtttatatggtgctcggattttccttccaggattctgccaatggctggtcgtggcctggcctgaacgtaaaagtctccgagttgtcggtggacaactggacaaaagtcagtggctatctgaccaacaaccgaaccgcgttgaaacaggcaatggtgaggatctccatcccgaacacaccaaaagttcgcctgggtgacgccttcctgattgatgatctgatcatcactgacgtgaccgatgcgaaagcggcgctcgatgccgccgatgcgaatgcgcaggcgctttccagtctgtccgcgtcagtcacgcagaacgggaaaaatattacgtctcagggcagcgcgatcacgaaactgcagtcagatgtgacgcaactaggaaaggatatcagcggcaaggccgatgccagcgcgctgacgaatctgacgacccgcgtgacggctaccgaaggcagcctgagatcgcagggagacagcctgaccagcctgcagaacagcctgaacacgaccaacagcaatgtggcgaagaaggctgatgcaacggcgcttcagagcctgcagaacaccgttgaacagcatggcagggatctgaccacgcaaagcagcgcgctgacgaacctggaaaacaacttttcatccctggccgtgggcgggaccaaccttatccgcaatgcgaacacactggagggatggagcagccgccacgccacagagacctatctgggcgaccgcgtggcctacacccggctggcgaaaggtgcatccggttatacccagctggatgaacagacgctggacgttaccgggcgtacggaatttgtattcagtttctatgcgaaaggggcttatgacgggcaggagatggcgagttatttctataacccgtcgaacaccaccaccacggaaaccagccagggcgttaaaggcggggccggtgacggcaaggcggtcacgaaactgaccaccgcatgggcgcgttactgggtgaaatgggttattcctgccaccagtggcaccaaacggctgattgccgcgcgtctggaaagcgcgacgtctgccgacaaagaagtctggctctgccgccctcagctggaaaccgggaccgtgatgaccgactggtcaccgagtccggatgatgcggccagcggtattaccgcgaacacatcggccattaatagcctcaccagtcgggtgacgaacgccgaggggcaactgaccgcgcagtctcagagcatcacgaatctgcagaacagcctgaacaccaccaacaacaacgtggcacaaaaggccagcgcgcagtcggtgagtgatctcaccagccgggtcaccagtgcggaaggcaaaatcacctcccaggggcaggctatcacgaagctgcagggcgatttgagcagcaccaccgataaggtcaacaccaaagcggatcagacggcgcttaacgcgctgactggccgggtggagaaaaccgaggcaggcctcacggcagccaacagcaacatcgtcagcctgacggcagcggtgaacgccgggaatgctgccggggatgattacattccaaacccgtcatttgatccggcgtatgaccgcatgggttatgacgtggtggagaccaccgccgatggtgtaccggctgactgcccgttcaggtatgccgtccggctggccgggcgagaccatgtgccaaaaatcaacaacatcgccgtgacgccgggcgacgttttcgaaatgtctgctctggtagcgtgtggtaccggcagcgctgactttaacttctatatcggtcgggccaccaccgccaccggtggcatcggagcgaaagcgtccgggggtaacaccaggaccaccactgcgtggaaacgagctacctggcgctttacggtgccatccgataccagcttgctgcggccgtttctgcaggttaatcagagcagcccgttcggcaccgtctggtacgctgccgactggcatatgcgtaacgtgacggcggcgaacagtgcgcagaaaaccgcagatgcgactgcaaaagcggtggattcactgaccaccacggttagccagcagggcgatacgctcagcagcatcggctcgcgtaccacctcgctggagaacagcctccggtcgacaaacgatacggtgagtaaaaaggctgacacgacagcggtgacgcagctgcagggcacggtgaagcagcaggggaatgacatcgcggcagctaacagcgcgctgacaaaactcagcagcgatctggccacgacgaatgcgaacgtgaacaaaaaagcggacgcaagcgcgatgaacaccctgcagaaccaggtcacggagcagggcaaaacactcagtgcgcagggggattctctgacgcaactgagtaacagcctgagccagacggcagcggatattgacgccagcgggaaaatgccgggcaacctcattgtcaacggcagttttgagcgcggcgcggcgggctttaccggctggagcagtaccgcgacggtggccgatttacaggttccgaactcgggtaacaaggcgctgaaaatgtccgccggccagtcgaacctggtcggacaggaaatcagtatcacccagggtcgcacctaccgcatgggggtatgggcgaagcaggacccggggaccacgattaaagatgcgggtaacacgaagtttcgtgtggccgacagcactggcctgctggtcggctcaaactacggaccgtttagttctggctggcaactggtaacgtttgactggaaagccacgaagaccacgacggccagtttccagctgacgacctccctcagcgcgggggcaatgtatttcgatgatttccatgtcctcgatgttacggatgaaaaggatatcgcagctaatgccggggccatttctcagatgaatacccgcgtcaccgctgctgaaggggctatcaccacccaggcgcagcagctgacgaaactcagcggcgatctggccgtcacgaatgcggcggtcagtaagaaggccgagcaaagcgctgtcaccgggttgaccacccggatgacgtctgccgagggtaaactggattcgcagtcgcagcagctcaccagtctgcagaacagcctgaccacgatgaatactgagctgggtaaaaaggctgacacgtccgcggtgagttcactgaccggtcgcgtaagccaggtggaaaacaccatcaccagccagtcgcagagcatcacgtcgctgaccagcaccatcaataccatccgcactcagggagctaatccgtgggttgacggtacgtttgaaagctacagcgatggccaggtgctgggcgggaacggcacagccgttgtggtggcgtctcagaaattcaccggcggtaagagcctgaagttgagacgggatgagaacaacagcggcaacagtgataaacagcttggcacctggcagtcagtccgtgaggacgcgaagttccggtttgagttctgggccatgatgccggcggatcaggcgccctcctccgggtggacaacgctggtcggtatccagtcgcagaatgctgccgggcaaaatgcgtggcaggcggcggtcactgtcagcgaagcctctctgggcgcgcgcgataagtgggtgaaattcacgggtatcgccagtaacaacggggcaggcagaacacgcgcggtggtctggatctccactcgtggcgccaccggcaacggtacccctggctattcactgtatatcgacgatctggtcatcacggatgttaccgatgcgaaagcggcacaggatgcctctgacgcgacggcgagcgccgtgagcggcctgacggcgcgcgtaacggatgccgaagggaaaatcactgcccaggcgcagcagcagacagcactggcctcgaaagtggataacgccaactcccgcgtcgataacatggcgaagacgctgagcgacagccagagcacacaggccagcctgaatacctcgcttcagtcgcagattgacgcgcaggcggccgccaacatcaaaaaccagacgacgctggacaacacgattaaatcggtggccagtatcaccagtacccagcagacgcatgcaacggcactggaggcgctggcaacgcagcagacgaccctgacatccagtgtcggggatctcagcgcttccgttcagaacaccgccaaaaccgtggcggatgtgaatggtacggtgagttcgctgtggtcgatgaaggttgagacggttaacgggaagaatgttggcgcggggattacgctgggcagcaatggtgaaacgagcgatatgatcctctacgctgaccgcttctcgctgtttaaccgtaataatgcgacggctgttccggtgatggttgccgaaggcaatgagctgtatatcgatacggcacgtatcaaaaacagttccctgacctctgccaaaatcgcggacggttccattacgaacgcgaagatcggtaacgagatccgctcgaataactttgttgatggctcgcaaggctggcgtatcgccaaggatggctcttcgcagttcaataacgtgatcgtccgtggcagggttgaagcgaatagcggcgtgttccgtggcactgtccaggcggattcgttcattggtgacattgcggtggccaaaagttacgacagcctgactttccgccgcaaccagacggtacagcggaacggtgcgtatcagaacagggggtatagcatgacagtggttctggcctgcaccctggtgtgccagacctatgggacgggcagtggcctggggtatacctctgatattacgttcaacattggtgggcaggaggtaacccgccgtatcttcgtcgatgccggtaatatcacaggcggcaccacggcctttgaattgcggtttgccgcgcgcctggatgctgactacaacaatgtcggcttctttatcagagcgtcaggtcgtactgccgcgattgattacacctgcacagtcgagaacatcaccgcaaccgcatttcggacggacagcagttcatttagctaa

SEQ ID NO: 269333 - DNA, 351 bp, Klebsiella pneumoniae
gtgaaaattattttagcattgccgattattatcggggcattcattctgactggttgtaagtcaccgtcggaagtccgtcagagtggtccggaagaaatatttcattcgaataagaatgtgaatgatgtttctgagtgcattttatcaggctggcaggaaaaaagttttctaacaggacctgtcccggtatatattcagccttataaaaacggtaagactatctatatagacgtatatacttgggttgcagatgtgattcctgaccaagatgggaaaagtaaagttatttacttctctcaaaatgccagaagaagcgctgaaatgaaatcggtgatcaaatcatgcatataa

SEQ ID NO: 269334 - DNA, 1107 bp, Klebsiella pneumoniae
atgacaggaaatgtcccagtagtacttagtgaagcagaaatgaaatcaattttgacactaatcacgagatttccatggaacgtggcaaaacctgttatttcagctcttggattagctcgtggtaaaggtagagatgctactcatggaaaaatactggaagaattaacagaattaaaggaaaagaatttaaataaatttaatgatatcataaggtctgtaaataatttaatatttggtcaattggtctacggtgataaagcttttttttgtttatcaatagacaaccaaataatttcctcgctaacaaaggctatgaaattaaagtgggatttatctgaacagccttctgtcgcctcagatgtaatcctttctgagcaggaaattaatgcgtcggggaagaataaaataaacttagttcattattctgagagcaataatcaggctttagctctatttagttccgttagagagcaaaaaattagagagaggatttcgcctaaaagtttaccgcagtacagtgactacgaagagatcattgctactaaaaaagaaaagcatcaatgttttgatgtctgcatttttaataagaccaactctactatctcaattttgatagatgcaggtattaacacaataggtgagagcgtcttgtttgcaaagagtactgtagtaagagaactttataatattataggtgctgagtttgcatcaaaagaaagagatttctttcccttgattgaaccaatctttaagcaagatcaaaaaccatactcaactcttaattataaagtttttgagctttcattccttacccctgaagggacgacacataaggaaaggaaaactgactccactaaagatttgagacaagatatcttcaatcaagaaggtattaaagccgtaggcaatatcggactttataggataggcatcagggttgagcgaacaaatcctttactacagttagcggacaatgtagaacttactataccaggaacgctaagacggtaccttggtggaagctctggttcaccagtgaattttgctatacttagtaaatgtatctctcgtgatgatttcgaaacgcttacgaagctgatactatag

SEQ ID NO: 269335 - DNA, 429 bp, Klebsiella pneumoniae
atgaaggatgctaacttggcaaagactatacaagacatatgctcagaacgcccagaagtgggggggttggcgtgcatgttttatgaaaaacttgctaagttagcagctcgctctcctaatatattcattagttataaccttttatttgatatagcgatttcgaataaggggggcgctaaagtggatgagcatgatatttacttggctatccaagttttgtgtaatccaaaagttaattttttgaaattaaactatcaatttatagacgatggtttcgatccagttaatataagcattgcggacgtgattgatgctgaagataatcaaggtttagagcatccatatactggtgagattgtgccagactacaaaaaatatgtatttcctttctttacagttattaattttacaaaggaaggggcgtgctaa

SEQ ID NO: 269336 - DNA, 648 bp, Klebsiella pneumoniae
atgcttacaagtttggatgatttggagaaaaactttcatttgcagaaggttcactttgccattcaaaggattcaatttgcgttggagtcctattctaatttcaacagtcttgttcgaaaggagctggattacgctgtaagtaaattagagcaaaatggcaataaaattaactttgatctctctgaagatcagttaactctatatttgctttcgtatgttgaaaatagatatctggggctcgaagccagtcacgagaagaaccagagaggacattgtgatatatctattacccttgcagattatatctggcatggggaagctaaaaaacattcttcatatttatatctttttaaaggttatgcacaacttaccgagcgatatagtactgggactataaatagctcttcgggtggtttaattatttatacgaaaaacgcttcctgttctgacatgatggattcatggaaaacattcttatcaaagaatgcacctaggattcatgcttgtaaatccgttaatattattgattgcccaaaaaaccccttggttttttatagtcagcaccttcatactgtaagtaagctggattatcaagttgtgcattatcctgtatcattacatcataaacctatagaccctgatctatag

SEQ ID NO: 269337 - DNA, 432 bp, Klebsiella pneumoniae
atgaaaacgacattgcagcaaaaagtcagagacggcattgccgccgccctcaagggcaagaccgtcgaacagatggaagacgacgctcgccaggctgctgtaaaaagcgctgttgatgaatatctgatccgcaacccggattggaaaccgtcaacccagcccggcaaggccgggttaacgtcgaagacgttaacggcagttcatgccgctgcatctgcgaacccctcgccagcagtcgtgccagtgagagacagcaagcagaaagccaagcgcgtaatgaaatcgctgggtgctggcgctggtgtctttacacctcacattgtggatgaagaggcgttacgccgtgcgcgtgaagctgcaagggcctttcaggcggctgagcctgagcgttacggtgatatcatcaccgcgacacctatcaagggcgtataa

SEQ ID NO: 269338 - DNA, 543 bp, Klebsiella pneumoniae; identical to SEQ ID NO: 196407

SEQ ID NO: 269339 - DNA, 849 bp, Klebsiella pneumoniae; identical to SEQ ID NO: 196406

SEQ ID NO: 269340 - DNA, 189 bp, Klebsiella pneumoniae
atgaatatctcattcccggatgagacgtaccgaacgttgctgaaagaagctaatcgtcgcgatatgccaatggcgaaaatgtgcagcgaattgcttcaaacagcggcaaagatcattgataaaacgaaaccagataaccaaacagataaccagcgaggaaatgatgagcgaagagaatacaggaactaa

SEQ ID NO: 269341 - DNA, 189 bp, Klebsiella pneumoniae
atgaatatctcattcccggatgagacgtaccgaacgttgctgaaagaagcgaaccgtcgcgatatgccaatggcgaaaatgtgcagcgaattgcttcaagcagcggcaaagatcattgataaaacgaaagaagacaaccaaacagataaccagcgaggaaatgatggacgtagagaatacagaaactaa

SEQ ID NO: 269342 - DNA, 792 bp, Klebsiella pneumoniae
atggacgtagagaatacagaaactaatggcaccgaaaataacgtaaccgtcgtcgggacatttgaccaaattcacacggagttacggaaggttcacaatatccgcacaccatcgggagcggtggtaaaaatggacggtgacgataagatttggtgggcttacttttatactttttcgcttacaaaacggaaaaaatggtgtgatttttcactccaaaagatcgccgatgatcacgatgtgagcacgaaaactgttactcgtaacgcaaagcggctggttgaaatgggagtgttagaggttaagccaaaggaacgtggccgaggaaatatctacataacaatttctattcctgagttgatcgcaatgaagaccagcgagaaagtcacgcccaaatccgaggagaaacagggaaatggtaatggtcatgaagaggccgcaatatcgcaggcagagcaggcaaaactggcagcagccactgctacagatcagagtgttaacttggccgctggtagtgtcgcgcctgttgttggacaacgcgaccgcgtggcatctaacgacgacagcggcggcaatgatgatcatcatgccgtgaacccgaaacagacagcaaaccgggtaatggccccactcgatgatcttcgctactggtcagatattggctatgagggcatggacgactacggcgtaatgtggggtgtatcaggcgatgaccttgataatctaattcgtgaacacctcaaaataagagaagcggaagcagaaaaaaactttaaatcgcagagggcacattga

SEQ ID NO: 269343 - DNA, 1101 bp, Klebsiella pneumoniae
atggctatagcattcacatcagcactgtactacccatacatcgacgttaagaatgagcagtggttgcgtaatgccgtattattctgggattcaattcgaactattgtgccaatctctcatcgtgatccctattcgaatgatttcgctcggacgcttagtgatgaaggtgttcttcaacctatacgtgtgtcatcagatatggaagagattgaagcactaacagagaaagtatttacctttcttactgatccagcttccgcaggtcttatttacaatgttgatgcagccccccatacccgtatccataatgaaaaaattccgaatgaattttttcggttagcacaaattcatccagaaaaatttccatacagtgttattgagatgcttcaaagaggtcttgatgatgatggatggcttcacgtcgaacctacttttgcaaaattttatatgacattacttgccactcaattatcagatcgcttaggtctagggttagtaactgaatcatcagcagcagatcaattagcaatcgcagtgcgtaaaggaaacccacttgagggaaattcagctagacgagttggtcgccattttgaggcatctggcccaagacgtgctttaccacctgaactcactcaaagtttgctaattgacctcatactgcagggtatatcgttgcctgataatttaaccgttcatgagatattgatgttcaagaataatcacaaggaagaactatctattttccgtcgtgaaatttcacgacttacatcagacattccgaaagacgtacctatagaagcattacggcaagctgtagccgatcaatatcaggtaaatgtcttgcctgcattgaacagtttaaaagcatcattaaaagcacaaaggtgggattccggaattaatggattattgaaggtatccttctttgctgcaccatcaacttccgtcgcaatctatgcgggaatgccaagtgccgttgcattattagttggagctggaatatccctaacagcatctgtagttctgtcatcccagcagcaaaacaaggtaaaaatagacaatccatattcatatttattatcacttaataatcagtggtaa

SEQ ID NO: 269344 - DNA, 171 bp, Klebsiella pneumoniae; identical to SEQ ID NO: 130626

SEQ ID NO: 269345 - DNA, 315 bp, Klebsiella pneumoniae
atggctgctcagcgcaaagcgcccgcgcagcgcgccattctgcagattaatactggctttataatgaccgttttccgccgctatccggtacagacgggcaatttccgcatccaccgctttatcccggttaaccagattatttttttgcagccagcgggcatatttaaacaggacatcggtatccgcagacgcctcaggaataatctggtgtttacaggtaaacgccaggttggtattaatatcagtcagcggattcatcggcgcgtccttgtgggtattgttctggtcacaggcggtcagtaccaggcagaataa

SEQ ID NO: 269346 - DNA, 708 bp, Klebsiella pneumoniae; identical to SEQ ID NO: 130635

SEQ ID NO: 269347 - DNA, 795 bp, Klebsiella pneumoniae; identical to SEQ ID NO: 130634

SEQ ID NO: 269348 - DNA, 552 bp, Klebsiella pneumoniae; identical to SEQ ID NO: 130633

SEQ ID NO: 269349 - DNA, 204 bp, Klebsiella pneumoniae
gtgaccgccccgctggcgggcactatctggaaggtgttggccagcgaaggccagacggtggccgcaggcgaggtgctgctgattctggaagccatgaagatggaaaccgaaatccgcgccgcgcaggccgggaccgtgcgcggtatcgcggtgaaatccggcgacgcggtggcggtcggcgataccctgatgactctggcgtaa

SEQ ID NO: 269350 - DNA, 456 bp, Klebsiella pneumoniae
atgaagtattggatcgcggttcgtctcaatagctttagccagccagacagctttctcttcattggtagcggcagcggtagcctgttcaagggcttcttcatactgaaccctgatagaacggtgatcaacgcgttcatcatgaccatacagctcaaggaacccattacagatgttctgccagcctttacgccagctatcaagggtttcaggcttatcccactcacggacctttttaccaaagccagtagaaagaacctcacgggttgttcccatgatatggatatgcgggttatgaccattgatatcatgaataacaacatcggcaatgatgccttgcttggtaaagtgctcaagaacaaaagctgcagtgagttcaatgttctgttctggtgtcagctcagcggggagggcaattttaaactctttggcaagacgggcatcttttctcttctctaa

SEQ ID NO: 269351 - DNA, 810 bp, Klebsiella pneumoniae
atgccatcaagcataattggtgttcatgccgcagcacgactcgtctctaatggaaaagactcaattgctcgtaatgatatagaaaaaattgaaggtgctgaacagttccattatcatgctgaagctccaagtgagtttaccacattaattacccctaccataaaatacgatttcaaggatggcatttatactcctgaatactcatcttggggttatggattacgctacataactgaagagcatgcagccaatatcatagaagcagctcttttaggtgcgaaaaatcgattatcagtgtcaactgtttcagaatcaattatcttagagcgcgaaatatctgttctggacgctatacaaagaagatattcccttccttcatcaaaaattaactctcaacaaaaaaaacatgctaattcaaactctggatggaataatatccctccagataaagaagttggctttttaggagagaaactcatatatgaacaggaagtttcttatgccattaaaaatggcattccggtaagtgaagttgaatgggtatcacaatccgttcgtataacaccgaatggtaaacaagaatatttcattgaggtaaaatcaagtcggagtatgaatgaaagcaacatttacatttcttcacgacaagttaaattctttcaagaaaatgaatccaattcattgctaaagtttgttacttttatttccaatactcaagtagatacagtacaggagtacagtttgaaacaactcatgaatgagtttgaattaagccctataaaattcaagttaaaaaaattgaaacaataa

SEQ ID NO: 269352 - DNA, 483 bp, Klebsiella pneumoniae
atgagaaaagtacaattaaacaacagtgatttattagcatattttaatacggttgaagaactcaaaaatcatccatcaatggaggaatatagaactggataccgtaagctacgtgatgatgatgatgcatttgcatatgaaataaaaaaatataggtctgcacataccacattgcgcagactggataagaaaagacaatctcttttggatagctttattggtgagcttaatcctataagttactcagcagctaacaccgctgctaaatcatcaggaaattttgatttaattaatgaacgaatactttatagaaaagccattgaagaaaaaagtgataccgaaatcattgctctggtgataaaacaacgtacagaggcagctcttgagttccggcgctctgttgagctgagtcttgaacagctttcttctatatcagtagagttcaaatcatcaagttcaaaacgaaggaaaatggctgtttaa

SEQ ID NO: 269353 - DNA, 255 bp, Klebsiella pneumoniae
atgaaaaatgatactgatttgccccaaagtgtcacaattttagagcatgtacaaaaacctacgaaacagcgtttttttgtgttagggatactattcgttagcttatcgattatatatcttgaccgtgtcaatatttctattattgcagcaaatacacactttttaaacgaaatgcatcttaatgacaaaccaatcttagttggcttgttgatgtctttattcttagcgagttacgggattgctaattttttttaa

SEQ ID NO: 269354 - DNA, 333 bp, Klebsiella pneumoniae
atgtgtagccagttaaaccccttgttcgcagacgcatacctgaagccacagcagactcataatttgcagccggtgaaaacaaccccgttgttcgcagtcggataccagaagccacagcagactcattatgtgcagctggtgaatacaaccccgttgttcgcaatcggataccagaagccactgcagactcatgatgtacagcatgtgataacaattccctgttcgcagtcagatacctccatcctcatcagacccttgatgcgcagcaagttaaaccccctcagcttgtcctcatttggttacctgaagtctcttcaggctaccgatgtgtag

SEQ ID NO: 269355 - DNA, 267 bp, Klebsiella pneumoniae
atgtgtagccagttaaaccccttgttcgcagacgcatacctgaagccacagcagactcattatgtgcagctggtgaatacaaccccgttgttcgcaatcggataccagaagccactgcagactcatgatgtacagcatgtgataacaattccctgttcgcagtcagatacctccatcctcatcagacccttgatgcgcagcaagttaaaccccctcagcttgtcctcatttggttacctgaagtctcttcaggctaccgatgtgtag

SEQ ID NO: 269356 - DNA, 267 bp, Klebsiella pneumoniae; identical to SEQ ID NO: 269355

SEQ ID NO: 269357 - DNA, 147 bp, Klebsiella pneumoniae
atgctgtacatcatgagtctgcagtggcttctggtatccgattgcgaacaacggggttgtattcaccagctgcacatcatgagtctgctgtggcttctggtaaccgactgcgaacaacggggttgtttcaccggctgcaaattatga

SEQ ID NO: 269358 - DNA, 192 bp, Klebsiella pneumoniae
atgctgtacatcatgagtctgcagtggcttctggtatccgattgcgaacaacggggttgtattcaccagctgcacataatgagtctgctgtggcttctggtatccgactgcgaacaacggggttgttttcaccggctgcaaattatgagtctgctgtggcttcaggtatgcgtctgcgaacaaggggtttaa

SEQ ID NO: 269359 - DNA, 342 bp, Klebsiella pneumoniae
atgcgccagggcgccaatcatgcgggcgctcatcagggcgaacatcgaataagaccgggttgcggcgaggcaggaaaacgcgaggatcagcatcagcccgaccagcagcgccttgcgggaaatacgcgtcggcattgcgccggaaagcagagccgccagggcgcctacccagccataggcggtgacggcgaggcccacgccggattccgtctggtgaaaatccgccgccagggcgctgagcatgcccaccggcgccagttcgctggtgacgatcgaaaaggcgcagatcccgagcgcaacgacggcaatccagacgcgcgccggcgccgggtggaggggtaa

SEQ ID NO: 269360 - DNA, 705 bp, Klebsiella pneumoniae
atgcgggttttcgttgccgccaaagtaggggaagcccaccgacaccacgctgtcgcgaatatccagcagcgacagcttaagctcgacatctttgccgtctgcccgttgttcgagattccatttgcctttttcgccccagcgaaagccgatggagccgttcggcgccaccagttcgccgtcgctgttataggccacggttttccattccgggttattactttctccgagaccgtcaagcaggtcggaagcacgcagcatacggcccggcgtatagctgccgtcgtcgcgcggctcgagtatcaccagcatcggcatgtcggtgtaggtccggcagtagttgagaaagtaatcgctcgggttatcgaggtggaaggctttgaggatcacatggcccatggccatcgccagcgcgctgtcggtgccttgcttcggcgccagccactggtcgcagagcttagcgacttccgaatagtccggcgtgatggcgatagttttggtgcccttgtagcgcacttcggtaaagaagtgggcgtccggggttcgggtctgcggcacgttggagccccaggcaataatgtagctggagttgtaccagtcggcggattccggcacgtcggtctgttcgccccaggtcatcggcgaggcggggggcagatcgcagtaccagtcataaaagctcaggcaggtgccgccaatcaacgataa

SEQ ID NO: 269361 - DNA, 468 bp, Klebsiella pneumoniae
gtgattgttcgtgatgacagtgaaagaggcatcccgcctctggtggcgcatcagccgccgtcctcgctggatgatgcgccggtgagccgcggtcggatggtgcagatccccggctggattatcccgctgtacgccggattatttatcgcgctcggctggtttggcggcgagcagtggcgtcacccggcaccgccgcaaacgctgccgcccgcggcgccggaagtggacagcgatacgctgccgcctctgcgctacagcgcccatgtctacgcctcgcgaccggaaaagcgcagcattgtgttaaacggcaaagcgtggacggagggcgattcacccctgccgaacctggtggtggagcagatccagcaggatgtgacgatcttcagcttcaacggcacgacctttaccctcgcggcgctggaggactggccgggcggaaaaattgacgaggagccgaaagaggaataa

SEQ ID NO: 269362 - DNA, 972 bp, Klebsiella pneumoniae
atgaataacaaaacctttgttaggacgttactggtcgattcgcaaaacaagcagtttataaaatccttagatgaacgtagcttagatagctatatcgagttattatcaaaagaaaacaaaacagaaaccaaatacaccattatagatttcagtcctgtaatagaatatttccatatagaaattgaattagcactaaaaacgcataaaaacgaagaaatgaaaattcaccatgcaaccactttcaataactggttgagatttaaagatataccatcagacaaagaaagtatcatctttgatcaagcaataaaaataatggatgacactgaaaaaacaataaatttggtcatggcaagtttatccaagtctaaatcaaattattactccacaaccaatcatgaaagagataacttactcaacacaattataaatgactctgcaatttttattgaatcaattttatgtcaaatacatgcaggaatcatattttcaccaactatgatccaaaaaagcataaccattcctcaacatctagtcagtgtcttatcaaagttgcaagatttacttagagaagaagccggagttaatccaaacttaactttaaatcataataatattatagagcaagcttgcattgaaaacaatttaggtatcgatccatatttgattataaatctaactaatgccaacttttcagttgaggatattataaacaaaatctttagttcaccaattaaagatatacctaattacggaaataatttaatgcatagagagcgggttttaatttggacaaaagcctcgacagaaaaaactcgaagaacaattttaatttctgagaaaattaaaaaaatacttagcataattggtcttgttgataaaataaaaaatagtgcttatgagtttagtagaaattctgatgacattgaaaatatttcactgcaattagaaattctatcgaaaaatagttaa

SEQ ID NO: 269363 - DNA, 1806 bp, Klebsiella pneumoniae
atgaaaacgaagtcgatctttatcgcggccacgctgtctgtattggcaggtgtgtcaattcccgttaatgctcagattgtttatatgccgccaactgaagccaaacttcagaagggtgtggtagcgggcaagctcgaccgcttcgtattgccgccaggcaaatattatcccggcacctcgcacaactacgtcgtttatacgccttacgggtacgacaagtcgaagccgcttcccgtcatgatcttcctcgatggcattcaagagtttcttgaaccgaagtggcaggtcaatgtgatcctcgacaacctaatcgcagcaaaggagatcccgcccctcgtcgcggtcttcgtagatcctggcatttatcaagctcggtcggaccaggctcagaaccgttttgaacgccattttgaatacgactcgatcacggatcgatactcgaaattcctgctcaaggaactgctccccgccgtctcccagaactacctgctctctcaaagccccgatgacagggcgctggtgggcaacagtactggcgcggtgggagcgttcagcgctgcgtggaacaggcctgatcagttccatcgcgtcatgagttttattggcacctatgtcagcatgaagggtgcccacacgttgcccaatctcgttcgaaaaacggaacctcgccccatccgggtcttcatgcaggcggggaagagggatcaccttactgaccttcagcctttcggaacgcgctatgccggtagctggccgacagcaaaccaaacgatgtttgaggcgctgcaatttgcgggttatgacgtcaaattccagttcggagaagctggccacgaggcctctcatgggcgggctgtgatgccggacgcattgcgctggctttggcgcgactacccgaagccgatcgaagtcacgtctctacccttttattacggcaaacccggctacgaagaccgtggtcacgtcttctcggtgatcaacggcgaccagaaatgggaaaagctgggcgcaagctacgggagaatttccagcatcgccaacgacaagtacggcaacgtctacttcaatgacgatgccggccggatctggcggattgacgtgaaggacaatgtcgtcaagctgttcgccgaaaagctgggtcagaatacggcgttgaccgtcggcgccgacgaccgcctctatgtttcgcagcctgacaagaagacgatcgtctcctatggcgccaccgccagcgacacgaaaaccgtggcttcggacatttacgcctccgcaatggccgctaccagagacggcagcatttacgcaatcgacccgcagcagaaccggatcgttcgcatcgacggcaaggggagcacgttccttgcctacgacggaagcggtctttacgcgccttccgggattgcaatgagcccggatcaagagttcgttgtggtgggagacgccaaaggcaagttctcgtggtcattccatgttgccgaagacggtcgtctgatcgacggcgaaccttactaccgacttgagatgcctgaagtcgatttgtacagcgaaaaccgcagcgttaccgttgacaccaatgggcagcctttcttcgcaacgccgctcggtattcagggcttcgaggcggcaggcaggcaggggcctatcctcaattctccgatccaaggtgccgtgaccgccgtgtctcttgccgggaacgccgaaagctggctttacgctgcggtgaacggcgaactgttccgccgatcggttaagtccaaggctaccacggcgggcgtggtcagcaagccgccagcacctcccctgtga

SEQ ID NO: 269364 - DNA, 348 bp, Klebsiella pneumoniae
atgcttgacgatcagggataccgtattgccagtgttatagactggctcaggatgaactacacctcatcgtttcgcattgaacaacttgccagccttgtccggatgagcgcgccatcatttcatcaacatttcagacaacttaccggagtcagtccgcttcagtatcagaaatgcctgcgtctgacggaggccaggcggttaattttaagtgaatttatggacgtagcgagtgcagcttacagtgtgggttatgagagcccatcgcaattcagtcgcgaatacaaacgtatgtttggcaagtcgccgaaacaaaacgtcctggaattgcgcgacatggcggagaaatga

SEQ ID NO: 269365 - DNA, 597 bp, Klebsiella pneumoniae
atggcgcaaacactgcaatttgagaagagttatcaaaacgtactgattcccgcagagccgggaaccagcgaatacctgcaacttattcctgttgggcaactgctttgcggtgagttccgcaagccaaggaattacgcattccacaagaagttcttcaagcttctgactctcgggtatcactactggacgccttccggtggcctcattgagcccactgagcgcgccctcatatccgggtttatcgacttcctctcatccgacttcgatcagcgcgctgcgctccagaacgccgcggagatgtatctctcctctgtcggtatttctcgttcccgcgatatggcgcttctgaaacacttcgaatccttccgcgagtgggcaaccattcaggctggcttttatgacgaataccagatgcctgacggcagccgttgtcgtgtcgcaaagtcgatctccttcgccagcatggacgacagccagtttaacggcgtctacaaatcagtgctgaatgtgctctggaactacattctgcgtcgcaaattccactcgccggctgaggctgaaaatgccgccagtcagctgctgagctttgcggggtga

SEQ ID NO: 269366 - DNA, 486 bp, Klebsiella pneumoniae
gtggtgcgcgccgacggcagcgttaccgccggtaacgcctccggggttaacgacggcgcctgcgcgctgttgctggccagcgagacggcgctgtcggctaacgatcttcagccgctggcccgggtggtcggcgtggcgacggcgggcgttgcgccgcggatcatggggtttggcccggcgccggcggtgcgcaaggtgctggcgcagaccggcctgacattaggccagatggatgtcattgagctgaatgaagccttcgccgcgcaggcgctggcggtgacccgtgatttgggcttaccggacgatgccgcccacgtgaaccctaacggcggggcgattgcgctgggccacccgctcggcgcctccggcggccggctggcgatgaccgcggcttatcagctgaaacggaccggcggtcgttacgccctgtgcaccatgtgcatcggcgtcggacaggggatcgccctgattattgaacgtgtttaa

SEQ ID NO: 269367 - DNA, 579 bp, Klebsiella pneumoniae
atgaaatcgattggtattttctgcggttcttcagctggcgaacatccgctgtacctcgaaaccgcccgtctggttggacgtacgctggcgcagcaggggttggcgcttgtctatggcggcggcaaagttggtctgatgggggcggtcgccgatgcggcgctggaggccggtggcgtggtgatcggcgtgatgccgcgcggcctggtggagcgggaaattgcccaccgcggcttgacggagctgcatgtggtcgaggatatgcacgagcggaaaaccaaaatggcggcgctggcggatggctttattgccctgccgggcggggcggggacgctcgaggagattttcgaacaatggacctgggcgcagctggggatccatgagaaaccgtgcgcgttcctgaatattaagggttattacgatccgcttcaggcgatggtcgataacatggtacgggaagggtttatgcacccgcgctacgcggagatgctgccgttcgctacctcggcagacgagattatcgccggttttcgcgactatacgccgccggcccgtaaatgggttcagcagccagctatttaa

SEQ ID NO: 269368 - DNA, 477 bp, Klebsiella pneumoniae
atgcccctcggtgagaacattcaggcgaccgctgacgatcatctgttcggtgccctgctgccagttacccaccgacagcgccacccgcccgcgcagcggatacgcctcgtaacgggtgcgccaacggccgtcgctgatggtgatccgctccggggtgatctcccacggcaggtccagaataggctctacctcaccccgcggggtgaccagcagctggccgcgattgtgctgccactcgagctcagcatcgatccattccgcagtctgcgggaattcgaaggtgccctgcatctggccgtcgaccggcagaccatccggcaccagcggcagatggaaggtccccaccagcttcaccggcggctgatcgtcagtcagccgggcgctgaactggctgacggtgagcgcctggccgcgcaggcgcgcctgcagactcagttccttcccggcaaagccgatatcctgctgcgcaggcgttaa

SEQ ID NO: 269369 - DNA, 300 bp, Klebsiella pneumoniae
atgtccctcgccccagtagcgccactgccagcggccgctgtcgggcagaaaatcgctcgcctgaccgtccagatgcagcgtaaagtcgcccatctgctgctcatgggcgcgaaggatcgcctgcaggcggccatcgacgccctgctgagtgaccttaaccccggccagcggccagcggatttcgtcaatattcagcgcgtcgatcacccgcccgcgcgagcgcagcaacgcaccggggtgaaaagccagctgcgggctgatcagcggcccgctgagctgagccggcagcgccgcgtatag

SEQ ID NO: 269370 - DNA, 2163 bp, Klebsiella pneumoniae
  misc_feature (751)..(760): n is a, c, g, or t
atgatcaatgatctaaataagaatgatagaataactaatgaagaagatacaattcaattaggtactataattggtcatttgattgatcataaaaaattaattctatcatcaatggtgatgtttgctttagtcggtggcctctattcatggattgctacacctatctataaggctgacgctttaattcaggttgaacagaacacaggaaactcaatccttacaaacttatcaagcattcttccagacaatcaacctgcatcagcccccgaaatagaactacttaaatcaaggatggttttaggtggagctgttgaagagctaaatctagatattgaagttaaaccaaaaaattttccaataataggacgtctatataataagtttacaggcaaacagcagcctaatttacccgtaatatcatttaatgttccgtctgaaaactataatgtagaatatatagttaaagctgtatctaataatgaatatgaattgttattagatggaaataagattttttctggaaaggttggtgaaagaaaggaagctaatggggtagtgttatatattgctgacaccactttaacacaaggcaatacatatacattaaagaaaatagcagaagtgacagcaataagtaatctccttgatcaattaaatatttctgaaaaggggaaagatactggaattatatcacttagcatcaatggttctgatcctgtaaagataaaaaatattttatctgtaataagtnnnnnnnnnnagacagatttaagtcaaaatattgaacgtaaatctgctgaggctgctaaaagtttagattttctggataaacaacttcctgaaatcagaacggcattagatgagtcagagaataagcttaatctgtatagacaacaaaaagattctgtcgatctatcattagaggctaaatcagttctagatactgtagttcaattggattcacagttgaatgaattaacatttcgagaagcagagatttcaaaattatatacaaaagagcatccatcgtataaggcccttttggaaaaaagaagaacattagaagatgaaaaaaagaggttaagtggaaaaattacagctttgccacagacgcagcaggaaattttaaaattaactcgtgatgtacaagttaatcaagaaatttacatgcagcttctgaataaaaaacaagaattaagtatatccaaagcaagtacagttggaaacataaggatcattgacccagcgataacaaaccctgaaccaattgcaccgcaaagtgttttaattattttaatgatgacgatattcggtgcgatagtttcaattgtatatataataatacattctatcttgcataagggaatacaaagcgcggaacagcttgaagagatggggatgaatgtctatgcctcagttcctctttctgagttacaatttgataagacaaataaaggcggtaaactaaaagccaaacgtggaattttatccgaggatagccctgcagatatcaccgtagaagccattcgcagtctgagaacgagtttacactttgcaacgatggaagctagaaataatatcattatgatatcagggccaaatcctggcattggtaaaagctttatcagcacgaatttggcagtagtaattgctcaagcgaacatgagagtactactcattgatgcagatttgagacgaggtgaactccataaagatttttcaattgagatgaagaatggcttgtctgatttattgtcaaattcagtggaatatgacaaagcaatcattaaaaataagatagcaaacctagatttcttgcctcgaggacaagtgccaccaaacccttccgagttgttgatgagaaaacagttcagtaatttattagactgggcaagtaataattatgatttagtgattatagatacgcctccagtttttgctgttacagatccagttattattggaaaacatgcgggaacaagctttttggtcgctctatttgaagggaatactgttaaagaaattgatgcagcaaaaagacgcttcgaaaataatggtattaatattaacggcataatacttaacggagttgttaagcgagcaacaaacaagtatgggaattacgcttattatcagtactcttatgaaagtgataaaagatag

SEQ ID NO: 269371 - DNA, 1878 bp, Klebsiella pneumoniae; identical to SEQ ID NO: 219559

SEQ ID NO: 269372 - DNA, 1374 bp, Klebsiella pneumoniae; identical to SEQ ID NO: 249753

SEQ ID NO: 269373 - DNA, 516 bp, Klebsiella pneumoniae
atgaagagctacacctcgatccggttcactggggatacgcccccggtggtgggtaaacctgcgctcatcaatgctcgtgtagaaactgcggcaaccagccgaatgtttaagcccctctggcagcatggccgggcgatctgttttgcggatgggtggtttgagtgggtgcgtgaaggtgacaagaagcagccctatttcatccaccgtaaagacggcaagcccttttttatggcggcgatcggcagcgtgcctttcgagcgcggcgatgaagctgagggatttttgattgtgactgcagctgccgaccaaggtctggtcgatattcatgaccgccggccgctggttttggtaccggaagcagcgcgcgaatggatgcggcaagatgttggtgggaaagaggcggaggaaataattgtagatggcgctctgtcagcagatcatttcaaatggcacccggtttcccgcgcagtgggtaacgtgaagaatcaggggcctgaattgattgaggctatctaa

SEQ ID NO: 269374 - DNA, 705 bp, Klebsiella pneumoniae
atggcgatcgttaatcttcaggatttacaggttacattcggcgcgaagacggcggtctccgccgccagtttccgtgtcgacgccggggaaaccttcagcctgatcggcgcctcgggctgcggcaaatcgacgattttgcgcgtgctggccggattgcagcgtgaatggcgcggcagcgtggatctgctcggccaggccattatgccgggcgcccgctttcagggcgatctgcggcgcaacgtgcagatggtgtttcaggatccgtacgcctcgctgcatcccaaccataccctgtggcgcaccctggcggagccgctgcagatccacggcatccgcgacgttgccccgcgagtaaccaccgcccttgagcaggtgggtctggccgccgacgccgtgcgccgctatccgcatcagctctccggcggccaacggcagcgcgtggccattgcccgcgccctgctgctgcgcccgcagatcctgctgctggatgagccgacctcagcgctggatatgtcggtacaggcggaaatccttaatctacttaatcgtctgaaacaggagcacggcatgacctatctgctggtcagccatgatgccgacgtcatcgcccatatgtccgatcgggcggcgtttatggcggagggcgtgatccagcgctttttcgatcgcgaagcgttggtcaatggagagcaccggatgaggtga

SEQ ID NO: 269375 - DNA, 837 bp, Klebsiella pneumoniae
atgactgacatccgactgaccgtccagggactcgccgtcgactatcccaccgcccgggtggtggacaacgtcagcttcaccctcggcaacgagcggctggcgctggtgggcgaatccggctccggcaaatcgatgaccgcccgggcgctgatgggcctggtgcgcaagcccggggtggtgagcgctgaacggctggaggtgctggggcgcgatgtgctgaccctcagcgcccgcggctggcgcgcgctgcgcggcaacgatatcgccatggtgctgcaggacccgcgctatgcgctgaatccggtgcagtccattcagacgcagctggaggaggcgttaaccctgcatcagcgtctcagccgccgcgcgcgcgccgaggcggtcaaagacgccatcgccgccgtcggtctggatctgccggtcctcagccgctatcccggcgaactctccggcgggatgggacagcgggtgatgatcgccctcgcgctgctcaataacccgaaggtgctgatagccgacgagccgacctcggccctcgacgcccgcctgcgcaaccagatcctcgagctgctggtggagcagagcgcgcagcggcagatggccatgttactgatcagccacgatctactgctggtagccgcgcattgcgatcgcgtgctggtgatgtaccaggggagacaggtcgacgagatgccggcgcgggcgctgccgagcgcgacgcacccttacacccgcaccctgtggacctgccggccaaatgcccacacctacggccagatgctgccgaccctcgacagaacccaggactttacggagacagcccatggcgatcgttaa

SEQ ID NO: 269376 - DNA, 675 bp, Klebsiella pneumoniae
  misc_feature (663)..(672): n is a, c, g, or t
atgattttctcatcaaaaaagatacttgcaaacaatggaaaaaatgcactaatcgtttctacatcctctaatggctatggttgccgtaaatatactattgcagaaaataaactgctatttctaagttattgtaaaaagtatgatatatctcctgatttcgagggagatatgtcgaatgtagttaagttgcatgtagtagatgacattgatgattgcgatgagcttattagaaaaaagatagctgaagcatttcttaaatcatcatttttatatctttatggcggtggcactttatttgtttcttctgaaattgaaacgcaggtttcgatattgggagatggtaagacaaagatcaaacaaaaagggaaaaacgtatctttactagtgctttcaaaggcgaatatcacgataaaagacattatcattacaccttctaattacgtacgaaccataaaaaaagcaggtgttgaaatccgtggagttgataattgtaggatattaaatataattattcagtatgttggcgagaataatactgaaggaaatggtattacgattaatcaaggaagtcaaaacgttatcaataattgcaaattttttggtgcgaatttgaaagatgatgtataccattatcaaggcggcaatgatatatcagtctatggnnnnnnnnnntaa

SEQ ID NO: 269377 - DNA, 777 bp, Klebsiella pneumoniae
  misc_feature (744)..(753): n is a, c, g, or t
atgttatttatacagccacatttgacaaaatatagaattgatttttttaatgaactatctgttttattgaaatcaagatataatcaacactttaaagtaatttgtggggaaaccccaaaaacatttggagttattgaaaatattccttttgacgtagatattgttaaagtaaaaagagtatctaagttcttatattttaaagaagtgttttcacaattgaaaaatgaaaaacaggttattgtgcatttcggtgatttcaaatatttcaccctataccaatcattgtatttatcgctatttagaaggcgagcgttatatttgcatgggcaaggtggctataaaagatcaggttttgcaagtaaggtgttatataacgcaatattatttttaactaatggatatatttgttataacgaattttgctcaattgaattaaagaaaaaaacactcccctttttgcacaagaaaatacaccatattgacaacacattgtatctagaacccataagccaagataaaataatcatgaaggaaaaagagaattctgtgattttcatcggcagagttcgagaaagaagtggtatcgaaaatatacttgaagcagcaaaaatagtatcaacagaaatacccgattttaagattcatataataggtggcggagaacataattatctgcacttgttgagcgaaaaatatcctgaggctgttttctatggagagttgtactcgcaagaagatatcatnnnnnnnnnncaaagcgggtatatatggcggtga

SEQ ID NO: 269378 - DNA, 132 bp, Klebsiella pneumoniae
atgcgtttacttctgagtttaaaaacgcgtattatgttgggccagtttacggtgaacaaaaagaagaattccttaatgcgagtgatattttttatttcccctcgaagtataagaatgaagcagaaccattag

SEQ ID NO: 269379 - DNA, 672 bp, Klebsiella pneumoniae
gtggagaataatgctttcggagcgagtgctggaacaaacctcgggttctggttcagccagacgccagactgcgatacagactgtaaaggaaaacttgcagaagatgtggcaaaagggaatgcagtagtatcagcccatctggcaggtactgttgggttaggtatattgccaaagggggctctgataacagctgccatcagtggcggagccaatactgcaatacaatatgccacgactagcgaagtgaattacacagatgcgttgatagcgacttgggttggagcagcaacctcaaaaactggttggttaggaactgtgggatggaatgcggcaggtggagcaacatcaagttatattaaaggagatgaccccatggttgggactattacaagtagtgttggctcgggattaggatatggggttggtaagtatatcttgaagccctctgtaaattcagcgggaaagtggataacaggaggctgggatcccaagtttgatcacaactggctcaaatacactgaaatcaaaggtcaacttggtctatctaaggaaatgttaccaagtagaataccaacctctactagtaatatgggttcatctattacatcagagatgacaggaactgaaatgaaaaaaataattgaagataaatactctaatggcgggaaatga

SEQ ID NO: 269380 - DNA, 420 bp, Klebsiella pneumoniae
atgttcaatcagccgtcgtggtggcagcaggggaaacgggaggcggcggtggttgagcgctatcaccgggcgctggggatcaagctggccgatggcgatcagccggtgcgcactctctctggcggtaaccagcagaaggtgctgctggcgcgctgtctggaggccaacccgctgctgctaattgtcgatgagccgacgcgcggcgtggatgtctccgcccgcgccgatatctatcagctgctgaaaagcgtcgccgcgcaaaatgtggcagtgctgatgatctcctccgatctggatgagttcatcggcctggccgaccgggtgctggtgatgcatcagggccgctacagcggcgagctggcgcggcaggcggtgaccgtcgatcgcatgatgaccctggccttcggagggcaggcatga

SEQ ID NO: 269381 - DNA, 1041 bp, Klebsiella pneumoniae
gtgattccgattcggacagtgattccgattcggacagtgattcggatgctgacagtgattccgactctgacagcgactctgactcggacagcgattcggatgctgacagtgattcggactctgacagtgactctgactccgacagcgattcggattccgacagtgattccgactcggacagcgactctgactctgacagcgattccgactctgacagcgactcggactccgattcggacagcgattcggattccgacagtgattcggattctgacagcgattcggactctgacagcgactccgactccgacagtgattcggattccgacagtgattcggactcggacagcgactcggattctgacagtgactccgattcggacagcgattccgacagcgactcggactccgacagcgactcggactccgacagcgactcggattctgactccgactctgattccgacagcgattcggactctgacagtgactccgattcggacagcgactctgactccgacagcgactctgactctgacagcgactcggactccgacagtgattcggattcggacagcgactccgactccgactcggattcggacagcgactccgattcggactccgacagcgactcggactccgacagcgacagtgattcggactcggacagtgactccgattcggacagtgattccgactctgacagcgattcggattctgacagcgactcggattctgacagcgattccgattctgacagtgactcggattctgacagtgattccgactctgacagcgattcggactctgacagcgactccgattcggacagcgactccgactctgacagcgactcggactctgacagcgactcggactctgacagcgattccgactccgacagcgactcggattccgacagcgactctgactcggacagcgattcggattctgacagcgactctgactccgattccgattcggataccgaaccgcaggcaaataatgatacccatacggcggctatcgataccgtag

SEQ ID NO: 269382 - DNA, 1476 bp, Klebsiella pneumoniae
atgaatataaactactattctgaggatgagaaattgttcactcttttatcttttaatattacccataaagaaaataacttgtatgactgtgtatttacagacgaagacaaacatattcgctctcttcctttaagcagtattgttataggagagaatggttcagggaagagttatttactatcacaaattgcagattttttcagattcattcaaaaaataaaaaataaagaaagaaaaccttactttaaatatgagaatacttcgaccagatatcttttaggttctaattcttactttataaaaaaagaaaagaataagattatatttttaaaaaatgataactacgtcgatattgacgatgttagtttgcctacaaaaatcatcgcgatgtcttttatggtaaacgataaattttcgttttcacgaccgggggaggattccttctatgactaccgcggtgttagggcaacttcaaatgcttcttatacaagcacaataaaaagaatgatcgccaactcacttatttcattaatcgacaataaagataaaataaatgtggttaaagagactctgcattttttaggcatgagtgaaacattatctatttcttacaatttaaatcgaaaaacattattcaaaaaaacgatccctcttaagacaattacaaaaaaaataaacacaataatccaaagaaaacgctacgttaatgaaaacgaactttacaatattgaacaaaaaccagatataatacttgaggatatattatccttaaagaaaacatgcaaggagagaaatggtaaaatatacattacatttaacctcaacgactataagtcgttcattgacacgtctttgtttcaatcattactacgcctggagcgattagagttcatctctcttcctgatattgaattttataaaaaagataacttttcctttgaggagactagttctggcgagaaaaatattatatttaccatcttaaatttaattgcatgcattgaagacaactctttattattggtagatgaacctgaattgagtttgcatcccacctggcaaatgaaatatattaacttcataaaaaaatctataaattcatatttaaactgccatcttatttttgcatcgcattcgcactttatgatttcagatctagaaccttcatcttcatcgcttctatctatcaacgagtttgaagggaagcgagtatgcgaacatattgcacacagcacatatgcatggtctgttgaaaacatcctatacaaggtttttcatctaagaacagttagaaacacgcaaattgaaactgatttatatgaattatcaagtcttatatctcaaaaaagtactgatgttgcaagaatcaatcaaattcttttaaatcttgaaaaaatagttttagacaggaatgacccgttgaacataataataaaccagggcaaatcttacattggagactacaatgataaatag

SEQ ID NO: 269383 - DNA, 618 bp, Klebsiella pneumoniae
atgataaatagaatcactgctactatttacataccaccgttcataaagaacaagataaattcctttaaaccattctcaggcggagattgggataaaaaagacaaatcaatctcgatctttaaaagattagttaggaaacaattattatcggcccaaagagactgttgtgcttattgtggtttacctttagatgaaacaggaaagactgaaatcgagcatttagcccctaaaggtggtcctgtaaggccaaaacatgttgaattcatgtttgaagttgaaaatctatatttatcatgtaatttatgcaatagcccagtaaaaaaaggagtccaagacactattgttgacaaagactccaatgattattcaagatgtacatttagcattgttcatcctcgatatgatattcctgagcagcattatctatggacagtagatatcgaaaaagttcttatacaaggaaactctgataaaggcagggaaagcatcagaatattcaagttagattcaggcgctcacaccgaggctagagctagaattgaattacataaaagatataaacgagtaatagacccaaatcaaaaagcactgataaaggccatccttggatatcaataa

SEQ ID NO: 269384 - DNA, 855 bp, Klebsiella pneumoniae
atgaaaaaatcaatatattcaacaccactacggtaccccggtggtaaaggcaaatttgcgtactatctcaaaaggctgatcgaggctaatggtctgaatgatggtcactatgttgaaccctatgcggggggcgccggagtagccttggatttattgttcaatgagtttgtttcgagaatacatattaatgatctagatcctgcggtatattcattttggtgtgcagcagtcaatcatacggaagagctttgcactgcaatttcaaaaatacctgtaacgatagaacaatgggaaatacaaagaaaaatcatcaatgatatagataataattctgttgtggatattgcattagctacttttttcctgaatcgcacgaatcgatctggaatattaaaggctggagttataggcggtaagagtcaaagtggtaaatggacgttagatgttaggtttaacaaaccagatttgatatccagaattcagatgataggtgcatttagctcaagaataaatgtccataattatgatgcaatcgcgctgatggataatgttgttaagactttgccgaagaatacacttttatatttagatcctccttattaccataagggttccggattgtatcgaaattattataatcatgaagatcatgtggctatttgtaaaaaacttggtgaggttgaacatccatggattgtgtcttatgataatgccgaagagatcaagataatatactctgattatcgacaggaggaatattttttgaactacacagcacaggagaaacgtaaaggatctgaggtgatgattttttgtccaaatattattgtaccgaagaatggattgctaaaataa

SEQ ID NO: 269385 - DNA, 1470 bp, Klebsiella pneumoniae
gtgaaaagagatatccgacctataaattttaatctcattaagctcgatcaggaaaacgttagatttggtggcgatgttgctcaaaaccaacgcgaagcgattgagttaatgcttgctgatcctgaagatacaaagaagattctaaaacttgcagaacacattgttcgctatggtcttgacccgacagaactacagcttgttgttcctgataatgaaggaaactacattgttctagaaggaaacaggcgactaactgcactgaagctgttacaacggccagatttatgtacccaagaaaagttctataaggacttcttggcggcccataacgaaattgttgggcgtttccccagcgagattgaatgtagtgttgtttctacccgagaagatggtgatgtttggatagagctgaagcacaccgggcaaaatggtggtgcagggcgtgtaccgtgggatagtgatatccgtgatgagcgccgggcgagacagacaggagtagaatctatagggcgacagatacgagagatcgtccgagacaatcctcaaatctttaatgaaataatcatcagtgatatttaccaaattccagtgactacactcacgcgccttttcgcttcgagaagagctcaagaggcatttgcggtatttatcaaagaccgccaaattcagttcaaatacaagctcgatatatctgctccgtcaattgaattcgctgtacgtatgttccgacatgaagggtataatgttaatgatatccgaagcgatgatgaccggagagtattcctcagccatataccaccagaattaagtccagactatttgtaccaggaatccctcaaaacaaccgtttctcaaaatggtagttcatgtggtagcgaatttggtggaaagccggatgctactggggggaatggctcaggatctaaagacgatgggacaacaggtggcgatcccgataagcaaaaaacgggtggtggaaatggctcaaaaacaaaggctaaaggttcatcgaaaagccgtaagtatcttgttccgtggtctctaaacatacccaatagtaggatcaatgaaatctaccgagagctgcgggcttcgcttgaagttgaacgtgtcccaaatgctacagcgattacatttagggtctttcttgaggtaagttgtgatgattataggaggcgcatggcgcatagtggtagtggtgtttatagacatgataatagcaagccactcactgatgaggacaaacttgcgataaagattgtttctgtcgctaaacatcttgaatccgctgggctcataacgaagcaagaatcaaaagcgataagccgtcgggccgcagggacacaaacagttgggtctgttgatcatttaaaccagtttgtccacagtgctgcaagttccccattaccttctgagcttaaggatgttgctgaagagtatctgccattgcttaaagcaatctggccatga

SEQ ID NO: 269386 - DNA, 615 bp, Klebsiella pneumoniae
atggctaaagggagtgtgcgccaggtcactggtgcggaagcgaaggcgcagcagacaaaaccacccgaacactatacggaagggacgttgattgccgcgatgaagaatgcggcgcagtttgttaccgatccgcgccttaaaaagattctcaaagagaacgcggggctgggaacggaagcgacccgggctggcgtaattgagacgttactgaagcgtggatttgtggtgaagaaaggtaagcatctgctggcgacacctatagccggtgacctgatggatgtattaccggcacagcttaaagatccaggtatgacggcgctctgggaacaatcgctggatgatatcgctgaaggaagaatgtcgctggatgactttatggcaaaacagtcagcctggacaatgcaactggtggcaaaaggacagcagcagaccgttaagatcatgttaccaccttccccgccgtgtccgatctgcggtggaaaaacgcggcagcgcacggggaaatcaggcacattctggggatgcgccagttaccctgactgcaacgggattgtgaacgtcggggcgaaaaagtccgctcgtcggcggaaaggtccagcgaagaaaagtgtttga

SEQ ID NO: 269387 - DNA, 180 bp, Klebsiella pneumoniae
atgaagctctttctctgtgaaaagcccagtcaggggcgcgatattgccgctgtgctgggcgcaacaaagaaagtgccgggttatcaaaccggaaacgacgtgtgcgtcacctggggttttggtcacctgctggagcaggccagcccggatgcctacggtgaacagttcggcgttccctag

SEQ ID NO: 269388 - DNA, 1731 bp, Klebsiella pneumoniae
atgaatcgaagtggactagataaagtaacgatgacgctcattcatttattatgtggaaaaaaaagagatggtttgattctactagatggaaaatggggaacaggaaagacatattacttgaattttgaattcaagaaaaaatacaataaaaaaaccgttttcatcatatctgtacttggcataaactcaatagaaacattcaaatcagaaatttttaacgagacctgtattaatttatcagaagacataaaagaacttcctaagattacaagcgcagcggttgccttaagcactaaaaccccagcagcaactgcccccatcaataatatctttgatagtatcaccagcaccataagaaataaaaaactatcaacacttgaaggccttcttataattgatgatattgaaagaatagatccaaaacttgctgaagaaatactcaactactgtcactctatttatatgaaaaatgacaaagtggattttatcgttgtaagcaacacaactgaaaagcattcactaaaagtagagcacaaagagaaaataatatcaaactcagtcccgtttatacctacagaagatgatgtatatattcttttcgaaaaagaactttcattcttcagcaatagttacattaattatctaaaaaggataataaaaaaacacgaactagttaatatcaggattataaagtcaataatattaggtctatttcctttatttaaatacaaaaaagaaaatccaaataaagtagtaaacactaatcttgagttggttatttccgtttactcagctctaattatattatccagagtacatgactacacactgccagaaatcagagctaaaagaaaaacggttgaaaaagaaataacggaactaaataatttactagatgatgcaacttcaacaggtgtacctgacgtagtaaaagaatatgcttttaatatagtctcagatacagatgttattgattctattttttttgacaaaaagaaaattaaagttgatgagattgtgctatcactcgatattttaacaagtgatatagaagaagatactgctatccaaacactactcagcattgttcatccaaaggaaaaaaaaccattaaaaagatggatcgcagccgtggagaattataagactttaacagctggtaaatatattattacggatgaatccataactaatgagttgttgatgtcaattgcagactcatatacaaaagacgaagtttcagaatgtctgtacattgaaaaaagccgcacaatagaagaaacggaaatcaataagatacgtaacgaaggggatataagaaagtatctttcatataaacactcgtacaatgaaaaaaatctaaaggaaagcgcaataaaaaaagacattgttagtctcggctggcatttatttaataccgaaaggcttgacggagtcggtcataaattttccccagtcagattcattggagaagaaatccttagtgaatgtatattgacaaaatggacgatagctgacatccaaagctttagatattatctgtataatctatatgacttttcaaatatttcagactttctttccgatgaatatactcacttaactaaaatggttattattctcaaagagaagatcgcaaacagtttgccatcatttagatatgggtcaattttatcgctgattgaggttattgatagcattaccatgagactgcaacctcaagatagttaa

SEQ ID NO: 269389 - DNA, 129 bp, Klebsiella pneumoniae
atgaaaatcttctgggtactgggtattgaggcaagcctaaactattcattgcccacacaggttcatgtcctgtacgataattttaaaaactctaatcttatcagcaaggattgttcacttaggatgtga

SEQ ID NO: 269390 - DNA, 741 bp, Klebsiella pneumoniae
atggatttcaaagtagataaaaaaatacttattgagatgttttcattttccggttggacacttctcggttcaattagtgttgttgcattgtctcaaggaattgcgatattagtaaatatattctttggtgttgttgctaatgcatctcttggtttatcagatcaagtattggctgctattaacagagttactgggaattttcaaactgcatttaatcctcagataattaaatcttacgctgcgggtgatttatcttatcttaaaaaattaattactcaagcaagcaaattatcgtttggccttgttttacttgcagtagttccattattcacggacacccattttatattatcaatatggctgaataccgtacccgagtatttagtttcacttgtaaaaattgtagtgttatatgttttgattgattgtctttctggaccctttgtaacagtaatctatgctgttggaaaactaaaacgttatcaaataacaatcagttgtatcattcttctcaatttattttttgcagttgttttggtatatagccgattgccattatatgttgtcgtttttgctcgtgtaagttctactttattattattattctatcggatgaaaattgtaagtggtgtaatagattatgacataagagggtatatattaaatgttttaatgaagttattcatcgttgcaaccgtttcttttatatgtgcttattgggttgatatattcaatccttaa

SEQ ID NO: 269391 - DNA, 1302 bp, Klebsiella pneumoniae
atggggtacagaactcttccatacacgtttcagcgaaacggcaactactacctgcaaattcggctttcaaatggcaggatgtataagaaatccctcctcactgacagctatcgcgaagcatccgctttgatgatcagcatcattccgcatatcccttttcttaaatcattaactactccgctccctgtgttcgaagcgttcttatcaaatctgattgcgttagagcgcaaagctgcaataaatccacttttaccccaacagcagctaatagttcctgctgaaatcgtggaaccacaaccgacagcgaaacccataaaagtgataaccattgctgatgcgtgggctatgtacaaagatgaaaaggggggcaactggacgaaatcgatctcaatggcgaatgaacgctatatggaggtattgcttgtggttttgggggaagaaacagacgtaacgactatcacaaagcaggacattaagcaggtgatggaagttgttgaaaacctccctaagcgagttgtgcagccttaccggtcaatgacagtgcagcagctgattgaatgtgatgaagtgccaccagatgatctggtaggcgttgaggccatccataagcatctcaagctgtataaatcactcttcaaaaccttcctcacagaaagcaaagacattttatctaagtcgccaactaatggcgtagtggctgcaccatcgaaagcgagatttggtgcatacagcacagctgagatgaaaaagtttgtagggtgggcgcttaagcagcccgacaactggcaaaaatggatcacgttgttattggcatacacgggagcgagaagaggcgagataggaaagctgatgaagtcacagattaaattcgacgaagatagccagcgttactatttcctgattgctgaaggagggcaggggaaaactgagaacgctacaaggcaggtagtcatccaccctaagttaatcgaatgggggttcatggagtatgttgatcgccagtggaaagatcggattttttcagaagtggcaggtacaaacatgtctaagatcggtaaagtgtttgctgatgttcgagatcagttgggtattccttatttggacgattatggacagcggcggttactgcattctatccgtcactcggtctgttctgctgcaatggcaggctgggtgaaaaatattctgcacctccagcaggttgtaggtcatgagaaaagtggtgggatcacgaaacgttatttgcatacttttccgctatcctccatttgttatgttattgacggaatatgctggacttga

SEQ ID NO: 269392 - DNA, 909 bp, Klebsiella pneumoniae
atgacttttacaaggacagcgagtggtttaaaaagttacaatcgattttataaggttgaagctattgcgtacatagagggtcgccttttagaacaacaaaaaaccgctgagaataatgatgattcaaaagtatttgacgttattttttatagctcattattcaaattattctcaccgcataatgatattaaaattaaaattgtaggttgcaaagagaatgtattagattatcacgataaaatcgttaatgataaaatcgataattcttttgctattatagatcgtgattatgatggagtttatttcacacgaactaaaaatgacaaattgatagtcactcatggatatagctgggaaaatgatttttggacatataaactgtgcttagaaacggttagccttttaagcttagacactgctcaggcatgtggtatagttcaaagcaaaatcaaacgctcaattaaacgcctgtgtttaattaatagagcaaacttaatttctcagtattttggcaacggcattttccctgtaagcaaaaaaggtggagacaaaggatttagatatgatgtcaattcaagcttcccattgtcattaaaagaagtgaaacgcttatttaataaaatacctgaggatattaaatcagatccaaataccagagatcttattgctgttacaaaacttgatttcaataatttaattcaagggcatttttatgaatatatgatcttgcagatattatgtcacgcatataaaatcacctcagatataactcataacatggtagatattaacatcattaagaatatagcttttaataatttcaagttgagacctgattattatttagaaccttcaacattagttcattatgagcaacagttcaccagagtccttcgaagtgtaaactaa

SEQ ID NO: 269393 - DNA, 1287 bp, Klebsiella pneumoniae
atgaatataataacctctgtttatgtcaaaggcttatggggtcaccaagatataaatatattaatagacagcaaaacaaattttataattggggttaatggaacaggaaaaacaacactaattaatttacttgccgcagcattgacttttgactacgataaattactcaggatcgaattcgaaagcataaccattagattaaaagaagttggtggctcacgtaggccaagtattcgtgttgtaaaagatatatccatatcagacgatgttttaacttatgaaatccagaaagctgcaaaggatgcacctatagtcattccgtttgactcaagatacgagcgaatgtttatagagactaaagatggtaatagggttataagtagaagaagagtcaatcaagaggttcacaccttaaatgaggttactatacttttaaaagaattaataaaagtctcttggttatcagttaacagggcagataatttatataacagggatgttgataaaaggttattatcaacaatagatcataagataagtgatctaaacaatagccttgttcgctatttttctgtcttatcacaacaattttctgatcatacaattgaatttcagaaaaagagcttccttgctcttattaataacgaaggtgcgaatcctatatttcaattctcaaattcaatagatattgataaggagcgtaaaacattagtagaagtatttgatgttttaggtgtagaaaacaaacattatgcaagaaaattgaatgaacatttttctcgtttagaaaaagttaaaagcaggactaataccaaagctatttctgctgatgatttctcagttatttataattcttggcgcgcacatactttagtagcagactatgagatcctacagactaagaaagctgatatattcagaccccgggataattttatctcgttacttaacacaatgtttaattctcgaaagagattctctgtttccgataagaatgaacttgttgtaatgactaaagacggaagagtaattggtcttgatgagttatcctcaggggaaaaacaattactgattattcttggcgaaacactattgcagcattcagagcatgtgatatatattgctgatgaaccagaattatcgttacatgttatatggcaagaacaattaatcggcgctataactaagattaatccaaatgcacagattatttttgccactcattctcctgatatagtaggcgttgctcaagatgctattattgacatggaggatctcgtttcatga

SEQ ID NO: 269394 - DNA, 576 bp, Klebsiella pneumoniae
atgaccactgtcatcggatatgtgcgagtttccaccagcgaccagaccgttgaaaatcagaagcagcaaatcaatgatgctgggtacagcgttaaccgttggttcagtgatgaagcggtgagtggtgcagtcaaggctgcaaaccgccctgggtttagtgaactcctcaactatgtacgtgaaggcgatacgctggttgtgattggtatagatcgtctgggacgtaatacaattgatgttctttccactgtggaaatgttgcagacgaaaggcgtgaaagttgtcagcttgcgcgaagggttcgacctgtcaacgccagttggtaaagcgatgctcactatgatgacaggacttgccagcctggaaaaagatctaattgcagaacgtagaactgctggaattaaacgtgctcaatcagaaggaaaacattgtggcagacctattaaagcaaccgtcggacaggtgcgggaactattagcgcagggtctaacaccagcagctgtacagcagaagttagcaattagcaaagccaccttctaccgactaagacatcttaatcagatccctgatatttga

SEQ ID NO: 269395 - DNA, 207 bp, Klebsiella pneumoniae
atgaataaggcaatgttggtgatgtcaggactactgttttcaccgttggcggtagcagggcagatcacaatgaccgatccccagcaggaaacgacggagagcggaaagacgctctgcacataccagaacagcatttacctgttcacctacgtaacaaagggcaagtgcccatttgcgaagacatttgacactgatgatgctcggtag

SEQ ID NO: 269396 - DNA, 156 bp, Klebsiella pneumoniae
atgaagatcaactttgactcagcaactttccaatctttattacagcgtgccaacgcagaagggaaatcgatcccaaaattggtaaacgaactattaaccaccgtccttactaaagaggaaacaaatgacaaaacagaaatcaacacccgcagttaa

SEQ ID NO: 269397 - DNA, 759 bp, Klebsiella pneumoniae
atgacaaaacagaaatcaacacccgcagttaaaaccattgaagaagcaaaagcgcaaagccgccgtgccaaaggtaaacaaagatacgtagccactgaaagctggctgacgatgtttcgatattggtattcgccatctgggaaaagatataaagccaccgcctcagcgatagcaatttatagctttatcgcaggacttaacgagcaaggtaaagaatgctacgccaaccaagatacattaggcaaagttggcagggtggaggctcgacaggcacgaaacattatcaggatgtttgaagatttgggagttgtccacgtcgaggacaggaaagggcaaacgagcatttacactgcatttcctttcaccgatgctcacattaccccaccagaagcattaacagagcagctgcctgtagcagtgtctgacgaagtgccagcccctgagccagttaaggccgcagaggaacagtcaattcctgattgggatgacattccttgtgcctgggatgactttgattatcaatcggcaccaacgatgcccattcagcaggacagtccagagtttccctggggcggtgtagctatttgcaaaccgaatggacaaccaccagatgccgctgtgaaatgggcgctaacagagacaatgggtgatgagaacgcagcctaccaactaatttccagagtggtttctgaacgcactggaagaacagaagtctttactccgcaaacggaagaagattttgattcaataccattttaa

SEQ ID NO: 269398 - DNA, 201 bp, Klebsiella pneumoniae
atgtttacaaaccaaccatcacttgcttcgcttctcgttaagcaaagtccgcctccgcatttcggacacggctggatcatgggagccgatggcaagcgctggcatccgtgccgctctcaggatgtactgctggctgatctatccactactaagcaggtgaagccatggctattgaaggcgattctgcaactgttccgttaa

SEQ ID NO: 269399 - DNA, 510 bp, Klebsiella pneumoniae
atgtttgattataagatttcaaaacatttgcactttgatgatgcctgccgggctttcgcgctgcgccacaacatggcacagcttgctgcccgcgcaggtatgaatgtccagactctgcgcaataaactgaacccggaccaaccgcaccagctgaccgcgccggaaatctggctgctgactgatctgactgaggattccacgctggtcgatggtttccttgcgcaaatccactgtctgccatgcgtaccgatgaacgaagtcgccagggagaaaatgccgctgtacgtcctcaaagcaacggctgagttcgggcacgtcgctgccggagctgtatcagatgagcaactgacgactgcaggccgccgccagattatcgaaagcattaactcagtaactcgcctaatggcgttaaccgctgtgacattgcaggcacgcctgcaaaccagtccggcaatgactagcgcagtcgataccgtaacgggcctcggcgcatcgttcggtttgatctga

SEQ ID NO: 269400 - DNA, 624 bp, Klebsiella pneumoniae
atgtcaacgcaaaacttaacgaataaagatgatgtaaagctgattcgagatttcatatctcaaaatagaggcgggaaagaagttattgctcgcattctcgaagcctatgggttcacaacccgaatagccctctgtaatcagcttggcgtctcgcaaagcactatggctaacagatatgcacgcgataccttccctgcggactgggtgattgtttgccatcttgaaacaggagcatcgctaatctggttgagtactggtgtaggtcgccggtttgtagggggtaatgatgaaaaaactgtctgcctgaaatgcttcgacatcacaaatgggaacataaaaccccaaaacgatgtcatggctgatgtttcaacaattcctgaaagcttacagtcaccatttatgcttactgcggacaaaatatcttatctggctgatcgatatgaaggcgagttggttgatggtatttggttcattgaaattgatgggatagctagtgttcgcgagttgtaccgctttcctggtggtcgcgtgcgaattgagaatgggaaagcatctttcgaatgtcttgtaaaagatgtcgttgtccttggtaaaattatttcgaagacagaatacataaattag

SEQ ID NO: 269401 - DNA, 885 bp, Klebsiella pneumoniae
atgacaactacatctgataaatctaaaaaaacagaacaagatgagcgtacttgctttgttataatgcctatcgcagacatgcctggctatgaaaccggacattttaacagagtttacactcatttaattaaacccgcgtgtgctaatgcaggttttaagccaattcgtgctgatgaagttactagttcaaacttcattgtccttgatatattaaaaagaattgtagagtgtgacattgccatatgtgacctaagaggtcgaaatcctaatgtgatgtatgagttagggcttaggcaggcgtttaacaagaagaccgtattaattaaagatgacgaaacaataagcccatttgacgtacaagcttttaggtattgtgaatacgatagcagtatgcgtattgataacgcacaaaataacactatatctatatcaaaagcactctcatctactttttctgctgatgaaaatgatgtcaactctatagtacaactacttaaaatacaaccagcgcaagtcggtgaaaaaacagttctcagccaagaaaacactcttattcttaaagctataagagagcttgaacagagaataaccccacgaactccagcaaaacaatctagcctattttccaacaatcccaataataatagatattctaatataggcgaatccttacaatcccaattggagttttatccaccagagtttttaattggaaacttctatcacaacactaagactaaagaagacataggaaccctcaaaggtgtagcaacaaacgagcaaaatcttcaatatttagtttttagagataacaaaaagaaatttaaaaaaatagaaataaatgcacctgacttatcttggattaatgaagagattccattttaa

SEQ ID NO: 269402 - DNA, 777 bp, Klebsiella pneumoniae
atgtcaaaaattgatatttggtcagcgagagccgccaacttctctcaaataggtgttctagcattagcagcatttggttatgtctatactgtccttccagtttatcaaaaatcccttctagatgaggagattgcgaagaaaacgctagagcttgagaaaaaagataaacaaataaatgaatttaataaaattctttctgaaagaagttcagaattggaaaaattatctaatgctgttatcaaagctaaagaagaagctaattcagccaaacaaaacctcaaaacaatgcaggggaaatactcgaagcaatactcagaacttagaatccatcttctatctcagtttatgtctttagcccagaatcagtgttcaaaaatagagatagaaaaacagtccattacagaatgctttaacaaaatagctaattcaccagaacttagcgaacttaactcaacagatatgagacagttaaaaagaggcattcaagtagaagttccaaaattaatagaacgatataatagtaaaaaacatcaattagacatttctctacaatcattagattatgaaatcatggagattgaagatgaatgccaaagaaatagagcaaaaaaagattatgaagatagctttaaaaaattaaatatagactatgattgccaaattaaaaagatgaagcctgataacaagaaatatggtttgaagatcgattttatatttgagaaacagaaaatcatgtcaatgtcactcgaaaacatcgccaatatggctgcaaactaa

SEQ ID NO: 269403 - DNA, 717 bp, Klebsiella pneumoniae
atgagccaatctaaacaatatatgctgctgtggcttgaagggccgctgcaatcctggggatttgattcaaagttcgatgtacgcgatacgctgaatttcccgacccgctcggggattctgggactgatttgctgtgcacgaggcgccgcggggccagaggttgagtggctggcggagatgaataacctgtcgatggaggttcgcgcctacgcccgaaccgacaagcagggccagccgcacctacgtgagccgacattgtgcgactttcagatggtgggcagcggttatgacgatagcgatccgtggcaaagtctactaatacccagaaaatctgatggaacgaaagcgggtagtagtgcccccaaaatgacctaccgctactacctccaggatgccgttttcgcggtggtgatggcgcttggcagtaagcaggctgagttattgccggaggctttgcaaaatccggtatgggatttgtatctggggcgcaagagctgtgtacctactgagcttatctaccaaggtatctttgacagcgcagaatcggcctggcagcaggcacagaagttagccgatagcaagcagcgagcattgagctatacggtcatggaaggggaaggggatggcgatgtcatcacgcttaatgatgtcccgctgcagtttggccggcataagcgttatcgggatcgccaggtgaccgtgctggagttcggctaa

SEQ ID NO: 269404 - DNA, 603 bp, Klebsiella pneumoniae; identical to SEQ ID NO: 230030

SEQ ID NO: 269405 - DNA, 603 bp, Klebsiella pneumoniae
atgaccaaaaaagtcaatttaatgaccgatgcaaatgctatcgtcaacacggtgaatgaagccgtatctcagcgaattaaacagtatcgtaagcaaaagaaaatctcccttgatgaactctcccgtcgggcaggcgtcagtaagggagcgctggttgagatagagggattccgggccaatcccagcattgccctgttatgccgcctggctaccgtgatgggggtttcggtggctgattttgtggatgtcagttccaaaccgactgtgcatctcattgctgaagatgagatcccagaattgtgggaaggtgaaaaaggcgggagagcaagactgctcgcagggtcgggtgggcctgatatgaccgagctctggatgtgggaaatgcagccgggggaaaagtttgcttcaccgggccacacggaaggaacgcttgaactgttttatgttcagtcgggcacgctcacattgggggtaaaggaccatttgtatcgggtaaaaaccggctgttcggcaacggccagaacggaagttcctcatttctacgaaaaccagggggagagcccgctggtatttatcatgacagtacatgagaaaacatcctga

SEQ ID NO: 269406 - DNA, 141 bp, Klebsiella pneumoniae
atgtggttcattctggaaagcctgccgcagatgccgctggagaaactgcacgaagccgggaagatgctgaccgacggcctggaaaaaatgatgcccggcctgtggtttgacgtcgctgtcatcgaagaacaacagcagtaa

SEQ ID NO: 269407 - DNA, 594 bp, Klebsiella pneumoniae
atggcaactggcaacgcgccgcgcggattcccccggatcctgcagtggcttctcgccggactgatgctcatcatcggtctggctgtgggtattcttggggcaaaactggccctcgtcggcggtacactgtacttcgcgctgatgggcgtggtcatggtcatcgcggcggtgttgattttccgcaaccgccgcggcggtattctgttatacgccgtggcgtttatcgcctcggtgatctgggcgattagtgacgctggctggaactactggccgctcttctcgcgcctgtttgcgctcggcgtactggccttcctggccgccctggtctggcctttcctcgccagcccaccggcgaaaaaaggcccggcctatggcgtcgccgccgttctcgccgtggcgctggcggtgagctttggctggatgttcaaatccgcaccgctggtcagcgcgactgaagcggtaccagtcaagcccgtcgcgccaggcgaacagcagaaaaactgggcgcactggggtaacaccacccacggcgaccgtttcgccgccctcgaccaaatcaacaaacaaaacgtcaaccagctgcaggttgcctag

SEQ ID NO: 269408 - DNA, 1689 bp, Klebsiella pneumoniae
atgagcatcattcatgtaaatcaaattggtagtaaaataaacaatttgttttcggacaaaattgataaaagtgacttaaatcctcaagataaagaagttcaaactaaaattctttcaagatgtcttgctgcttatgctatttattgcataggtgatacctctttagaagatgcgtctatcgcagttgtagatggttctgacgataatggtattgacgcgatacattattcaccatcaaataaaagaatgatcatagttcaatccaaatggaaaaaggatggtgtaggtgaacctgacaatggagatatgaggaaatttaaagatggagttttagatcttataaatttagatttggataaatttaataaaaaaattaatagcaaaaaacaaatgatcgaaacagccttgggtgagtttgacaccaagtttgacctggtcttaattcatactggtgcgaattctttaagtaagcataatcaacaagtgatagactcgatcttaaatgagttaaatgatgcaggtgatggtacaagtgaagatgttgtgagttttcatcatctaaatcaggcgattatacatagtgggctcgcatcaggtatggatggtgaaccaatagatcttgaaatcggtctttcacagtgggggagaatggaggaacctcatcaaggatattttggtatagtagctggtgaagaagttgctaattggtgggggaaaaaaggtaaaagattatttgcaaaaaacatccggcaaatgctaggtaatacagaagtcaatgaagaagtaagaaagaccattgaggagcaaccggagaatttctggtattataataatgggataactatcgttgccgaatcaattaaaaaatcaatggtaggaggtaatagtagagatatagggtctttcaaagcgaacaatattagcattgtgaacggtgcacaaactgtgagtgttataggtaaatatgcacaagatggaggcgcaaatctttcgaaaatacgcctgcctatacgtttaatttcattggaaggggcgcctgaggactttggggcatctgtaacaaaaactaataatcggcaaaacaaaattgaaagtcgtgattttgtttccttggatgaagaacagttaaggttaaaaagagaattatcgcttgaagcgattgaatacaatattgttcgcagtgaaaacattaaaacatccgcatcaataattgacttatcagaagctacagtggcgttggcatgcgcatcgacccaagttggactggcagttcaggctaaaagagagattggtcgattctatgataatttgaataaatctccttataagacaatatttaacccccagactaatggtatttatttgcggaatgtggtcttttccctgagaaagatagatgaaattattaacctattgatctcagaattaccaaagaaatctggtaaaaaatatggtgttttagttcatggcaatagaatgcttgcatttttagtgtttagaaaaaatgtgatgcatagaaatgcaaacagctttgacttcgatattaatgctgtcaactggcttgatgatacgaaagttatacttgaaaaacttatgaatgaaatcgagattaattataaagataaatttcttgcaacattgtttaaaaatgcgagtatatgtaaaaccatttctgatagcatagcatag

SEQ ID NO: 269409 - DNA, 1365 bp, Klebsiella pneumoniae
atgaatataaccatagaaactcaagaatttgacaatggattcactgctgaagctgatatttttgaacgaaaacccttgttcaatcaaatgataagattgatacttaactcccctgattcaaatttagtctttgctttggacgatatatggggaagcggaaaaacatcattcgttaagatgatgcagtcagaacttaaaataagtcatagcaatgaaattgatgttatatattttgactcattcgaaaacgactaccaagccgatccatttatttcaatttcatctgagttatatgcattattaaaatcaaagggaatttgcgctgaagatatagcatctaagattctcaaaaccgcaacaaaaataggagccagggcattaacaggaagtgctaaatttgcacttagcactttcactgctggagtcgtaaatggcactgtaattgataaaaccactgaagccatcagtaatgctattagtggagagattgaatcattcgtcgaagataaaataaagtcaatggagcaggagaaaaaatcaattattgatttcaaagactccttagaaaaaatatacacaaacactggcagaaagacgctaattataatcgatgaattggaccgtgcccgcccggactattcattagaattactagagaaaattaagcatctgttttcagtaaaaggtttggtattcttgctagttatgaatcgagaacaatttgaaaaaggcattgcatacagatacggtgatattaacaccaatttatatttaaataaatttatacattattggtttaccctacctaagattagtatgtatgacccacctcatgaaaaaaagcacggatatacaaccatagacgagtacatccagagacttataaagaaaaacaatagccttgggattagctataatggcgtatttgcaagattaatatcacttttaattgaagcaaacagttgttctttacgtgaggctgagcgttgtatttctacattgctagtagtagataatcatgtaagaatcgccaataacgaagaaacatactatatgatatcacttgctctcatatgctttttaaaagtcgtacatccatctatacttaatcaaattatgaaaaaagaatcaaatccagataaattaatggaaagtcttaaactaaatcaaagtaaaattatagacaataagagcgaaaggttattgagagatatattaacatattattacctcagcggtgaggaattagataagcttagaaaagaaaataatgaccttataatccgaatcgaaggcacgtatcattttgaagcaaattacattcaagacattgcaaaatcccttaacaatctaattgttcaataa

SEQ ID NO: 269410 - DNA, 294 bp, Klebsiella pneumoniae
atgaaggttcaagcggtaggcattttttggttccgtgatgcacttcagtatcatgagtacaaaaagatctttactgacgctgacgtactggccgacagttacaccgactggaagcgtgatgccgaaaaattgattaagcgtatcgagagaaacggtcaacgagttatcaaagctgaagctgagacagccgatttcatcagatggtgtgtcgagcacaacgttggaatcgacgccgaaggccgtatgcaattcgcatccttcaaagcgcatcagaaactggttggcgaaagataa

SEQ ID NO: 269411 - DNA, 549 bp, Klebsiella pneumoniae
atgaacggggaaatgctttacaccctcgataggctgggaacactgtcgcccggtatttgcattgattttttagatacctactgcccctttccggagcttcaggatcacgttgccagccgtttttggccgcaagtatcaaggcatggcaataattactttttcaacttcaatattaacctgagtagctccaacgagaaggcgagcgtctttattgaaatgcttctcgaagaaagaagacgatccagttatccagataaaccgtctcgattgcgttcactgtttgcctgtgaatcaatcaaggcggcggcgtggtttagaggctccagcaaagtcccattaagcacgccaatttttgaagtttatccatcaggtcgctgtcaccgtgcagacatgaggttgcttaatgttaattgcaccccaccagagctatcacatcggctggatctttactggcagggtgagacaaaacaacttcacgatgggtatgagcctttttgggaagtgctcgtacctttacccgccgcaatcggtgcgcgaattcaggagtaa

SEQ ID NO: 269412 - DNA, 546 bp, Klebsiella pneumoniae
atgtttgatctttcgaaattttccgttcctaaagattttagaggtaagaatccgattgttgtgcagacatggtggtttgttcatttcttcctttttaaaatgtcaccgcaaatttttaacagatggagagtatttttactaaggttgtttggagcaaatattggcaataatgttattatccgaccttcggttaaaattacttacccatggaagttgacaataggtgaaaatagttggattggcgacgatgctgtattatatactttgggtgaaattttaatcggtgaaaatactattatctcacagagatgttacatatgcacaggtagtcatgattatgatagtttagattttaaaattactgccgcacctattattattggtaattcaacttggcttgcaacggatgtttttgttgcaccaggcgttaaaattggagacaattgtgtaattggtgcaagaagctcagttttcaaggatattgagtcagattctatttgtttaggtagtcccgcaattaaaattcgtgataaaaatcaaaattaa

SEQ ID NO: 269413 - DNA, 156 bp, Klebsiella pneumoniae
atgaacgaacaaaccaattaccgccagttctggcgaagcctcgtgatctgctgcgtgctttgcgtgctcctgttttggatcccgatggggtacctctcttttcgtaccgcctctgtggtgtgggaggcgctgtggtcgcttattacaacgaaatag

SEQ ID NO: 269414 - DNA, 603 bp, Klebsiella pneumoniae
atgaataacacgcttcttcctccctctgccagcgcgtggatgcgtggcgccgaagctgccacggcgaagctgtccgggatcacggtagccattcgcactctgtggacgccgacggagtgtccggttgatttgcttccgtatctggcgtgggcgttgtcggttgaccggtgggataagaactggccggcagagaaaaaaatagcgtcaatccagcagtcctactggcttcaccgccggaagggcacccgcgccgccgtgcgacgggtaatcgaagatatgggattttccgcgacctttgcggagtggttcgacgtcggagacgagccgggtacattccggcttgaggtggatgttaacgaggtagggctgacaccgaaaactttggacgaattaaaccgcctgatcggtgatgcaaagccggtcagccgtcatttagcgcaaatgacgattgcgaccagctcaagaggggccgcgcggacaggtattgcggtctttaatggcgaaatcattaccgtttatccgccgggatataagccggatgacagtatttattacgatgccactgcgcattacgacgaaaattatcaatattccggggactga

SEQ ID NO: 269415 - DNA, 681 bp, Klebsiella pneumoniae
gtgcgcagcgtcggcgatcatctggcggtgtatcaccgcctaagcggcacgccgccgacgccgaagctgcaggcgcagcagcgtctgcgtgccgacagccgcctgctggatgactggttgcgccggggggagccgctgcgttatcggctggggctgtatcagggggggcggctgatccccttcgtggaagccgctatcaatgactgggcgccgcccccgccgccgcgtccggtcattaagcaggttgtgcaggggccgcagacgatccgcctcgatagcatggcgctgttcgataccggcaaatcgacgctgaaaccgggttcgacaaagctgctggtgaactcgctgctgggcattaaggccaaacccggctggctgatcgtggtggcaggccataccgacagcatcggcaacgataaatccaatcaacaactctccctgaagcgtgccgaggcggtccgcgactggatgcgcgataccggcgatgtgccggagagctgttttgcggtgcagggctacggcgcaagtcgtcctgtcgccagcaacgagacgccagaggggcgggcgcaaaatcgccgggtggagatcagtctggtcccgcagaaggacgcctgtctgacgccgggcacggctaatacgtcaggagccggggctgacgccttaaaaaacgaaaccgagtaa

SEQ ID NO: 269416 - DNA, 507 bp, Klebsiella pneumoniae
atgaacgcgattaactggcctgaaggctttattccgggttttaccgataactttgtttctaatgaaatgatcatctcaggtctgaacgtcaatgatgtctggccgctcctgagtcagccattgctatggccggaatactataaaaattccgccgatgtgcgcttttatgacaacaaaggtccagaattggaaaatggggttcgcttctacttcagcacgtttggtttcccagttgaagctcaggttgtggagtttgttccacctgctgaaggtaaacctgctcgcctggcatggcacggatgggccggtgaaaaagataccgctcaacgactcgatgtccatcatgcgtggctactggaggatctttccggtcacagggtccgtatcctaacgcaggaaacacaaaacggagtcccggcaaaagatctggcaaatacccgcccgaacccaatgcttaatggtcatcaggaatggcttgacggcctgattcgagcagcaaagaaataa

SEQ ID NO: 269417 - DNA, 909 bp, Klebsiella pneumoniae
atgaaaaatgatatcagaaccctcgaccttaaccttcttaaggcccttgatgcattactggatgagggaagcgtgactcgggctgcacagcgcctctccctgacgcagcctgccgtcagtggtatgcttattcgcttgcgtgattactttgacgatccactctttgttcgcaccagccacggtatggtccccacaatgcgggccaacgaactttctacgccggtaaaacaaatcctcaccgatatcgctatcctgctgaaaccaaagaaatttgatcccgtgacggtggaactgacttataccatcgtcgcaacggactatgcacttaaggctgttgtcgttccgttgatggctgagctaaaacaacgtgcaccgaatattaaaatcgccgtgcggcccgtggacaatgagcgaatgtatcagcagttgtctcggggtgaagttgatctggctttgataacaccgcaaacaacccccgaagacctgcatggaagagcgctctatgaagaagattatgtctgcgtagcacgacgtcatcatcctctggcagcgagttcagaaatgacgctcgaacaattttgcaaacaggaacatattctggtgtcatcagaaggtaacttcaccggtgttacagatgaagcactggctaagctcagtctgacacgacgagtaggcatgtcagttaatagttttcaggtgatacctgatatattgcaagtgactgatatgattgcagttgtacctcaccgcatggtcctgactaacaacgatctcatcattctccctttgcccctgaaagtacccggctttaccaagagcatggcctggcatgagcgaacccatcgtgacccaagtcatcagtggattcgtgctttatgcgcagaagtaagccaacatcccgcgccctga

SEQ ID NO: 269418 - DNA, 477 bp, Klebsiella pneumoniae; identical to SEQ ID NO: 141542

SEQ ID NO: 269419 - DNA, 225 bp, Klebsiella pneumoniae
atggctgaaatcaattacgaaaaaattctcttggaaacgggacttgtggcatcaaatgcttctggtatccagttcccacaacaatttggcgcaatgagtcatgagttcggcggcttaagcggcgttgcaaacttttctcatcaacatgagacgaccaagcttaagtgttctaccagaacaactagctactcaactttgcatgtaagcacaactacaaaagcctaa

SEQ ID NO: 269420 - DNA, 1311 bp, Klebsiella pneumoniae
atggctaagtataaggcgtatccagagtataaggattctgggattgagtctttagacattatccctaagatgtggtctataaaaaaactcaaatatatttttgagattaagaaaagaattgcaggaaagataggctttgatgtcttatctgtaacccaaaaagggataaagataaaagatattgaaagtggtgaaggccagctttctatggattactcaaaatatcaaagggtatattctggtgagtttgcaatgaaccatatggatttattaacaggttatgttgatatttcaaactatgatggtgttactagtccagactatcgtgtctttgctgtacgagacaaacatattttttatagccgctactatctttatttactgcaagatgggtataaacagcgccgcttctttcatcttggacaaggaagtgctcatttaggtcggtggcgtttgccgactgaagctttcaatgaaattgtctacccatgtccctcgctgacagaacaaattcatatcgcctctttcctcgatcacgaaaccgcaaaaatcgacaacctgatcgagaagcagcagcaactgattgaactacttaaagaaaagtgtcaggcagtgattagccatgctgtcaccaaagggctaaatcctcatgtgccgatgaaagattctggtgttgaatggctgggggaagtgccggagcattggaatgtcagtgcaatcaagtatatattaattaatcaagattcgaagaggatccctttaagtagtgaagaaagaggaaagcgagaagggaaataccgttactatggtgcatcaggagtaattgatcacatagatgattatatttttgatgggccaacaatattagttggcgaggatggggcgaatttagttgcaagaaatactccgttggcattttccgctaaaggaaagtattgggtgaacaatcatgctcatattttaaagtcagacgatgagttggtcgatttttgggctgagacaattgagcacattgatataaaccctattgtaagtggttctgctcagccaaaacttaccgctgaggctttaaataatttaaagattacatatccacctgaactaaatgaacggcttaaaattgaggtgttcattttgacacaaaagaaaagatatcattatttaatttctcgtgctgaccaacaaatagctttactccaggaacgccgcaccgccctaatctccgccgccgtcaccggaaaaatcgacgtccgcgactgggttgcgcctgacacgcaagaagttgaggagccacaggaggccaccgcatga

SEQ ID NO: 269421 - DNA, 1077 bp, Klebsiella pneumoniae
atgagcggcccattttatgccatcctgactgattacggtgaggctcgttttgccagcgccctggtaacgggaatgccggttacattttctgaaatggctataggtgacggggctggttcattaccggtacctgataaaacaagaactggtttggttaatgaggtttatcgctcagccctgaatcgtgttgtcattgccgatcaggctgcaaatgttatccgcgcagagatgattttacttccccagacagggggtttttggatgcgagaggcggcgatctttgatgaaaaaggtgaatgtcttgccgttgcaaaccttcctgaatcttacaagccgcaactatctgaaggttcgggaaaactgcatgcggtaaacctctggattgccgtaagtaacaccgcagatgtggagcttaaagccgatccgtcagtcattctcgctacggttgatgaagtgaataaggcaaagaatgaggcgaaggattacgccgatcaggttgccggtgatctggataccaatattcagcaggccatcgctgacgccatcacagcggcacgtcgggaattctgggaagaggaaaacccgccgggaacggtgcgcttctttgctcaaaatgtcgatccgaacgagaaatggccatggtcgcaatggacttacactggcgagaataaaacaatccgtgtcggcaaggctgacggttcggacgtcgggcagatcggcggcagcgataccgttacactccagcaggctaacctgcccgccgtacagattgatgtgagcggcgaaaccagcgagcaggaacagcaggtactgacgacaacgggcaacggaagacaccggcacaaggcaggggacggagcaccgggggatacctggcaggaggccacccacggaacggataaccagaaatatacgggatggaactataccgactatgcagaagaccatcagcatgaagtcacgatcccgccgcataaacactcgaccagcggcaaaacagccaacctcggcgaaggtaaatcgttcagcgtggtggaagcgcacaccctgttgatgtgctgggcgcgggttgcatag

SEQ ID NO: 269422 - DNA, 354 bp, Klebsiella pneumoniae
atgaaaaggttggctttagtcgggttattcctcttgccgggattgtcactggctgcgaacagtggcggcataaccttgcaatgcgcaggctacaagctggagctaattcctgattcaatgtttaggattaatggggaatacgttacgtcacagaaaattaaaaccctcggtgacggtaacgggatgaaggctgatatggggctgatgcctgccaaagacggcaacaactacggatttgaatacgttcgctaccccggcactgaaaagcgatttcttaacgtccagctcctgcaagccagcatggacgcaccgaagattatcgggtcatttccgtgtaagaaggtgccggattga

SEQ ID NO: 269423 - DNA, 579 bp, Klebsiella pneumoniae
  misc_feature (464)..(473): n is a, c, g, or t
atggctaatgttacccttgagaaaggtattgatatatttataaagacatgccagatgatcgataatagcaaccctaataaatatgaatttagaatcgcagggcctataattgactctaataccaggaaattagtagatgcgtttacttctgagtttaaaaacgcgtattatgttgggccagtttacggtgaacaaaaagaagaattccttaatgcgagtgatattttttatttcccctcgaagtataagaatgaagcagaaccattagtgttgtatgaggccgcttcatgtgggtgtttagtcattgggagtcaggtcggttctatgcgggatgctatagctcatattagtggtgagagttttcctttgactattcattccgatgaagagacaattagtaatttcgtaagagatgtttgtaatttcatttgcgcactcgataataatgaactttatataagaannnnnnnnnnagacagactttatataagaaaaagaaagtctaagcaaaaatttaatgataatcgattcgctaatatggataagattgataatctacttgactgtcttaaaaactag

SEQ ID NO: 269424 - DNA, 300 bp, Klebsiella pneumoniae
atggagcttaaagatatttatcgcgaaacagatattatattttctaaccgattgcatgctttactatatgcgtttgaatcaggggcatacccaattgctatgggtaatgctgagcaaaatttcaaggtaaaatatgttttggaagatactctgctgcaagacaatttcattgatattaccgtcgaaaactttactggtgatgaagccattaaacaaatattcaagtctcgcaatcaaaacctgacaaaggatattaattacaacatgataaaaatatctgattttattatggtggaatga

SEQ ID NO: 269425 - DNA, 264 bp, Klebsiella pneumoniae
ttgccgaaaatattcctgagacggcatttttcgcccggtaggctgcagcgtcccgccaacattcatgacttcgatcgcgagcgcgctgtcgtccgggctacggtaatacgtggtgctaccctcggggatattcgcaatatccgcctgcgccgccgccagcgtcatgtactgccggctgagaggaatcaggttctgcctggtttcctcaaccacagcatccctttctacttgcgaggtttcaaagtctgcctgctgctgcgttag

SEQ ID NO: 269426 - DNA, 936 bp, Klebsiella pneumoniae; identical to SEQ ID NO: 168321

SEQ ID NO: 269427 - DNA, 897 bp, Klebsiella pneumoniae
gtggatcttaatgctttaaaaatgtttgttcttgccgtacgtggcggtagtctttccgctgctgcgcgtaacaacaatattcctttgcccacgctcagccgcaaaatagccgagctggaaaaggagctgaactccgtgttgctcgaaaggactttcacaggttgcaggttaaccgaggccgggcaaaagttaatgaattatgcaagctcagcaatggatattctgactgatgccgaacaggctctgctgacagcatcgccccgtattacaggacatctgcgtctgacaataccccagtcacttgaggtgtggtggcagcttataaggcagtttcagaaggcttatccggatattgctatcagcgttcatacgacggagcgtcgtgtggatctcatcgctgaaggcgttgatgttgcgttgagagtcggaactatcgctgacgactccgtggttattcgccatcttatggattttcgtcatattctggtcgccagcactgctcttttcagttcagcaccgcttcctgtaaaaccgtccgatcttacgggctatccctgtgcggcctggggatcggtgacaggggcacggcccgtctggatgctgggcaatcatgcctatgacgttcctgccaccttaacggtaaatgattatcttcatttgcgggcaggagcacttgagggggaatacattacagagttgccggttttctttgcagctgactatataaataatggaaagttaatcgagctgcttccagcttatccactgccttattcttcattacatctggtctataaaaggcaaggacatatctcagcctctgccagagcttatattgatttttgcagtgacaacattggcttgctgtcggctaaatgcctgataaccccctcctaa

SEQ ID NO: 269428 - DNA, 885 bp, Klebsiella pneumoniae
atgaaccttgttgacggtatggaggcattcgtaaagattgcagaccttggcagctttgccgcagcggcacgtgagcttaatatctcgccctcagccgtaagcaagctggttggtaaaacggaggaagagctgggagcacggcttctcaaccgaaacacccgtggattaagcctgacacaggaaggggagatgttccttgaacgctgccggatgatcctcaatgaactaaaatctgcaaaagaagagctttcatctatatcgagtgaaccaaggggaaagttacgtgtaagcatgcctaatatgccttcgttctttgtgcccctaatcagtcgatttatcgagctttatccagctgttatgctggaagtaaatctcagcgacaggctggttgatgtcgtggatgaaggctttgacgccgtaatccgtgtcggacatctctccgattcccgcttaacggcccgctcgctcggtaactgccccatgaatctggtggcatcaccggagtatctgaagagatacggtacaccttcctgcgtggatgacctcggctcacacagttgcatccagtaccggtatccttccagcggcagaacagagccctggccgttactgaataccggggccggggacatcaatatcatccccgctattatatgcaacaatactgatgttcgcctgggactggccctgaacggaaaaggaattgtttttatgcccgggttattgacagaaaaatatcttgcgtcgggagaattggagattgtactgggtgataacgttgggcgaagttacgatatgaatatcgtctggccgatgaatagatatacaaccccaaggctaaaatcttttgttagttttatggttgaatattttaacctgtcgtga

SEQ ID NO: 269429 - DNA, 2511 bp, Klebsiella pneumoniae
atgccacatcacgacatcagtacaagcgtaagcgtacacggagcaagaacacataacctcagggacattacgtttacattcccccgcgacgcaatggtagtgtttaccgggatatcgggctcgggtaaatcctcactggcttttgataccctctatgcggaagcccagcggcgttttatggaatctattgcccctcatgcacggcgtcttattgagcaggcgtccacaccggatgttgatggtatcgatggcctgccgcctgccgttgccctgcaacagagtcgggccggggctcaggagcgctcaaccgtcggtagcctgacccgaatttccgtcaccttaaggctactgttttcccgcgcaggtattcgccccgaggggatcccgtttctgcccgccgagtcgttttcacccaataatcccctgggggcttgcccggcctgccaggggatgggaatggttcatgaagtgaacgccgatgcgcttgttccggacggtacgctgagcatccgtgaaggtgctatcgcctcctggccgaatggctggcaggcgaagaaccttcgttctatcctcgatacgcttggctacgacattgatgctccgtggaatactctgtcagaacaggacaaagagtggatcctgtttaccgatgaacagccttctgtacctatctttatgggtctcaatgcagagcagcgtcaggaagcgatagcagccggaacagaaccttcttataccggtacttataccagtgcccggaaatacgtcctgcaaagctattccggtgggaaagaatctgtaaaaaaacgtctttcacgttttattaccgtggcaccgtgcaccgaatgccacggtaaaaggctcaaccagaatgcattgtctgtgacttttgccgggcatgatattgctcaaatcggtgagctgacgataacgcaattgaaatctttatttttaccctttgccaacgggcactctcagtctctgcctggcgaggctgcattaagggaagccactatcagaatgacgaccgacatttgcgagcgtctcgaacaacttgaaaaactgggccttggtcatttgtctctcggtcgccggaccacaatgttgtcttcaggggagctccagcgtatccggcttgcaacccagctcatctcccgccttttcggcgtgctgtatgtgcttgacgaacctgcggccggattgcacccggatgacgtgcgggcgctgattcagtccttacgttctcttctggaggcaggtaactctctggtcatcgttgagcataacctggacgttatcgccgaagcagactggctgacagaagtcgggccaggaccgggccgactgggtggagaaatcgtctataacggcataccgtccgggcttggacaggtttcccgatcgcctacggcaggttatctgttcggccagcgctatacgggcctgcgccgacgcagacttccggagcgctggctgaagcttgagcaggttatgtgtaataatatccatatggatgatgtccaaatcccccttgagcggatgaccgtgatcaccggtgtatccggttcgggtaaatcaacgcttctggcccgggtgcttccgacgttgctacagcggctcgataaaaccccggcagatgaggacacggaagaagaaaccgtatctttggatgttcaggggaatatcacggctggaggaacctctctcaaacgacttgtccgtatcgatcagaggcctataggacgcacaccgcgttcgaatctggcgacctataccggtttttttgacacagtccgtaagctctttgctgaaaccgatgaagcgaagaaacgcggctttgacgccagtagattttccttcaatctccccgccggtcgctgccccgcctgcgagggtcaggggcagataaccattgaactgatgttcatgcctcaggcaagtgcaccatgttctgcctgcggtgggcatcgctacaatgacgaaacgcttgaggttcgctggaataacagaaccatagccgatgtactggcacttaccgtagacgaagccatcaccgtattcaggaacaatgaatccatacagcgttctctggcagcgcttgtctcacttggtcttggctacctgacgttaggccagccagccacggagttatcaggaggagaatgccagcgcattaagcttgcctgggagcttcaacgggtgcagcggggtacgacactctatctactcgacgagccttccacagggctgcatgctgcggatatggataagctgatgcgggtactggacaggttggttcagcgcggggatacggttgtgatggcagagcacgacatgcggattgcctcggaagctgactggatcctcgatctcggtcctggctcgggtgaggacggcggggaaatcgttgcggctggtaccccggaggaggtcagtcatgcaggtaacagcatcactgcgccttacttactcgcaagattaaaaaaacggattggcgatcctgaagaataa

SEQ ID NO: 269430 - DNA, 171 bp, Klebsiella pneumoniae
gtgaacccttatgaatacctgaaatatactcatgcgctgcgcggccatctgagtggtcagacgccggtcgacaacgtcctgaatgattttgagtcggttaacttcgttcaaagtgaaaacgtccgctgcatgagccgttatcagaatctatcgatggtgaatctacgttaa

SEQ ID NO: 269431 - DNA, 639 bp, Klebsiella pneumoniae
atgaatggtgattatcgcggcacctatggcgaaatcacagccgggtacagctatgacaaaaataccgatcgtctgaattatgggattcagggaggtgtggttgcgcatgccaatggcgtgacgttttctcagcccttgggtgaaaccaacgtgctgattgccgcccccggggctgccggcgtaggcatccagaatatgaccggagcgacaaccgattatcgcggatatacggttgcctctaacttaatgccttatcgcaaaaatgatgtgtcattaatcaccgatacattaccggctaacgttgagttagagcaaacggttaaaaccgtggttcctacgcgtggcgcgattgtcagggcgaattatcgggcaagcgtaggcgttcgcatgttgatgaccttgagccagcgaaacggccaggtagtgccgtttggcgcaatggccagcgttgatggaacagatcataacagttttatcgtgggtgatagcggacaggtctatttggcgggtctcgatcctgaggtaaacctgaccgtgaaatggggaaatcaatccgcaaacacctgcagggttcattactcgataaacatgacgaagctgaataacgatgtgattatcgataatgctgtttgccgataa

SEQ ID NO: 269432 - DNA, 933 bp, Klebsiella pneumoniae
atgagttttgatggacgacttctctcggggctaagtgtgttggcagctgtcgtcgaggctggtagtttcagccgcgctggcgagatactgggactttcagcttccggcgtaagccgatctattgatcggcttgaagcacgtctcggtgtacgtctgctgaaccgcaccacgcgcaccctgaacctcaccagcgaaggcagggctttatatgagcgcgctgcgccgcatctggaaggtattgaagtagcggcaagctatgtttctggtgctgccgtggcggtgcgtggtgcattgcgcgttagcgtgaatcccatctttgctcgttacattctggcacccaaattgccgctgttacgccagcgtcatccggatctgaaactgacggtggtgcagcaacccgatgtcggcgatctggtgacggaggggatcgatgtcgcagtgcgctttgggccgcaacctccctctaccatcacatcaaagctgctgctgaatacgcgcgtgctgacggtagccgcgccggcttatctggcacagcacggaagaccacagaatccccaggatcttaccaggcatgaatgcattcaatatattgatccgcgcagcggtaaaccgttcagttgggaatttcggcgcggtcgggaatggctgtctgtagagacacaggggcatctgatcactactgatgtcgatcttatggtgcaggcctgcgtgagcggcaccggtattgcgcaggtgttatcactgagtgtcgcgcacctgatagcagacgggaagctcacagaactgtttccggaatggccggatgaaacctatccactgtacgttgcccgcccatcgcgtcgtctggcaccagcggctgtcgaggcctttttgaatttttgcactgaaatcagtgacgattttgaagagttccagcccagcgcacagcgatga

SEQ ID NO: 269433 - DNA, 1323 bp, Klebsiella pneumoniae
atgacaacaaagcgcactcttttcaaaggcggcattatccttacgctggatgccaatgttcctaatcttgacgtcggcgatgtccttgtcgaggacgatcggatcgcggctgttggtccggctctgcaggcggatgacgctgaggtgattgatgccactcatcatattgttatgccaggactgattgatgctcatcatcacatgtggctgggtgtcatgcgtcgcatgatgccagatgtggacgatctgtttgcttacattgatgttgtcgctgaaaaactgggtgcccactatcggccgctggacatgtttctgagtaccagactgaccgcggccgcctgtctggacgccggtatcactaccgttattgatgcctgccacaacgcgcgcagcccggcccacactgatgccgcgctggatgccctgcaggagagcggtattcgcgcattacacatggtgggtgcggcgatggacaagcaagcctcagccgcgcatctgccgggcgatctgccgcggctggcgcagcgctggaatacctcggaaagccgggtacgcgtgggcctgttcgggcaacttaatctggactggtggcaggtcgcgcgtgatctcgacatgcgaattctgacggaattcatcggcgatctggcgaagctcggcccggaatttgccaaaccgggtgtgctgggtacgcacaatatatttaaccactgttctcgggttccgcatgagacatggcagctactggccgaagcaggtgttaacgtcaccgttaatccacgttcagatgcgctgtttggcttcgacgatgagagcttcgcctatcagaaggccgttaattatggtctgacgccagcgctgggcattgatctggataccgcgtttggcagcgatatgttcggagaaatgcatgcgctgtttggacaacagcgctcagcgatgcgctaccggcgcttccgtggcgaagagagtgtaccagcacctattacggtcgcagcggtactgaaggcggcaaccgtcaatggcgcacgcgcggccggactggaggatcagattggcacccttacgccaggtaagcaggctgacatcatcatggtacgcaccagcggcgtcgccgtcttcccggtcacgaatgtaaccggaacggtggtgcaggcgattgaacgcgcggatgtggacacggtaatggtggcgggacagttacgtaagcgcgcgggtcagctgattgacgtggatctggccgcactggaggcggataccacagcgtcccgtgattacctgctcaaagccagcggctggcatgtcgatcgcttcaccgcagcctga

SEQ ID NO: 269434 - DNA, 1200 bp, Klebsiella pneumoniae
atgccagatctcgctataaagcgaagcatgcaggcaaacaacccgcccgcgctgcttccccgcccggcttcgggcgttatcgccgcactgttctttggctatctggcggttggcctgccattgccggtgattccgttattcatacatggtcacctcggtttcagtaacctcgtcgtgggactggtgatcggcattcagtttctggccaccgtgctcacccgtggctatgccggacgggtaaccgaccagctgggcggcaagcgttctgcactgcagggagcactgctttcggcgctggcgggtgggttgtatctgaccgcttccgcgtcagatctatcgcccaccgccagcctcggcatcgtcattgccggtcgtctgatggctggctttggcgaaagccagttcgtcacggggtgtgtctcctggtcaattgcttcggttggcccacagagggccggaatgtcgatgtcatggaccggcattgccatgttcgcagccctgtcaattggcgcgccggttggcatggcgctgtatcagcattacagcctcgcggtagccatgacggtctgcattgctgcaccggtcctggctgcgctgatcgcgctgggctcttctgcttatgtgtcgccgggaggcacgcgattgccattttatcaggtgatcggacgcatctggcgcgaagggctggggctgatgctgcagggtgtcggcttatccggactcaccgcttttgcctcgctgtactttgcggcacaccactggcagaacgccggtctggtcatgacagcctttggactcgggtttattttcgttcgccttgtcttcggccatctgcccgatcggatgggaggctatcgcgtggcaatctggtcgctgacggttgaagccatcggccaggccatgttgtggctgggcacaaatgaatggacggcgcttgccggtgcgctggtgaccggactgggctgtgcgctggttttcccggcgctgggtgtcgaagcactccggcgggtgccaccggccaatcgtggtagtgcaatgggcgccttcgtcgcttttcttgatatcgcctatggcctctctggcccggctgcggggtttatcgccggtcattacagttatgccgccgtttatctctctggcgcgctgtgtgcactgctgggtgcgctgcttgccagtgtctcccgccgcgcccaattctga

SEQ ID NO: 269435 - DNA, 771 bp, Klebsiella pneumoniae
atgtctcgtatttttatttccggctcgtccaccggcctgggcctgatgacggctgaactgctggttcagcaggggcatgacgttgtgctgcacgcgcgtaatagcagccgtgcagaagatgcccggcgcgctttaccgcaggccgaagcggtcgtcgtcggcgacctcgaaacgattgcgggggcgaaggaaaccgcatcacgcgttaacgatctcgggcatttcgatgctgtgatccataacgccgcagtgggctatcgtgaagccagccatgtcacccgggacgggctgccacatgtgttcgcaattaatacgctttccgcttacatactaaccgcattgatcgcgcgtccgcagcacctcgtctatctgagttctggtatgcatcatcatgtcggagcctgtctggacgatattctctggcgcaagcggccctggaatggcgccgacgcctacgctgagagtaaattgcatgacgcgatgctggcgtttgccgtggcgcgtcgctggcgggacgtgcacgtcaacgctctggagcccggctgggtgcccaccagaatgggcggcccgggtgcgcccgatgatatggaacaggcgcatctgactcaggcctggcttgccgccagtgatgatccgcaggcaaaggtaacaggtaaatatttctaccacctcaagcgcatgaccgcgaatccacaggccaatgatgttgcactgcaggatcggctgcttcatatctgtgctgagctttcaggtgttatgttgccggagtaa

SEQ ID NO: 269436 - DNA, 201 bp, Klebsiella pneumoniae
atgtgcgtgattcagactgtcaggttgcaggtcattcgcttttgtgaaatgacaagcgaactcgccagcaaagagggtcaaggtgatttaagtctggagtactggaaggaaggacacaaacgttattttgagcgtgaaggcacttattctgagaaaatggaacttgtctttgaggagtttgagcttagcgagattttgtaa

SEQ ID NO: 269437 - DNA, 1344 bp, Klebsiella pneumoniae
atggcaaaacatcctgtagaacaagcacctatgctggattttagaagctttaattttgaggaagtatgtccattcctcaacgattatggcgtgactgatgaccaagggagatacctgcactggagccagttaaaatggagggttccgagcaagaacgcaaaaaacatttggttagcaatcaaattcaatcgccactcggccaaaaaagatattggggtttttgacaagaatggtaatgaatttcattatataacgcatgattcgttagaaccaaaattacataaaattgtccaactcggtgcgggtaaaatagcggccattgctggcactaaggcatctgataatattaagcaaaattatttggtttcttcattgttaatggaggaggcgattacaagcgctcaattagagggggccgcgacaacaagagctgatgcaaaaaaaatgcttgaagaggagttatctccagctacagatgatgagagaatgatactaaataattatatgcttcttcgattgtctgatagacggaagaatgaacctcttaccagagatttaatgcttgaatttcaccgagttgctaccgccggggtttccgaaaatagcaatataccgggtgagtttagatgtagtaacgatatatatataggaaatgatgaaaacccattgttttaccctccagatcatgctcttcttgaggagcgtttggagcatatatgcaaatttgcaaatgagagacacgatgggaatgatggttctaaatttattccgccagtcataaaagctatcatattgcattttttaatgggttatgaacatgcattcagagatggtaatggaagaactgcgagggcaatattctattggtttatgttaaaaaatggatatgatatatttgaatatatatcaataagtaaggttatcaaggatcatgcaagggattatggtatgtcgtatttgtatgtccaaaaggattatggggatttgacttattttatagattttcatttgcgtgtgatactcgaagcatttgaagagctacaatcttatctcaagagtaaaacagatgagttttacgagatggttaaaatacttgagcattcgaaatttaaagataaactaaatttcatacaaaaagatttgataaagaaaggaatcaaagagcctggccgtatgttcgttgttaaatctgttcaaaatatctattgcgtaagtgaaaacacagctaggagatttttgaatgaattagcatctttagggattttccttccgataaaaattggtcggacaactaactatattgccccagctgacttaagggataggctgaacaaacaaaaataa

SEQ ID NO: 269438 - DNA, 567 bp, Klebsiella pneumoniae
atgctatatgcggcttcaaaatttggagcttttggtatattagcagtttatctagttttgtacatcaaaaaacctaaaaatcaaaaatttggtttgttttcaacactgatgtttattctgacaattatcataaattttatagttaataatccattgtcaagcccacgcttccattttttaagtatggcattggctatacttgttattttcagaaaaataggtgggagattatcaagtatagctttattttttgcttcgccatttttactatttattgtgttccccctagtcaaacatttaggtgagacgtcaggggattataacaaatacggactatcagaatatttggtgaaaggcgttgattttgattcgtttcagcaattggtcaacatcacgagatttgtctcggacaaaggatattcttggggagagaactttgttgcgggtattggattttttattccaagaagtatttggcaaacgaaaccaactaatttaggtattttagcggccatacatatcttgagaaataccattttgaaaaagcaattactgccatttcaataa

SEQ ID NO: 269439 - DNA, 381 bp, Klebsiella pneumoniae
atgaccgccataaaaccattcaaacctctggacgagaaatttccgtttgaccgccaactcggtatcgcggccgcgcctcttgtgctcatcaacctgtttacggtcgtcgagcccgcagacgaagcgggcttcctggacgctttcagggcggctgccggggtcattacgaagcaaccgggcttcatttccatgcaactgcatcgggcgatcggcgatagtccgacttacctgaactatgtgatgtgggaatcaactgaggcggtgcgcgccgccttcaccgatcccgcgttcctcgcgaaacttccggcatatccttcatccgtcgtggccagcccgcacctgtttcagaaagtcaccgtccccgggttctgtacggcctga

SEQ ID NO: 269440 - DNA, 894 bp, Klebsiella pneumoniae
atgaatgacgtcatcatcatcggaggaagctttgccggccttgccgcagccctacagcttggccgtgcccgccgcaaagttaccgtcctcgatactgaccggcagcgcaatcgctttgccggccattcgcacggtgtgcttggccacgatcataagccgcctcgggacatcctggacgaagcacggcagcaactggcgcgctattcaacgatcagcctggtcactgcgcgagccgagagcgtatccggcaccatcgacgatttctgcgtcgtcactgacgatagcgaaagcctgcgggcgcgtcgcctgatcctgagctatggcgtcgctgaccagatgcctgatattcctggttttgtcgaaggttgggggacgtccgtcatcccgtgcccctattgcgacggctttgaagttgccgaccagcattggggactcgtgtggtccgggccccagtcgcacaaccaggtccggctcttccatgactggaccgacagattgaccgtcttcggcaatggtcacaacatcgcccccgacatacgggccgatctggcggctcgccaggtccccctcgttgatggacggatcatcgaaatcgtcggtcaggcgagccgtagcgccaccatcaggttagagaccggccccgatgtcgccgtcaatatcctcttcgcacatccgcgtaccaggccgtctgcaaaccttcatggcacccttggacttgccacggtcaatacgccaactggcatcgccctcaagaccgacgagcgccgcgaaaccagcatgccaggcatttacgccgctggcgacctcgccaacccgggaatgccctcggtcactacggcaacatggcaaggcgcgatggcgggtatcttcgcccagcagtcgatgctcgcttga

SEQ ID NO: 269441 - DNA, 660 bp, Klebsiella pneumoniae
atgacgcataaaaacagccagacccgacggggccggcccgtcaacgaggcgcttggccagaccatcgtcgccgccgcctctgaactctttctggaactgggatttcaggcgacgacgctggacaaggtcgcccagcgagcgaagatatctaagctcagcatctatcggcacttcgataataaagaggcgctgttcagcgcggccatcatggccggctgccatcagttttttgcaccacaggctcttcttgaaggcgttgagggttcggttgaagatcagttgatggtggtaggagcactcctgcttcgtacgctgttgagagcagacgttcgtagtgtcgaagccatggtcatggccgacaagacgcatcaaaggtcattaagcaaacgccattatgaagctggccccgcgcatgtcatcgcccaaatcgaggcgcttttgcatcaactgcacgccaagacccttctgaacgtgcccgatcctcaccagtccgctcgtttgtttgccgcactttttaaaggctccgaccttctgatgatcgcgcgcttcgatgaggccaaagcacaggacgacaacgaaatagaatcttattgtcggtcggccgtcgccatgtttatcgccgcgcacggtggcaaccagaatagggatacacaaggttaa

SEQ ID NO: 269442 - DNA, 930 bp, Klebsiella pneumoniae
atgaataataagctcaccgccatcgccacctttctgcgcgttgccgaagccggctccttttccgcagctgcccggcagctcgggatgaagcaatctgccgtcagtcagcagatcgccgcgctcgaagaggagcttggcgtggtgttactccatcgtacgacgcgggccatgatgcttaccgagcagggggagcattaccggcgtgatatgcagcgggtgctgaacgccatgcaggaggcggaaaggcggctcaacccggcggagcctcagtttcagggacgggtgcatgtccagctgccaagcggtctcggcagccttctgctgccgcatctgctggcgctgcagaaacagtatcctgaactgcacctgatgctgtcgctcgacgatcggatcgccgatctggttaccgaaggggtggatgtggcgctgcgtctcggccatgagccgccgccatcccatgctgcgcgggttctggcgcggattgaaacggcgctctttgcggcaccaggtcattacgccgtccagtccgtggacgacctggcggtgtatccacacgttcggtttagcggcctcccgcgtgatgctccgctgcggataatttccgcagacgagacgagagaagtgcaggttaagaccgtttttcgggccaacaccagcgatgcgctgttacaggcgctggaatccggcatcggcatcggagggatgcagcgaccgctggcggccagggccctcagggccggaaggctggcgccgatcctggccgactggcgattaccggaccgcttcctctatgccgtctatcccgatgcccgttttattccgccgcgggtcagaagcgtgattgctttgattgaggcgcgactgcccgagataaccgcgggggctgagggagaggggccacctgattcagaaccgtgcgcggtatcgtga

SEQ ID NO: 269443 - DNA, 1053 bp, Klebsiella pneumoniae
atgaacaagacatcctctcaggtcgcactggtcgctggcagcagcggcatcgttggccgccagctggtcaacaccctgttacgtcgtggatgggaggttatcggcctcagccaccgcgccctgtcgcaaccagggacgatcccgatgattcacgtcgatttacgcgatgcccggcatagcgcacaagcgctccagccgctgtccaccgtgacccacattttttacagtgcctggaggaatgccggaaactggagcgagatggtggaaccgaacgttaccatgctgcgtaatctggtcagtcacgtcgagcaaaacgccccgctgcaggcggtcagcctgatgcaagggtataaagtgtatggcgcccatcttggcccttttaaaacaccggcacgggaaagcgatcccggcgtacccggggctgaatttaatgccgcccagctcgcgtggctccgccactttcaacaaggcaaagcctggcactggagcgctgtccggcccggcgtggtgggcagcccggcggcgggtaacgccatgaatcttgcgttgagcatcgcgctgtacgcatcgctgtgcaaagccctgggcttaccgctgcgctttcccggcacgttaaccacctggcacagcattgtcgatcatactgacgccgacctgttggcggaggccacgctgtgggccgccgcctcaccggcgggggaaaacgaggccttcaacgtcaataatggtgatatctggcgctggtgcgagctgtggccgcgcatcgcgcagtggtttgaactggaatgcgccccgccggtcaggctctcatttcatcagttattcagcgactaccgtgccgtctggcgcgagctggccgcagagcggctggtggaagcggacattctgcgcctgagcgacggtgagtttgccgatttcgtgttcggctggcagtacgatatgtttggcgatggcagtaaactgcgccgggctggcttcctgcgaatgcaggccacagacgagatgtttttcagcctgttttcgcaactgagaacggcgcgggtgatcccctga

SEQ ID NO: 269444 - DNA, 798 bp, Klebsiella pneumoniae
atggactataatttcaaagaacatttggaaaaagcgcgagagctgtatcagcagggaagtgaggcggctttaagatattgcgcattggaattaagatttgctattgaatgccatgtttataatcaattgcgagcagggctgggtaaaatacccgaatctgtcataaatacatggcaacctcctcaagctataaagtctttatgtatgtttgaagaaacagcagataaggatttaagagtgataattagtggggatgagggtgaaaatatagaaattgaatataaaaatataaagtataaagacttaaataaatggtataatactttggggagttatcttcatcaaccgactataaaaaataataactttgtaattgataatggtaagttggaagtgattatatcaaagctttcgcacatagctgaatacaatcttataactctccaccgtggttacgaaagaataaaatgtgaaaagtgcggtaaggatattttatttacaaggagtcatattgaaaaacataataagttacattgccaaaaccaagggtgtcgtaattatgtgattattagagtggctcaggataaccgctttgagtcatttcagacagctaacataccatgtttcaaatgtgataataaaatagccatgcatttgtgtgatatagaggatggaagccatgtcatatgtaaaaagtgcaaaaatgagcatatagtaaggaaatttatttactcaggagatacagtgattcctgtaccagagtatacttttgagcatgcaaatggtattagtgaataa

SEQ ID NO: 269445 - DNA, 732 bp, Klebsiella pneumoniae
atgagaggctttaggaaaggacggctgagcaatgacattttggacgattatattgcggtaccaggaaatgagaataatggctggaaggatgaattctataccaccctgtcttctcacgacagggaccgtctgaaaaatgagataattaccgatcaggctggtctctgtgcctattgtgaaaaagcactcagagatgaaggtgacaacaaaccattaggatttaaagttgaacactttattcctgaaaacagcaaaactattaaagaaaagattgcggccgggcagcccgcacctactactaactactcgctgttgtgggctaatctgttgggatgttgctttggcggggaacacccgcgctcagcaagctatgataagtccctgacagataaatctaatctgagctgtgatgtaccaaaatctaataataactggtcggaattgatcctcgatccttcgcaacagcctcctgacgatggtacatggtttgaattcgatgaagatggattgatgaatgtctcggcagattgcccgactcagtatgtgactaaagcccggcaatcaatagaaatgttgaatttaaattgtgtcagattaacccgtttacggctggcagcactggagtcgattagtactattactgatgaagcggacatcgctgcattactcagcaaggatgctgcaggtatctacggtgagtttatctcgctgagaaagtggtatctggcttaa

SEQ ID NO: 269446 - DNA, 1626 bp, Klebsiella pneumoniae
atgaatcggacggttaaaaaaataaaacacggtgctgatcatgataattcgatcaaagatcagtacaaaatgtttaagtattataaagaggggatgtttgttgaagtcgactctgaagagtcttcacgttatcgtcagatgtgtcttaataacctgaaagaatcagagtttcgtttaaaaagagtaaagctggtaaactataaaggctttaacgaactatcgattaatcttgataacgatgttatcctgatcgccgcaaataatggttatggtaagacggggattctggaagcgatttatctttctctttcatggttttatcggctagtttatggttctaaccagggatggaggttcggtgataaatacatcaaccgccgagtcagtaatgccgggatgctagttaatctggaagtttcggtggggaatgacaaaaagtcctccgactatcagatcgatattgcccgctcccttggtgctttttcggttaaaagtgactatgctgattttaaagacttggctgaaatgtatatcgaatttcagaacagtggcattgtggcaccgatgtttgcttactactcagtagagcgaggtaagaattacccagatggtggattcacatctatgattgaaagcggttccagcaaactgttggataaactttacccagactcttcactgaccctttcttctaatattttttccaactttatcaaatgggctgccgaaataaaaattaaaaaaagcgtttctagcgaagatgaacaaagcgaaaaaataaaaagtctcaaagagttcatctatcatatcagtcattctgatcttgacgaagaaatcaaaaacacactaattagccagaaagagaaggaaatcgaaaccatctttagcagccagtcggcggataaattgaccaatctggaccggatggaaaagattgtggatatgattttcacactgggatgcgctttcattgatgatatttcttctatccagttaaaatacgatgaaaagctagatgcattagatcttgtatgtataaagcgagattgtgaaattagtgcttcctatctctctcatggtgagaagagcacgctttcattgttattcgacatcgctctgaagctgatctatacctgtggtatcgaagacccatttaatggtcacggaatcgtttttatagatgaggttgaattacatctgcatccctcatggcagcagtccctgctcagtaaattgaaaaaaaccttccctaatgtcaaaattattgccaccactcatagtcctaatatcctgaatactgttgaagagcaggcgatcaggaaaattaaacttaaggataatcgattttatattgaggttccgactttttcatatggtgcaaactcttctcaggtgcagagtgatatccaggatgttgcagcacggcccgatgtcgagccagtacaaaatcttacacgtttccgtgagatgatgaaaaacaatcaatacgacacgccagaagcacaggcccttctaaagaaaattctgcaatggggtgatgatcatgacccggatgttaccaaactgaaaattgatctggaactaagaataaagcgtaatgccaaaaagattagtaaggagcaataa

SEQ ID NO: 269447 - DNA, 669 bp, Klebsiella pneumoniae
atggatttttccaatttctttaacagcatcaagcctgagatgtttaaaaatgcgctgttgcatgattcagtggaaattgatgacaatactttaatgctattgatcaacatctttttttggtgtccgggtaagaaactctcggggaaactggtattaagtgtcggcgcaccatcatcaccgtttatttctaactatgtgatgaaaaaatttgatcagttgttgtcggaaatttgcgcaaaggcgggtataacctacacccgttatgcggatgacatgaccttttcaactcagcgtgagaatgtactgtttatgctcaaagagcaaattgccacactgcttgcgcagtccggttatgaaaatatcaccatcaatgaaagcaaaactgtattttcatcgaaagcgcataatcgtcatgttactggtgtgaccttgacgaatgacaaccaactgtcggtcggccgaaaaaataaacgttatgcctcatcattgatctttagatttaaactgggggaactcagtactgatgaaactctaacgttaaaaggcttacttgcacattattttcatattgagccgggatttaagctttcaatgaaaaaaaaatacggcttagcagttattaatgatatcgtcaattatcaggaatcaataaatgaatcggacggttaa

SEQ ID NO: 269448 - DNA, 147 bp, Klebsiella pneumoniae
atggggttctggctggtcgttatcctgtttatcgccgtggggaaggagagccgccagcgggaacgagggccgtggcggcggaagggggagatcaacggcaggcgcgtcggccaggccttcggtataccgcaacaggctgcctgttaa

SEQ ID NO: 269449 - DNA, 1668 bp, Klebsiella pneumoniae
atgcaaccagctaaatgttttttccatagtttgtgttttgttccccctaatccactaacctccggcattaaaatatttggattttctgagttcctggcgtcgctagcacttttggttgttgtattcactgtaacggatacaaggtataaatttcgtatttccatttccccactacctctttacatcatcacttttattataattgcactcactggatttataagccttttatcagacatttggagcgcaactggatggtgggtgcttgacacaagctttggcataaaaatcgcaactcaatcaatacttgggttttgttttttgttttgttttatgctatggatatattatgcctttttaaggccacctacatttagcaaaagaaataaaataaaatatataaacgcactttataaatacattacaaaaggagttgaacaagaactagccataatagcagatgagttaggtcgctcggccaatgtaataataaaatatgctggtagaggagatggagtgacaactcaagttgccaatgatattttatttttaatcggaaataagaatttttgcaaggtgcttgttaagacatcaccacgcactgccacatactttttcgccggtacaggcacttacggaaattatgacatcccgctgcaccagttttcttcgaacatatcacaagaggtgataaaaaacaaaaactctataatttatcatgaagataatagctattactccggtttaatgggagagatccaagaatggtcaaaaagtttttatggaaattacttgttagtagactctctacatagagggcatctttccccttttgatttcaattacaaatcatttttggattttgatagtgaacagtgggatgcatacttcagagttggcattatttatttaaaagaaaaactacaaaaagaaaagttcattgatacaagctccgttttgaattcaatcttggacaagataaagcactgcactcaaaatacttacatgatagataaacttgaagatgaatctaaaaaaaacgaattgatggataaattacgatcgtcgataaattttattgctgatatgtttgatgttacatccaaacttcaagccaaatcaatttaccaatataacgtcaaggatcgagacaatcatgttttcgacatgcattattatgtatctgatattttattggaattgttatttaatgcatcgaaatgtcaggcggataattttttcacttggcacattcaaaataacattgtttgggatgggatattttttccacataaggaaaataacggagatttttataaaaaatccaaaagaaaattaatacgaaaaatatacaacgaactaaatgaaattatcaacattgccaacttcaaaaacactcgaattgcaggacttatattaaatgtccttggactggcccctggcccttgctatgcaaccaagagtgataggcgattgctccttatcaagaacctcacgcagaacatcataaaagaacattttttgaccatattagaacaacaaccggaagttgcacaaaacatgtttcctaaatgcatatcttacgatccagagaaaaaatgtctgatcaaaacctactccagaggaatcaacaaagaagcccccaaacattatctttaccttgattag

SEQ ID NO: 269450 - DNA, 1740 bp, Klebsiella pneumoniae
atgaaaatatcattttttggagttgataattttcgcaccatctctggtggcatcgaaaacaataagataatttttaaggatactaatactttatttatatatggggctaataatgccggaaaatcgacttttttaaaggcgtatgtatttttttattcaaatgaaaaacctacaggtaatgatttttataaatgtgatgataaaaattctatagaattcgagttagaggttgagctcgatgatctagataaacaaaggatagaagagaaagctcctaaacaaaaagaaagctacaaaaaatatttgaaaaatgattgtataagaataaagaaagtttggagtaaaaacggttcgaagatagaagataagaattttacctacgattataatagtgacaaatatgatgaggttggatatgcgacagttggtttgcatacagtttttcaatcttgcttaccaaaacctgtatttattaaagcgatgccgacagaagaggaagcaaaaaaaatacttaatgacatattaaagttgatggctgaaagtactcttagaaaagatgatctcgcagaattaaaggcggcacaagataagataaaagagttgcaggataggatgtacgatccaaaattaattgacgcatatcaagcatctgttaatgattattttaataagatatttggcgatacggaaatatatttcaaagatcaaaaggatagggttgtttggacagaaaataaacttggaaaggattttgatattgagtttctgaaaaaaaatggtgatggtgtagtagatgctaacataccctctacttatagcagtgtaggtcatggaacaatcagaacggcaatatttaccttgctattaatgcgggatgttgctgagaggtttgagagaaaacaagggcgtaaagattacatggtcctttttgaagagcctgaactgtttctttatccaaggatagttaaggaacttcgtgatcttatttatcaagttagtgttgaagatcttccttatcaagtgctttgtgcatcacattcatcttctatgatagacctttcaaaacctaaatcttctataatacgcttggtaaataacagagaggggaccaaaacataccaaataaatgaccagtttttgaaggatgcgaaggggatagtgaccaacgatgaactcaagcaggaaatgtatgaagtattgaggtttaatccttatatatgtgaatcattttatgcagatgaggttcttttgattgaaggcccaacggaggagataatatctagagcatactttcaggaattcccttctcaaaaaacagtattcgttcttaattgtggtactgtaactaacatccccttctatcaaaaaattttctcacgtttcaatattaaatatcatgtgatttgtgatactgacaaagcttcaatcctaagtattgatgagagtggtaacccatgctttgattctgggatacaaaaaaccatatcagaccagcattcttacgataaaaaacaaaataataagaatattggtttgcttagaactcattccatcacttttgaaccagcacatcaaagcacagatatacctgatttcttgagatttgtcgatagtggtgataaaagtaagccgtttaatgcaaacctatattggaaggatattctaaagcctaatatcactcatcaagatataaataaagttccaattataaaatatcttagtgaaattatagctcactaa

SEQ ID NO: 269451 - DNA, 210 bp, Klebsiella pneumoniae
atggactggtggggaatacctacatttaaagaatatactaaaagcacaatatcctttcctactaaaaaattttcaaacctaatcactaacgattataaaaccacgtctaatgacgtggtttcttgttatgacttagtgagctataatttcactaagatattttataattggaactttatttatatcttgatgagtgatattaggctttag

SEQ ID NO: 269452 - DNA, 168 bp, Klebsiella pneumoniae
atggggcgcatcacacgcctactcactatcaacgaaatcctcaaagctaaacaccgtgaaaaagacttcacccttcatgatggcgatggactgtttttactcttcaaacctccggtaaaaaactctagcgtttccgttatcaacgaccgggaagcagcagccgcatga

SEQ ID NO: 269453 - DNA, 984 bp, Klebsiella pneumoniae
atgccactaatttttagaactgttaagaattatcattctccatactccaagatcaataccaatggagaaacttcactacaatgtagaaaaattgatttatatcgtagtatcatcactgttgggaacccttcatttttaacgtttaagaatattcatgactacgggttagctagagcactttatgactcgatattcaaaaaaattggaattattgcaagcaatattcagtcagactttacgggtatgaggcgacacccaatatttgagtcatatttatccgatgagaaaagaattattagttataatttaggaatggcctttgcaaaattttattccgaaaagattttagatattccgaatttaatccatgtcgagtttcttaaaaaacagaatgctgtaactttcgttaaacaaacgggagataagcgtcctaaagaaccagatttagttggacaaacagtagatggcaaatggcatgtatttgaagcaaaaggaatttcaacatctgaatcatatttaagtggaaaaatcactgaggcaaaaaaacaaattcaacaaatagctacaattcagggtacaccaccttcaacaggtacggcttgtgctacatatattggtcctgatcgtatactgacctatcttgaagatcctccgagtaacgacgggcgacacgtcaaagttaatattgaaaaattcgtcgaatcttactatgcacctttcctactcgccgaaaagttaacaggcctaactcttcgtaaagagtctatcgatggacttgatgtagatttttatgaactacagcatgcaagtaggaaattgcgcattgggctttctcgagaattatccgaattgataaaaagtaaagattataaaaacctaaacggagttatcgggcagttgaaagaatattcaaatatttacgaaaagcaaaataattactctattggcctcgatggatttgttcttggttatactgagtattag

SEQ ID NO: 269454 - DNA, 168 bp, Klebsiella pneumoniae
atgatgagaatcatcagtaaacgtcaggcaatggcgatataccgccagcattctgagtcccggctgtttcgcttctgtaccgggaaatataagtggttcggaagtatctgccattactacggcagggaagtgcaggatatccgggggggtattggccgtgtttgctga

SEQ ID NO: 269455 - DNA, 762 bp, Klebsiella pneumoniae
atggctgatttagacagggattttacccctgatgagttactcatcgtatttcgtaaaaagaggaaagcgttacgttttcatctcggggtcagacagaaacatatcgccaggcaatggctgaataaagatactgaaattgttatcgtgctacaaacagggagacaaacgaaggatgaagatttagcgcggcgacttgctgatgagcacggagagaaaaaatggcggcgttatctgaaaattttcagtctttcagaatggatgataaaggggatcaggaacgatatgtctgaggctgaacaatactgggagcagggaacatcggctctcgaatctgatccagatcatgcggtgcaattaatgctgaaggctatcgcgttgttggatcgcggtctgaaacgcagtgaatccgcagcaggtaaaagaatcaaggaacggcataaactcaattctgcttatggcggaaaggtcaaagcgacacgttttgatggcgttaaagacgaagtgataaaacacctggaagcgcaacctgagggctgggaaactaaaaccgatgccatcaacgcaattattaaagcgttaaggccctatattgaggagcatggatggccttccgcacaggataaaaacgactcacgggacgcggcaatggtggaggcaagccagagcaagttgttggctgaatggtcagtcaaagacaaaagagtgaaggcggcgttcgcgaaggcagtacaaaaacgtatcggggtgtcgcaaaatcgatag

SEQ ID NO: 269456 - DNA, 999 bp, Klebsiella pneumoniae
atgatggaaggtcaactaattttctgttcggattcgatcctgcgctttcgctctgactatgatgaaacaacagcacttccgttgctatcaatccagaaaactatttcagataccgatcccttttttcttctcaggttctttcgtcataccgtgatgattgaagaaggaacaacactggcgaatatcttttttgccattgagccttggaaggaactgctaaccgcttatttggatcgggatgttggggcctatattgacgaagtaagaaaaccatccaaacccaccacatggaatctggagtggattggcattgatcgccgaagctctgtttaccgcgcatatcagcatcaggatatgggagacggtgaggattttacagcttggttcaatcgtgagcggatccccaccgacgagtttgatatagaaagtagctgcgatgcttccggttttatcaaaggtaataaagaacgctggagtcttagcgaaaatgtccacgaaattaaaaacctacctgtaatcctttacaacaagcaaacgctgatatccttgcagaaggatgagttgctaagagaaagtgtctctggggtgaatagtaccgatcgtagccgtttcgtttatggggatacctctttttccttctatgaagtgatggaagccattttcattagcggtttgttcttctataccccaagtgctgctacgagctgctttgacggattaaaaaatagtctcaatggactggaaagcgaggtatcgaaggggactgaacctaatctcgctgacattggagaagataaacagctaaaaatagaagttgccgatggtgcctttgattccctgattacccacatggagtctgaaaccgaaaactggcaacttatcaaaaaacgatgccaaaatgagagttctttgccactcaggattggggttattacaccggcaaagccgccggagttgcgcttatgcggagagatttaccgggatagcagtgaagtttaa

SEQ ID NO: 269457 - DNA, 1401 bp, Klebsiella pneumoniae
atggacaatgtcgcacctacaccgcagcagtttactagcccactaagctgcatactgttaaaaatcagtaaataccagccgaatttacatcttacccctaatgagtttagctatttggcggcaatggcgatgtggggtatggaggagtcaggtgtcgaagcaaatagtgagcattactttgtacaatccggctacgatgagacgacatgtcacagcatcatccgttatgtggatgaaagaattaatgaagatcctaatacctcagatgttcgggttaataactttctgaaacgagcgctggaacagggattgttgtcactggccggaatgtctgtcgctgatgtggggggagcatatcgtctgactcagttggcacatgatttgttaaaaccttttcaacaatctgatgaattagaggataaagaaacattaagccaacgttatctgagaattgatcaggaactgtccagtttaaatgctgccagcgatggagacaatattactgatagtgaatggttggtgaaggtagaactttttttaccgagcctgaaggatctgctgacaggtgtttttaaaaatcaggaattccttatctctaaatttcattcaatgcgctccgagatacaaaccgaaattggtatttctctggaaacggaaattcagcaacttctggaaataatacgcacgctggctggtcagatcaacgatttgagaatgttagtaatgaaccgtgccgatgcggtattaatgcaactggaaattttgcaaaatacagtcgtacaaaaaggtggggctcagcgattaaaaaatacattatcctctttgtttggttcattaatggatgttcgagaattcgctaatcattccttaagggatttatccggattctttagcagcgtgctggaccgtatacgcatccgtatcgcgttagatcccaatgctaatctgggatatttaatcgatcgtactatcgagttgtttggtcggtcatcatggtcgttagcattaccttcgaccattaagctaatgcaattacgtgaatgggacacaccgccgcctccggcggataatgcgttgttcctcgatgataatgatgatgaagaattggtgcgggagatgcctgcgtttcagttagagagtttcgcaagggagtttgttgaaaaggcattaagtgataataaaccggtgagtaacgtttctgttatcagaaatattctaagtaaattcccattcaatgaaacggatcgctttcgcctggtacagtgtacaataaaagaactgatgaaacagagtgacaatattcaggatgatatctccccggaatgggttttaatggatgagacagcaaattacgaaatcgaagagcaatggctaatttcacaaggtgatctcaatgactga

SEQ ID NO: 269458 - DNA, 774 bp, Klebsiella pneumoniae
atgactgagcttgaatctacacagggtgatcaatttaatacatttctggatgtgatgaaatcacctctattccccgttgtagattataaattacgtagagggattaacatattacctgcggattatatgctgtattcatttgttaatcaggcatttaatccgctttgtgaatattacgactgcttgtctttatctttatgcttttccaatgaatctgtttattacttactgcctcagcgccgtggaaaaataccattagagcgatttaatgagttgcagatggtcactggtttgattattgttgcaatggaactcgaaaagcaaattagccaaaaagagtggttcacaacgaaccaactgcttgagcgaatgagcaatcaattatctgaaaccagactgctggaattatttcgtcgtcgtccaggccaacaaacccaatacgatttatctaaaatccaggatgaaatcagaaagtcgctcatagtattcgatcgctatgcttttattcaactctctaaggatcgacaatccttccagacaacacccgctatttatcgttttattgaaccgctgcgaggattacagcaagagtcagaaattccacaacgtctggctgaactgatccaggaggggtatctggtcaatattgatgaggccgcgcgggatagtgtagatgaagatttggcagagagcgatcgtttctctgccgaagaagacatggatacaacgggcgatttatttgcttccgggactcatgaaggggaacaattgtga

SEQ ID NO: 269459 - DNA, 4032 bp, Klebsiella pneumoniae
atgttggcactgtttcagcatggcattttaccccgagcctgtcagtcacccgatgataaatatcgtctggcccagatccttcattcagcaatggccgggcgtctggataaatcgatagaaaaacatctcagcgcttatttaatggcccatactcgcgggaatatacattccgtagtgaatatggtgcatgagtccatgatcaaagtcagacttacgcagcaagacctgcaaaattatcaaaaggattatcaattttttaattcattacttacgttgagcttatcattttcagccaatacgtggtcagtcattgagaaagctctggcgatgaatgatgaagagcgcacgactattcagaaagaaaaatatcggattgaacgtgagctggaaaaaattgaggaaactctgggttcactaaggcgcaaggaagacgccataaaatcggaactgtcaataacgcaacaacagataagcgatattgatccccgacagcaatgcgctaatgccggtaggatttactttaatcaagagcaaaaagcaattggtgaactgaataaacttgaaccacagttagagagtgcggaagaagcaagcaaactccagcaaggtattgttgatgagctggaaagaaaaaaaagtgaaaatgaagagagccagctacgcacagccaaacagctgtctaatgtcgttacgcgttatgacatcgctcagaaaatggcatcgcaatataaccacgcaaaacagctctatgatgagattaaccaatggaatatggcttttactctgtcaggattaagcgcattcattgaacaactcgtgaaccaggaaaaagaggcgggaaatgccctcaaccatgcggagcgccaattacgatctcatcaggaaatcctggatgcttatactgttgccgcaaacagtgcgcgaaaattgggggatgatatctctcctccagacgctcagcgctggtttagggaaaaatgtggtcaactagaaaaatggcgtatcgaagacgctcaactgggggggcgacaacagcatcataagacgttacagggagatcatcaaaaacagcgacgtcttcagcaacggcttcgtgatgcaggcatgctatcgttgccatttaacgatgaggactttgcgcagcaactggcgatacaacaagagcaagaattgcacttaaatgaacaaaaggaacaattagcgcaacgtcagaccgaagtacaagatcaaattaagcagcttgatatcgatattgcacgctatgagcaacagagtcagcagtggcaccaatatcagccatcggttagctatttacgtactatttttcctgatgatgatttgacaccgcaacgctgcgaacaactaattcttgaccatgcgttacacgttaaatcacttcggcaggtagtcattggctacgaaacggaaatcaaacaatgccaggggcgccgtgacaaactgagtggaagagaagcaggaagtcttgagtatttgcggactcttgccgctgacgtatcgggaatatctgttgctgaactgtacgcagatatcgaagtacaggacgccggatattttgaggcggcgttagggccgttaatgttcgccatacttgtcaatggtgatgtcgatgatgccgccagacaattgcttacacaatacgatgagcaatggccgcttcccgatattttgttgatcagtgtaacccaacctatagacgttttacgcaacgggtcgttcgagtcggaattactttttaaagatatcaccgacgaatataacacggtggagagtatcctcccgccctggtgtgttatagatgaaccgcgataccgccgcatcagccagatacgttcagagcccgtattaggtgataaagcccgcgaggcgcttatccttcaattggaccaacagattcaactggtagaagaaaagagcgagacgctggaacgtgagattgaagacgttgaacgtaacaacgaacatcttaaggccgttagcgcggctccctcatttatttgggatgatgaaccgccgctggaagatactcgccgacagcgaagccatcgtcataccgctctgacagatattgaagaaaaacacagaagcgtgtccagtcagtggaaaaaaagccggaatctcttactggcgctacaggaatgtgaaccagacagtaaaatcctgtttcgggattttcctcaggaactggccgagattgctgatcagataaagcgggctgaagctgccgggcgtgatattaaacgctatcagccgttaattaatcagatagaaaaagagtatccattactacgggaagaatacccggaaaatatagcgcaagtacgccagcaggttgagcagaacgagaaaacctggcaaacctctgcaatgcgagttcgactggtgaaagagttagacagtgtgcgtgctcaccttaaccaggaatatgctaatgctcagaaaatactggaagatgaagcacaagcacaaatcctcttatctggcgatcaaaaacggctggaacaggacggtgaccgaattaaacaagaactcacaactgcaaaaaatgagttagctgaaaaagataagttttactcagatctgatatccgcgattactcgctaccgccagaatcgtgatgaggctaaaaatgatctggataatttgccatttccctatacattcggtctggaaattaaacttgcctcacagctcgcgcatttacagagccaacttgaaaaactgaataacaatttaagagagtgctatacaaaaacggctgcgttgcatcagcaacgctcaaaagaagaattaaacctgacaaatcaaaataacaaacttactgccctgacagaaaaaattgaacagataactaagcagcgcaacggaattataagtgcattaaaagccgatggctcttatggtgagctggaacctgtaatgcgcgaaatgctgatcaatggcaaagtaccatcaccgggagcgcttttgctagttgatcaatcattgctgactcaactgacccggttaactattgaatattctatttcttcagccgacccctttatgcagcaattagcgtcctgcggtcaggatacatctgacatcgctgaagtctgtgccacgctttacagccgcgcagtggcgctgtttcgccgccgtgcacggcaggatatccagcgcactacacagccaagagaaatgttgcaggcgttatctaaggcggcgaaagacgcacagatcatgttggctgaaaccgaggctgcgttccagatgcgccgggatgaactggccgacgctctatcgcgccggattaacgatgaaaaaagggcgataagccggttaagcgctgaacttaccggaattggctttgggcaggttgccagtgtgcgtctggaagccaggacggttaagcattttcaggataccctgaacgccctgaaatcaggcggatatggtatggacgatctcttttccacggcaggaaccgttaccgaagcgctggctggcctgtataaaaaaatcaatcaacatgaaattgatggttcacatttgctggatcaccgtaattatctggatgtaaaaacgctaatacagcgtcgtggtgcagagcagtttgaaccactgaacgcttccagcctgtcaaccggggaacgaatcggctccgggctggcggtgctgattgccgtgctcaggcactggggacgtagctctcacggtaataaagagcctttcactttgccgctggtgatggacgaggtttcccgtctggatgccgcctctcaggcgacagtccacgaactggcggtaagaaccgggtgccagatgttggttgcggccccggaaacgttagggaaaattaccggaaccggctaccagttggtgcgcatagtcaggacagataacacgggagccaacgggcaaagtgttacgcgccatcaggtgaaaattaccggtgtccgcgacgcccagcagttgccatttgacgttgatagctatctggctacagcagatatgctgaaagtgacgaggtga

SEQ ID NO: 269460 - DNA, 1008 bp, Klebsiella pneumoniae
atgcataaggaactgtttcagttaggtttccctgtcagtgaacttggcgatattctgcagcaactgaaagaacggcaaatgatgttcgaaaatgctaaggaaaagtcgctgcgaaattttctggctgaactgggtattatcatcccttccacgcgcaatcgctggcggctggtggaaagtgaacgcttggaaattctgctcgctcaggtgcagcaacagatacaacaacagatcattggcagaaaagagcatcgtccggctatccctcggcgaatgcagaggatccatcataaatcagcgtcggcatggcgaggtaacagtaaagcaggtctgagccaacccatagtcaaagggcaaaccgttacctatgatgatgtcttgcgacttcgtagccaagggacggagctgcggctaacgtttaccggcaataatagggaaaacgttttgtttgctgatgatgaaagtcgatggcgttcggagtgttgtttgccagaacgaatgctacttgatttactctctgtggacatgtcatcggcgcaactgatcatgaccgttgagaatttaggtgcttatgttgatatgccgcttgtcgatggtttgatactgatctttgcccccggtctgaattatcaacccgcctgccgatggatttctcaatacggacaggatataccctgggtacattttcccgatctcgatccgaatggtttgacgattgcccggcaactatcccactcattgtcccgacccttccggatctggttaccggacttttggccgtcggcgcatcaggttaatgacataattggggtcggaaaacatgcctgggataccgcgccggattgccctcaactcaggcaattaaagcaggaacagcgttggattgaacaggaggtgctggttgtggactatcgttttaatgcagcgatgcagaggttggttaatcattctggtgatgaaatagtacttatcgaatcgacggaaagctcaattgaacaagatgtgtag

SEQ ID NO: 269461 - DNA, 1803 bp, Klebsiella pneumoniae
atgattgacagattagagcttacaaaaaacgtccagttctatgaccttaaaattcctctcgataatgaggaaagacaaatcacaaataacgaaattctgagcatcctgaattctgccgatgataacattgaaccagactctgattatctgataaatgatttcagggtggaaaggaatttgattgatgctgatgttaattttatttattctcttcgcgtcttccctacactaaggcctgtctattttatgggcgaacttgaaggtggtgagaatttttacgatacaatatatgcgttcatattgattctggaatttgataacagtatagccataataaaaaagagctgtgcaaatatatctgataagttagagaaggattttaatttaatcacaagccactcattggcaggaacatttaatgattctgatgtttcatttcagaaaatatccacgcgaagcatgacgaattcggataaagctatcaggagtcgttcatttgaatcatcagatcttaagggggctttttctacacatgccgctggcagatctataccttactatttgaaacttcgacaaggtccaacaattaagacaatttcaggcagtggtagattagttgaagcatcacagaggattagtttcgatgatattgcctcatggtcttacaatcaattatgccttgtcaggcaaggtggcggtgtcaaagactttttaaattactttgcacaacagaaagagttaaatgaagttatggcattaactcagccgaatgcactcctcattgaaagtactgcgttgtatgaaaaaatagagtctgaggggctaaggatcaaatataaacttcctgatggtgaagattgctatctatctgagaaaaagctcaataagcttttccaaaaactcgaaaaagtttatgaaatcagaaatgacttgacgcttgattcagctattggcagtgcaaaaataaaaaggaataataaaacgcttacaatagagtctactatccttagacggttaaaagttgtatcgaatggtaaagagtctacgctccagagtttcatatttaaaaatggattttatagtataacattccaggatcctcgttatatgtattttatggggaattgcttcgaagatgcgtctggaatttcagagataaatagtattctagaaattcttatacctgttgacaatatggataaggtgctaagtgaaaagggtacttttacaaaactgagtactaaattctctacgggatcaatgtttgatttagttgaagaaattcataaaaaagatgactatatattttgcgacgatctggggaacgaatgggctgaccacataacgtttaataaacaagattcctgcatcagtttcattcattcaaaacatggctcgaagacgacgtcagcaagcaagttacatgatgttgtcggacaagcaattaaaaatctggggtatatgtattttagtacaccagatcttttggacaaaattaaaaataaattaaagaaacactatgtaaacaataatactgctacaaagatcaataaaataaggaaaggtgatacaagaaagctcaaaaagtatcttgatgaattatcaaaagatgttaaattgcacaggaaatgtattttgagctgctcatttatttcaaaaaaagaagttaagcgtgagtttggtaaattacgacgtaatcagccagtaaagccgcatgtgatacaactcttatggatattatcttccttttctcatgcggttaaagaagttaatgcagtgcctgtaatatattgtgaaaaatga

SEQ ID NO: 269462 - DNA, 1905 bp, Klebsiella pneumoniae
atgaaattcatttcccccgagcaatggtgtccgaaagagatcgatgatctggaacctagcgcatggaatgctttaagaacaccagattctgtaagcgttatcgccggtcctggtgcaggaaaaacagaatttctggcccaaaaagcagtctatttattggaaaccgggatttgcccaccaaaccaaaaaattttagctatttcttttaaaactgacgcagcaaaaaatctcgctgatcgggttaagttacgttgctcagaggaactgagtcaccgcctggtttcgataacattcgatgctttcaccaaaagtctggttgatcgtttccgattagctcttccgcaggaatggagaccatcaaaaaagtacagcatcagttatcccaataagaaagatgttgcccaattctgggcgcgacgacagcatcgcgtatcatccagtgatgccagagcgattgaatacgaaacccgccatatggacaccgcttcatttgagtctcatgttgttggttcatatcgaattccggaaaatacgtctccaccacaatcaatcaaacattatctggtgtactggtggcttcgtgagcaaataacaaatgaaaacgaagaagaatcaacactgtcatttatgactatcaatcggttagctgagtatattgttcgctctaatatccatatcttgcgggcgttaagggcaacttacccttttgtttttgtcgacgaatttcaggatacaacatatggtcagtacgatttcctgctgtctgcttttggtcagacaaagaccacgataaccactgttggggactataaacagcggatcatggggtgggctggtgccaaaacagatgcgtttcatcaatttgagtatgatttttctgctacccgatatcagttacagttaaaccatcgctcatcgccagaattagtcagactccagcatattgttgcaagagaaattgaacacggcgcttgtatggcccaaacaaaagttccccaaaagatagataaaggatgcactttcattctgaacagtcgctccgttacctcagaggtggattatattgctaaatggataagtcgaaatatgcaatccagaggattaaggcctcgtgactatgctattttagcacgacaaaaaccagaaaattattacgaccaactaaatcaatcgttgattagttatcatttaaaattaagaaatgaaagcgttaaaattggtaacacaacactccaggatttgctggcagaagaattcactattctcttttcaaatttacttaggtttgtaatcgggaaaaaagaaccacaaatctggagtcagctatactcaagcattgaacaattaagaggcatttcaccggatgatatccgcgcgcacaaggcagttgaaaatcagctggttaatttaaaacattctattcaaacacttcttgagccgccatacagtactactactactgcccagcccatcatggagcgcattatttcatttatatctccttccgatatgcgtaaagcgtttagccgatataatgctggcgatcttttgaatattacactagaagcgttggaaattcattttctacaatgtgtcagcaataccagtaactggcaagacgctgtggatgagtttgatggagtagaacatataccgctcatgactattcataaaagtaaagggcttgaattcgataccgttatttttattggactggacgacaatgcatggtggtctcaccagccgggtaatccagaaagcatgtcgacattttttgtcgctttatcccgtgcaaagcaaagggctgtgttctctttctgttctgagcggggtgaacgccaaaaactatcagatatttatgcattattggaaaaatcaggagtcaaagagtataatatcaattaa

SEQ ID NO: 269463 - DNA, 1971 bp, Klebsiella pneumoniae
atgttgattgaatcagtgaaactgaccaattttcgaagttttggctccgatggccaaaaaattacactcgatcacaagttaactacattaattggtgcaaatggtacgggcaaaacggcagtgctacaagcactacaacggctgttcggcgtgacaagtgaacagaggataatctctcgtcaagacttccatatccccacttcagaaacccatgcaccagacattcgtaccttatccttagaagctatcattgctttcccggaactggatgatgaacaaggagaccattcggccataccggagtttttcagaagtatgagcattgcagatgagaacgggaggcttaaatgtcgcttacggttagacgcccaatgggatgatgatggaagcattgacggctatgtaaccagccagtttcacgctgtaacgtgctggggtaatgatgaacctgatgattcggatttccacaaggtgcgccctggcgatcgcgcaaaaatccagcttatttatatcccagccacccgttcggcaactgcgcaggtctcctcgtttcttaaaggacggttatggaaggccattaactggtcatcacaagttcgggcatcattcgctgaaaaagcgcatgagcttaacagtgctttcgaaggtgagtcagcaatcgatactatcacgggaaagttgacgcaacgctggcaacagcttcattccgccggtaccgacagcacacctaaatttcgaccagttgacgtccgttttgaggagtttgtcaggaaagtagatgttctgttacatcctgatgaaagcggcagagatcgcagcgttgaagagttaagcgacggccaaagttctctttttcatatcgccatgacctcggcaacgctcgatgtcgaaagagaaatccgattaaattcaagacgctctgcgtttctctacgatgacttgccattaccctcactcactttattggcgcttgaggaacctgaaaataatctttcacctcattatttgtcccgcatcgtcagtcaacttaatgagctgacaggaaatattcatgcgcaagccattatctcaagtcattcatccagtattctggctcgtatagatccaacccagataaggcatttccggttggatgtagcttcaaagaacactattgtaaaagtgctaacattacctaaagaggataatgatgccgcaaaatatattcagcaggcggtacgcgcctggcctgaactctattttgctaaagtggtggttttgggtgaaggcgcttcagaggaggttatcctgccagcagtggcgggggctatggggatccctattgaccgatcttttgtcgcgatggttccactcggcgggcggcatgtcaaccatatgtggcgattgctatatgatttgcaaatcccttttatcacgctgcttgatctggattggggacgacacggtggtggctggggaagaattaaaaatattattgctcaaatgattgactttggagttgcacctcaaaatatatttaatgaagttaatccgagtggatatgagcaaaatttattaacatttgattcatttcctcacgacaacagaacacatatcgatagttgggtcgattttctgagacgctttaatatattcttttcaagcccattagatatcgattactcaatgctaaaagcgttttctggttactatcaggtaccgccagaggaaaacgctagtggaccttcactgactggagatcctagagatgccgtcttaggaagcgaaggaatccatatgctttacgccgatgatattcatattcttcgctggtatcgctatttatttctggggcgaggaaagcctagtacgcacattagggtattaagccagattccatcggatcaactcgcacaaaatgcgcctgatgagctaaaggcccttgtacaaactcttcaacaccacttagaaaatcagggtagccagcaatga

SEQ ID NO: 269464 - DNA, 4395 bp, Klebsiella pneumoniae
atggctaattatatcaacgtaaaccgacgtttctataaatccagtaatccgcaggaagaaattcccacacagatttacgctgactggtttgaagatagtaacactatcagctgggatgaattgctgaaatattcacgcatcattattctggcggaagctggagcaggaaaaacgcgggagatgaaggagcaatcaacaaagttaaatcaggccggccagttttcattctttattccgacagaagcgctggctgaagatctcattgtagatatactccatcctgatgaaaaggccaggttccaacaatgggaaaatagttctgattatgcttatttatttctggatgctgttgatgaattaaaactaaaaggtgatgagtttaataaattattgcgaaaacttcgtcaacaattagaaaaacatctttccagaatcaatattattatgtcctgtcgtcccagtgactggaatagttacgattttaccatccttgatgaatggttacctgataatcaactttcagaagaaaatataatacccatttcacaaaaatctggtcgtgagttttttaaagatatggtttccgactggtttaatcagcccgctttcagtaatcctctggaagaactggaaaaggaaaccgaacagcagtctgatgattatcatcggcttcactgtttttatatgcgaccaatgacaaacaagcaaataagaaaatttacttgtgaatctgctgtatctgatccggagcgttttctgcaacagctttatactctagatgccgaagtctttgccagtcggccacaggacttgctctcactgatcacatactggaacacacaccagaagtttgattcggcattaatactacatgaatcagatattcaacacaggctgacagaaaattatagccgatgtgaaaaggtactaaaatctccgcaagagataaggaatgccgtagaaaaattagctctggcaatgagcctgacgcgtaaattcacaatcggtatttctgaatcgttcaaatcagataaccattcattaaatccccaaaaaatattaactgactggttacccaaagatattaacacactcctaaggctggccatttttgagcctgcgacctatgaacgagtccgttttcatcaccgctcagtactggaatatctggccgctcgtcggttgcagcatttaattaagaagggaatgcccatcagcgcatgtttcaatttgttattttcagaacgttgtaatttccctgtcgttattccttcaatgcgttctgttactgcatggctatctctctgggatccatatgtttgcaaagaactaatgaacagagcaccagaaatattgctttctgggggcgatcctggatccttgccaatcgaagtccgctcagaactgctgagaaatttcgtcttgcattataaacatggaacatcaagagacatcaatattccgctagtgcaagtaaaacggttttcgcatccagaacttcagccagtaatcaaaaaattatgggttgaaggataccagaacgatgacatcagagagttattgttggagattatctggacaggaaaatttcaggattgtaatgcgttactggaacaggccgtgtacgatccgggtattgaaacaaccgatcggctcagggcaataaaagctatcgccacaaccgatgattctgtacttcaacaaaaaatagtacatgacgttataaactcacctgagttatggcctgaaaagttcatttttcatttcgccgaagagttgttccctcagttgctctctgtagataatttgttgattctgataaagagaacaatggaaccaaaaagctcaactagtggatttaaatggacattatataatgtggcaacagaaatagcgcctgaatctgatgctgctattgcatttcgggatcaggtaacgaaactcatcctcgataataacattcaagaaaccaggcattattatcctacaagtcgctatggttatttaacatgtgcactggctaagatctgcgccagacaattagtcagtggattccacaccgaaaatgaaagtctgattttttcatgtttggtttgtcatttttttaacgaaatcgatttcagttatgttaatgatgacttatcggtgatcaaaaacgccctaaataatataacaatcacaacaatccgaaaattcattttcatgacagaatggagtttattatctcaaatcgtcaaacatgatattgatgcttttcttcttcaggaacgcattattatatccaactttaataacaatgacttaccatggttgattgcactacttttcgataagtcatcccctgagcgacgttctgtattactggaattcttattccgtttcactccgctagccgataatactccagaatttcacgattcattaatcaatgtggttagtgatgatgaaacattattatcctcagtgcaccaatggttaagaccaaaaccaatcaacatagaatctattcgcaggcaagagattcgtaaggaaaaagaaaaaaatagacaggaagctgaaaaaattcagcaggatgaagaaataaacaagtggttaatctggtacgataaaaccacaacagacagtacatggatgctttctgatgacacccagttttctgtgctaaatcatgtcgttgttatattgcaaaaaacacatcgacgctattcacctgaagaattctggagcagagagatactaaaaaagacttttagcgatgatgatatagaacggattgaaatagcccttcgggaatattggcggaaaagccctattcagcttcaatttgagcaggaccggataaatagaagttcaccagagcggagtgaaaccattgcgataatgggattacttgccgaaagtgattctcaggggtggcaaaagaggctcaatcacagtgaggcattactggctataaaatatgctacactcctgcaaaataactttacgcctttcattaatgagttagccacaacctttccaagtatagttaaagagatcattggttccgaacttcagtatgccattaatcatataaacaatggtaatcattgcccgataatcggtcaggttgccaatgccgacatcaggttgcgcaacttattatcagataacatcttcaatgacgttaatagttatcttttggccataaatgaagcgacgattaacagcggaggctctcctgttgaaaaaattttaatgtcactaattgatgtaatctctgacgataaaaagaaaattattgcccagaactgtgtgtctgcctataaaatttcaccttataacccagaatattatgcgtttctgagatacgcactcattttttcaccagatattggcatggaaacctttcaacacgcgttcagaaaatgcccagacaaagattcgtatattgaaagtctctatgcaaccctgttttcacatcaggcatcaagaagacatcagtccccattttacaatagtgacatttctcaacagatttctatgaccggaaaactattggatattgcataccagcatattagacgtgaagatgatcgagagcatgacgatatttttactcctgacctcagagacagagcagaagaagcacgcggtgcgctgctcgacagactcctgaatattagtaacgacaagacagtcatcgaaattatacgactcgctaaacagccacacttttatttatcaaaggcgcgttttgaatatttagccagagaaagagcagcgctgaactcagataatttctcgctgacagaggaagccgtactaaaactcgataactatttagaacaaccaccacatcatcaggaagctctgtatcagataatgattaaccgattgcaagatttgcagtatgcattatctcatagtgatttcaccgatcgggatattcttcgcaccgtaacactcgaagcacatatgcaacccacgctggcatggcgtttagaagccgccgccaactcagcttactctgtggttagagaaagtgaggttgccgatggtaaaaagacagatatccgtcttctaagcatgtgtggaaaacataaagccgtaattgaggtgaaattggcagataaaagatggagcatcgctgattttgagcgggcgcttgaacatcaactggttgggcaatacttaagatatgacgcttgtaaaactggctgtttattactcacctataatggtgataaaaaatactggcgaaaccccatcaccagagagcgactatattttaatgggttgattgagtatcttaacgttaaagcaaatagaataatgtctgaaaatagctcactgaagttaactgtcatcggccttgatttaacttctccttatcttgttccagcacacaaatag

SEQ ID NO: 269465 - DNA, 201 bp, Klebsiella pneumoniae
atgcgtactccgcacattgtgccgctttcccgacaggcaattgctattctgaagcagatacaagagatttccggccatctggaactggtgttccccggcgcacaggccaatagcccttgttttttgttggtctgcgaacgatacctgagcgcaggggcggcagccgttgaggtgtggtggggcttcggttgtgctctctga

SEQ ID NO: 269466 - DNA, 3810 bp, Klebsiella pneumoniae
atgagattccacccagaagggccttccatacccgatatcctcttagaacgctgtgatacaggtcgagttgtatttctctgtggcgctggggtttcattaccttcaggaatgccgagctttgtagagcttacccagcatgtaattgaatactttgacccaccacacgattcagaaatcatggctgcatttcgcccatggcttcacgatcaatctgcggcgaatgtccctctcgaccaaattttcaatctcctacatctggaatatggcaaggatgaggtgaatgctttggtatcaaagcgtctggggacggcaagaactgacatagaagttggacgtgagcatgccctgattaaaagaatttcctcaaatcagagtggagttccacagattgtcacaacgaactttgaccgactgttcgaggttaaccaaacgcaagataatctgactcgatatgtgccgccagctttcccaaatctgaatttcggttcgacaattgagggaattacataccttcacggtcgtctggtcgacgaaaatgctgtaaaccatccttatgtgctgagcagtgcagactttggacgagcatatctttcagaaggatgggcgaccaattttattaagcttcttctggaacgatacatcgttgttttggtcggttatcaggcagaagacccaccagttaaatacctccttcagggtctcaatcatgatggccagtatgatcgctccagactttatgcatttgatcgcggccttgccgaggatatcgaagccaaatggcgtgacagaggagttacagccatagcctattctgatcatccagccctttggaagactttggaagcatgggctgagcgagcagatgatccacgtcgatggcgagcgtctattatcgctaaaagccagcaagatcctaaagttctagcgccgtatgaacgtggtcaacttgcccatatacttcgcactacacaaggtgcgaaattgttttctgaagctgttcctattcctcatccagagtggatttgtgtgatggatgcaaatattcggtcagccaaacagaagaaaagatactacacgattgatgacaatgatgcagagaccttcgatccgcaagaagcttatggacttgatgacgatctgcaagatatctctgacgatgaacgtaagcgtggagtgaataacgataatctccttgaatggcgcgacgaagatgataatccgtcagattaccatcgcttggctggatgttttgaggcaatgcctaaacgattgagtcatctaatggcctggctatgcaaatctctagacagccccgtgatggcttggtgggctatcagaaaaatcagcattcatcccctactactacaaaatattgaacgcaacattgagtattcaacatcaatccacaaacgctctcgtcaactgtggagcttaattctcgaacatcatagagatccccgcaatcgtcgttatgacgtcgattggtacgacttaaaagctcgaattacaaaccaaggctggacagctggtgtattacgagattttcgtagggtaatggcaccccgattggaaatgaaatcgccatatggattgggtgaagtcagaccaccaagtggctcctgggaggaactccagttcagcgaattaggccaatttgaagttgtgtttaccgaaagacatgatgacgatttagacatacctgacaaggtattactaccagtatttagcgctttagaagagcaaataataattgcctccggaatgttagaggaaattgatacgtactactttccaagcccaagttgttatccagaacgtgcggttgaaggtgaagaacatttctcgaaaggtgcggagatattgacatggtttgtccaccttttagaccgagttgctatgaagtggccagaattggctaacgcacatgtaacaacttggccagtaaaggagccatttttcttccgaaagcttagactttatgcattcagtaaaacagacgtctttgaggctaaccgtgttgttgaagagattttatccttggatcaagatgaattttgggacacaaatgttacccgcgaacttctttttcttctcactgatcgatgggaagaattctcgcaagaaaatcagaatcgaattatagagcacattttagtagaccctaaccattttacttatttttcggaggaagacattccaaaaaaaagagagatactggcagctagatatgctcgctatctcgaactaaacggatgtaaaatgacctcttttcatcgtgaccaactcactgagatcattaaaagaatccctgactggaatgatggctgggctaaatctgttgtcatcaattggggttcacggacaggttgggttcgtacagacgaaaagccagatataatcttagatcttcctgtaaacgaaattatcccaaaagtaaaagagatacttaaacgagaggatgacagctttactagtacgcaaccatttatcggattgataaaagaaaacccgcgtaaggcattgtctgcactcgctattgcagggagacggggtgattaccctaaggaattttggtcaccaatgataagtgaattacctaaagatcttaaaccaaggttgagacgagtattcctgaaccgaattgtgcggttgccagatacagctttggtcgagttacgacataaattaagtaactggcttgaagaaaatttagctgagactcttgaatttgatgaggatctcgggtgggcagtttacgatcatgtcatagaagggatacttagtggtggggctaatgcaacacaaagtagtttcggggaagttatccgaaatggagaggttgtaatacagtctcggcgcacatacagccatgcaatcaatggtcctgtaggtaaatgtactcaagcactttttcaagcaataccaagtgaagaacaaaaagctggttcgcttattccgtattctattaagtgtcgtattgaacatcttttcactgcaccaggagaaggtgcggatcacgctatagctataacgacacgcaatctaaattggttgatgtttgttgatcctgcatgggtaaaggaatggcttatacccattttggatttaaaacatcctagagcagaacctgcatggaatggttatcttcattgcgatactatgccttcgattgcagttgctgaatttattaaaccttattttcttaatcttataccctggatcgagcatctttcttgggaaaaagatttttcagttagagcttcgcaatggctaggtttaatgagaatgttccacccagatgagccttccagcccttccaggactgaaatgcgctccatattgcgagcactatctgacgacgctcgaaatcgttttatttcctgtttaggattggtcggtcagaaaaacgcaaatggctgggttaagtatgtgattccattaataagagacgactggcctaaagaacgccaatataggacaacgaactctgtaaaagcatggattggcctacttgatgatactagtgataacttttctgctgtttacgatgcagtaaaaacacacttagtgccaatcgatacaattgatcacttgttctaccgattcactcgggatattggtggcaatcgagcaattgcagctatttttccagatactacacttgatttaatggacaaaataacccccaaaatattcactcgtacatcaggagagctgcagaagattcttgagctaattgaagatacagatataagtctgaccaaggattcacggtacttacggcttattgcactggttgagaaaaattag

SEQ ID NO: 269467 - DNA, 1791 bp, Klebsiella pneumoniae
atgacttttacttcggatcttttcctcgctagcagatggcaagaggcggcctcaagcaccacacatggttatcattcattaaaatgtaactttcaggaactggcggaggcttatcatagggaagcatcagaagtactttcgaatatgatgcattttttcgcaagtctctgctctatggcattgacaccagaaagccccaacgaaccttacagaccatttatatcttcttcaaatagtagaagtatgattccagacgatcttaccggagaggatcttatatttatagaatctattttggatcatatcgactttccattacttaaagcacgtttggcagatttattatggctacgtaaacgtccgagaagtgttgaacatgccagaattgttatttcatcatacttagcgcttccaataactagtgaggaatggacgaaaggtggacaactatgttgggaaagggccatagcacttagttttcaagtaaaagacttcataacaattgatataataaaacagcgcctcacagaagcattgacattgaactatgaagattttccactaatgcgataccgcataggtgaatcaatcaatagaacgaatttattcgggaatgatacaggtacaattgctcaagctctttttgaaataggcgatgggatcaccgtacctgaaactatatcattagcctttcatatcaagcggtcatattttaaagtatctgagaaattatttagaaaagcaaaggagcacaaccgagctatcgcctgccaggtaagaatcgctgaaacattcatcaatgaagctgagcagcgactttctggtgaaaatccaaatcccggtgttgcaaacagcttttatgaagatgctttgcaagcctatcgaaaaattccacaagccaatagagctgaatataatgtagagcgtaaattagaagaaatcgaacaagccattctcagaacaggtgccgaggcgcttgagaacatgtatgagattcgaacagatggcattgatttatcaacccaagctgagcaagctattgctcatgttacaaacaaacatccactgggggtggcaattttatattttactggttttattacagaaagttatgcggcattaagagagcaagcgattgccagtttatctgagccaagttttctaaataccattggaaggaccataatatcacaagatggacgcacgatcgccagaactccgagtgtatcaagcaataatagtgcatcagataatgaattaatcatctttagtaaaatcatggagatatttaacttcaatctgagcattattgttaatggaactcttattccggccctcgatcaaattataatggaacaccatataactaaagatgacatggaagcattgtgcttttattcatcaatagtaccacgaagctataacagctctgttgccaatgcattatggtatggttttgaacgtgactttcgaaccgccatatatctattatgcccacaaatcgaaaatattatacgtcaaaaattaaaaagtgcgggagtaaacacaaccattacagatgaaaatggaattactcaggaagttggcatgggaacattacttaattttaattcagctatggatttatttggggagagctttgttttcgagttgaaggctattttcactgaagcacttggacctaatttaaggaataatattgctcacggcttactggatgatgatagttcaaattctgaggcatgtgtttatgcttggtggctagttttaaaagtaattgtccagatataa

SEQ ID NO: 269468 - DNA, 1350 bp, Klebsiella pneumoniae
atgttgggctcagagggattcataattcatttcgatgaagatgagcgtaattattatattaatgaaggctattatggggattctttcactgatgctcttagtgttcctgattgggatataaaaaaattacaagtggtgttactttcatttaccggagtaacaattgattttatctgtttagccacaaagggaaacagagttgttactgccaaatcgcgagtggaatttacgaatttaattgatttgaatggtattcctttaactgaggtagaagaacgtttatcatcaaaaacgaaattgcattttataagaagttcaactggccgaggagggaaggtacctaagaaaacttggtcagatgtgattaaagttttgaaaaatattagaccagatttgtcaggtgaaatcgataggttaatgtcgctcaaaactatatcccaatatcgactgactggtgactctgcggaaacacttgctttggagagggaggctttgggggctgctcttgatatttttaatggaaataatgatctcagaaaagaaatccttaaatcttgggcccccaaactggatgatgtaagcaactataacgatttaacaatggaggctaatctatcaatacctgagaataggcctttctcttttatatccggaataccccaaagacatatacaagaagaatctgcattacagcatgacctgtataattgggagaatgagaaggcgcattctacaagtatgggaggagcttgttttagaaaaggaaatcgaatcctagaagtcgtgtatgcaaataaaaactcattggaacatacattaggcgttgatttgatttattataataaatcttatcaatcatttgttttggttcaatataagacaatgaaggaggagaatgattctgatggctttttctaccggccggataagcaacttgataaagagattgctcgaatgaatgattttcatcataaaataactttatcaaaagacttttcgagtcaccatgagtatcgtctgaaccaagatggttttcttttcaaattagtaccttgtaaaaggcttcaggctgcatctgaaaaactcatctctggaatgtatataactagagagtatatgcaatttttacttggtcctaacggtccaaaaggtaaaagaggtggccggtttatttctttcaaaaattcgccaagatatcttaccaatacagaattttcagattttgtgaatcgaggatggattggcaccaattgcaaacaaagtagtactattgctttattaattcatggatttttacagacaggaagagcagtgatagttgcggttgaagaggatacagatagtatgtag

SEQ ID NO: 269469 - DNA, 3030 bp, Klebsiella pneumoniae
atgcacaaagaaatcgattttgagaaagaaattgagcatgaacttatcagtaatggtggctatgagaagggagagcctcacgcctacgatgcggaaaatgcactttttcctgctgatgtcgttgcctttgtgcagcatactcaacctaaagtttgggcccgcttaactatgctggatgcgcataaagcgtccactatgttactggatagcctagtcaaggaattggcagctaaaggctcgttgaccgtcctgcgtgaagggttcaaatgtgttggtaaaactgtacgcttagcctacttttcaccaaatactgggctcgatccctccgcgacggagcgttacgcagataaccgtttaaccattgtacgtcaggtaaacactaagagtggagcgatccctgatattttattggtagttaatggcctacctgtggcgacaatggagctgaaaaattcgatgtcggccacacagtggaatgtagaaaatgctaaacagcaatatcgatttgaacgtgaccccaaagagcttcttttcgcgttcaaaaagcgttgtctggtgcattttgctgtggataccgaattagtctttatgacgacaaaattagaaggaaaagatactttctttctaccgtttaatctggggtataactatggggctggcaatcctcccgttgatggggatgtacgcaccagttatttgtggaaaaatgtattaacccgcgattcgctaatggatattctggcgcgatttattcatctcaatatcgaagtaaaaacgatagctactgaaaaagggattaagcgtcactataaagaaactctgattttcccacgttatcatcaattggatgcggtgagagcatgtatttatcatgctcaagtaaatggttccggccataattatttaatccagcattctgccggctccggtaaatcaaactcaatcgcctggctggcgcaccgtttgtcttgtttgcatgatattaataatgagaaaatttttcactcagtagtagtaattactgaccgacgcgtgctcgatcagcagttacaaaatactattttccagttcgaacacaagctcggtgtagtgcagaaaatagatgagaatactcagcagttagctaaagcgttggctggtggtgtgccgattattatctctacgatccaaaaatttccctttattacacaagctatccgtacaatggaggcgaatgggaagggagtacagatctctactgccggtaaacggtttgcagtgattgtcgacgaagcccatagctcacaaagtggcgaaacagctatggagctgcgaaaaattcttaataaagaaggtatcgaagctgctattgctgaacagttactggatatggatgatgaggtacttagcgaggaggctaaaaaagcactattacgtgagcaattaaaacgaactaaacagcctaatcttagcttttttgccttcacagcaacacctaagtttaaaaccttagctgttttcaatgagcctggtgcgaatgggaaagcaccgttccatcattacagtatgcgtcaggctatcgaagaagggtttatccacgatgtattgaagaactatacctgttataagcgttactaccgtttgcttcagaaagttgaggtcgatcctgaagtgccgcgccgaaaggctgctcgcgctctggcccgctttgtcgagtttcatgattatgaaattgcgcaaaaagttgaggttatcgttgagcatttccgcacacatacccgtcataaaattggtgggcgcgctaaagcaatggtagttacaggctcacgtgaacacgcagtgcgctacaagctgggttttgataaatatatcaaagatcgtggttataacgacgttaagtctttagtcgctttttctggtgagattacgcttaaagaatacagtgatacaaagtttactgaagtgactatgaataatggtattaaagagaccgaattaccggaaaaattcaataccgaggaatatcaggttttattagttgcggagaaatatcagacgggatttgatcaaccattactgcatagtatgtatgttgataaacgattgtcaggtatacaggcagtgcaaactctctcgcgactgaatcggacaacacgaggtaaatcagatacctttgtgctggattttgttaatgagcccgaagatatctacaccgcctttaaaccctattatgagtttacttcgaagggagatgataccgatccgcagcagttaaacacgcttgcctatgctcttgcgggctggaaggtgtttactaccgaggaggttaacgcttggtgtgagatctggtttcgtaatagattgaacccaacaggtggtgaacataaaaaattaaatggaatactcgatcttgccattgagcgtttcaaaacacttagtgaagaagatcagaatctatttaaaggacaacttgttagcttccgcaatctctatagttttgtttctcaaattatcccgtatcaggactctgaacttgagaagctatatacgtatgctcgttttctgctgaccaaattaccacatgctatcgatagccgcaccgttcagattgatgatgatgttgaacttaaatactatcggttacaaaagattagcgaaggggcaatcgatcttaaagcgggtgaaccagaagcattatatggtcctacggatgtgggtaccggccaggcagacgaagatgtgcagctttcaaccttagtcggacgcttgaatgagcgctttggtacggaatttaccccagctgatcagttattttttgatcaggtgcgtgaaacagccgtggcgaatgaacagttacggcaggcggttaaagccaatagtattgataacttcgaacctgtatttaacaaaatgctcgaaaacttattcattgaacgtatggatgggaacgaagaaatatttatgcgcttgatgaatgatgagtcatttagagatattgcgtctggtcatttaatgagggctgtatatcagcaagtaaaagcatcagaatga

SEQ ID NO: 269470 - DNA, 1302 bp, Klebsiella pneumoniae
atggttcactatcaaaattatccagattaccgtcagcctgatttaggttggcttggtattattcccagtcattggaagactgttgctttacattatgtaagtcgcctcaaaagtggggagtcaattaccgccttacaatttgatgaaaatggcgaattcccagtgtatggtggaaatggctttcgcggatattatgatcattttacgcacgatggtgattatgttctgattggtcgccagggagcattgtgcggcaatataaatattgctcggggaaaattctttgcatccgagcatgcgatcgttgtaaatcctagctggatttttgatacccgttggatgggatatcagcttctttccatgaatctgaatcaatattctgtttctgccgcgcagcccgggttgtcagctgaagtcatcgggcgtttaaggattgcttttcccccgattgaagagcaacgtgccataggcaactttcttgatttcaaatctactcaaatcgatgcgttaataagcaagcagaaagccttacttgtcaaattggaagaaaaacggattgccttgattagtcatgtggtcactaaggggcttgttcattccgttccagttaaaaattcagaggttgagtggttggggaatatcccagaacattgggaaattagacgtttacgtttttgtattgtcacaaacccaagcaagagtgaaataaagcttgctggggaggaattagtctcatttgttccaatggaatcggtaggcgaatatggcggactaagtctttcagtggaaaaagagttgggcgaagtgggtagtggatacacatatttcgcggaaaatgatgttgttgtagcaaaaataacaccctgttttgaaaacggtaagggtgcaattgctcgtggtttgaaaaatggagtcgcgtttggaacaactgaactacatgtattgcgcgcaggtgagatgatactgcctgattatttgttccatctaacaatgtcacactcatttcggtgttttggggagtccgaaatgtacggagccggagggcaaaaacgtgttccagagacattccttaaagattttcgcattgggttaccacctctaagtgagcaacaagaccttgttgattacatcaacaaggttaatcaacaaattgatcttcaaatgcgaaagaccgcagacatgattagtcgtttgaccgaatatcgatccaccttaattactaatgccgttaccgggaaaatcgatgtccgcaatttttccatccccgaaaattgtgaatcgcaacggactgagtgtgcttaa

SEQ ID NO: 269471 - DNA, 2241 bp, Klebsiella pneumoniae
atgcaaaacagtcagcatcagaatcttgttgggtttatctggaacatcgcaaacaaactgcgcggaccctaccgcccgccgcagtaccggcgagtcatgctgcctttgattgtattacgtcgcttcgatcttgttctggcggaaaataagcagaaagtactggatgagaaaaagaggctggaagagaaaggtattaacggccctgcattgtccaaggcgttatcgcgcattgccactgatggccgcaagcaggagctttacaataccagcggttttacttttgagaaactgatcggtgatgcgcctaatattgccggtaacttaattgcctatatccagggtttttcgccgcgcgcacgtgacattttcgacaagttcgagtttgaagccgagatcgcaaaactagatgaagcaaaccggttgtttctggttatgcaggaattctgttcatcacaaatagatttgtccccgaagcgtatcagtaatttacagatggggtatttgtttgaggagcttgttcgcaagtttaacgagcaggcgaacgaagaagcaggagaccatttcacaccccgcgaagtaatccgtctgatggtgcagttgatctttaccggtgaggatggcatctacgaaaagggtatctaccgtagtatttacgatcccactgcgggtacaggcgggatgctttcagaatctgaaaagcatatctgtggtgacggtgttaccaaagggttaaacccagatgccaatattgaattgttcggtcaggaatataaccccgaatcttatgcaatctgctgttctgatttgttaattaaagatgagcctatcactaacctgatttatggtgacacattaggtgtaaaagacgccaaaaacaaaactaacggttttgttccccatgatgggcatcggaacaaaaaatttcattacatgttagcgaatcctccttttggtgttgagtggaagccggaagaagcatttgtacgtgaagaatacgaggatctcggcttttccgggcgtttcggagcgggtctacctcgtattaatgatggatcattgttattccttcaacacatgatctctaagatgcacaacccgccgcagtataacgaactgggtgaaaatatagggggggatggttccaaaatagccattgtgtttaatggttctcctctgtttaccggtgatgcgggcagtggtgaaagcaacattcgccgctggattatcgaacaggacatgttagatgcagtcgttgctttgcctgatcagatgttctacaacaccggtatttatacctatgtttggatcgtgacgaataagaagccagcacatcgtaaaggtaaagttcaactcattgatggtactcgacatttccgcaaaatggataaaagtttaggcaataagcgcaacgaactttctgatgaacatatcaaagagttagtgcgtttgtatgctgagcatgagcacgacgcgctgagtgatgtcattgttgatggtaaagttgaatctcgaatttgcagcaaattgtttgataaccgggattttggtttcctaaaaattaccgtcgagcgcccgttacgtcttaactttcaggccagtgctgaacgcatcgccagattggtcgatcagaaagctttcgttaacctagcctccagtaaaaaacgtaaagacgaaacacagtaccttgctgaaatagctgaaggcgaaaaaacacagctcgctattcagagtacgttacaaagcatggatggcgataaactctatcgcaaccgggctgagttcgagaaagcgttaaacaaggcattgaaagctgccgatattaaggttgctgcaccagttaaaaaggcaattacagttgccttatccgaacgtgatccagaagccgacatctgcttggacgctaaaggggctcctgaacccgataccgatttacgagataccgaacttgtgcctttgccaaaagacatcgccttaccgctgcctttaggttatgacaacgaaacaggtctcagtaagctgctggttttagtgaaaacgcattgcgaagattaccttaaagctgaagttttaccacacgttcccgatgcgtggattgatcatggtaaaaccaaagtaggctatgaaattccactaactcgtcacttctatgtttatcaaccgccgcgtccgttggatgaaatcgcgaatgaaatcagcgaacttgagaaagagattgtagcgatgttgcgggaggtggtttga

SEQ ID NO: 269472 - DNA, 177 bp, Klebsiella pneumoniae
atgtgcgctgaagccacagataacataaagaaccacacggcgttgcttcccctcaccctggccctctccccaagggagacggaactgtccggccatcgtttccgtggccaacatattgccgggtggcggctgcgcctgacccggactacggagtctgaaaacgtggtaaaccgataa

SEQ ID NO: 269473 - DNA, 1260 bp, Klebsiella pneumoniae
atgaacatcgccatcatcggcagcggcatcgccgggctgacctgcgcctggcggctggccggacaccatcaggtgacgctgttcgaagcgggcgccacgccgggcggccacaccgccaccgtggatgtcgccacgccgcagggcacctgggccatcgataccggatttattgtctacaacgatcgcacctatccgcgctttatgggcctgctcagcgagctggggatcgacgggcaaaaaacgcagatgagcttctcggtccacaacccggccagcggcctggagtacaacggccacagcctgacctcgctcttcgcccagcgacgcaatctgctgaagccggccttctgggggctgctgagcgagatcgtccgcttcaaccggctggcaaaactggcgctgaccgaggcgctggatccgggcgcgacgctggagaacttcctctcccgccaccgtttcagccccttcttcgcccgccactatatcctgccgatgggggcggccatctggtcgtcgtcgctgcaggagatgcgccgcttcccgctgccgctgtttttgcgcttctttgaacaccacggcctgctggacattcgcgatcgcccgcagtggtacgtggtgcccggcggttcccgggaatacgttcgcgccctgctcgccaggctcggcgaccgcctggacctgcggctcaacgcgccggtgcagcaggtggagcgccacccgacaggggttaccctgcggctggcgtccggggaggcgcattttgaccaggtgatcttcgcctgccactccgcgcaggcgctggcgatgctggcggcgcccaccgacgccgagcgtgaggtgctgggggacatcggctggcagcgcaacgaggtggtgctgcacagcgatccgcgctggctgccggcgcgtcagcgcgcctgggccagctggaactatcgcctgagcgacggggatcgggcccgggcctgcgtcacctacaacatgaatattctccaggggctgcccgcgggcgcgccgctgttctgcgtcaccctgaacccggacgcgccggtggacgagcgctacgtctggcagcgcttcgtctatgagcatccgctgtttaacccgcaaagctggtcggcccagctgcggcgcgacgagattaacggccagcagcggagctggtactgcggggcctactggtacaacggctttcatgaggacggggtgcgcagcgcgctcgacgtggtgcagggcatcgccgcggcggagggcaactga

SEQ ID NO: 269474 - DNA, 1257 bp, Klebsiella pneumoniae
gtgattctgactccgactccgacagtgactcggattctgacagcgactctgattcagacagcgactccgactcggatagcgattccgactctgacagcgactctgactccgacagcgactctgactctgacagcgactcggattccgacagcgattcggattccgacagcgattcagattccgacagcgactcggactccgactcggattctgactccgacagcgactccgactctgacagcgactcggattccgacagtgactcggattctgacagcgactccgactccgactctgacagcgactcggattctgactccgactcggactctgacagcgattctgactccgacagcgactcggactctgacagtgactccgactctgacagtgactcggattccgacagcgattcggattctgacagtgactcggattccgacagcgattctgactctgacagcgactcggactcagacagtgactccgactctgacagcgatgcggattctgacagtgactcggattcggacagcgattcggattctgacagtgattctgactcggactctgacagtgactccgactccgacagcgattcggattccgacagcgactcggattccgacagcgactcggactcagacagcgactccgattcagacagtgactctgactccgacagtgactctgactccgacagcgactcggattctgacagtgactctgactccgacagcgactcggattcggattctgactccgattcggactccgactcggactctgacagcgattcagattccgacagtgattcggattctgacagcgactcggattccgacagcgactccgactcggacagcgactcggattccgacagtgactcggactctgacagcgattcggattctgacagtgactcggattccgacagcgactccgactcggacagcgactccgattccgacagtgactctgactccgacagcgactccgactcggacagcgattcagattctgacagcgactcggattccgacagtgactcggattcggacagcgactcggactctgacagcgattcggattctgacagcgactcggactccgacagcgattcggactctgacagtgactcggattctgacagcgattcggattctgacagtgactcggactccgacagcgactccgattcggataccgaaccgcaggcaaatgatgatacccataccgcggctatcgataccgtag

SEQ ID NO: 269475 - DNA, 132 bp, Klebsiella pneumoniae
atgcttaaccatgtttcaacaaataatattgcagaagaggtcagcaatattgaaaatgcaagaaacaaaacctgcattatccaaaaaaacatttgcgctttgttaatatcctcctctttaaactgtttataa

SEQ ID NO: 269476 - DNA, 267 bp, Klebsiella pneumoniae
atggatttttattttggtaaaaatggttcatacaaaacttattcacttaagcagcttaaagactatccgctccctttcagtggacaaataaagggtgaatactttgttcccgaaggaaattctaaggttggaatggttcaaataatcaacgatgagtttacgtttccgattgggtttagagctgaaacgcttaaagttgatagggaaaataatgcgctgttatcatcgggtggagttaaaatagccgatctagtgctagtagagtaa

SEQ ID NO: 269477 - DNA, 834 bp, Klebsiella pneumoniae
gtgtatcagtacacgaaccttcctaacaattttcgtgtgcaggttattcatatcgtcaaagagacaattggtgaggactacgggagggggagtgacccgggtggcatttacaaagcgataaatgacacgctatgccgcgagtatggtgtttttaaattaagggattacccaaagagtaacttcgaagctgtatatgatttctttctgaatgaaaaagatattgaaaaatgccttgatgtgattgaattaagtttcaaagcaattgatggatatgtcagagagaatcactggcgttttcacggacatgaacaaaaatccgactctgcgatagaagagttaaatatcagatttaaagaatcaggcattgggtttcagttcgaatcaggagaattggtgagagttgactctcaattcattcactccgatgcggttaaacctacccttcagattttagggcgttctaaagcattcgaaggagctaatgacgagttcctctctgcacacgagcactacaggcatcaaagattcaaagaatgtcttaatgattgcctgaagtcgtttgaaagccttatgaaggccatccataaaaaacgctcatgggaatatggaagtactgatacagcaaagaaactaatttccagttgcctttcaaatgggcttgttcctgactacatgcaaaatcagttttcatcactgaggattttactcgaaagtggtgtgccaactatcagaaataaagagggtggtcacggccagggggatgaggtgacgaatgtaccagagcatctggctagctatacattacacctgacagcatctaaccggctttgttga

SEQ ID NO: 269478 - DNA, 558 bp, Klebsiella pneumoniae
atgatttatggttatgcaagagtatcaaccaaagagcaaaacttagaccgtcagttagctgctcttgagcctatatgtgatgtggttaaagttgagaaggtttccggtaaagatttgaaccgtccagagcttcagaagctgtttgagttcatccagtctggtgacacgctcatttgcaaaagtattgaccgtctggcaaggaacacgaaagatttgcttgaagttgttgattcactaattggtaagggtgtaattgttaagtttctggacaactcaatgagctttgacaatacaccagcttcccgattgattctaaccatgatgggtgctgtagcagagtttgagaggggcatcattgctgctcgccgtgatgaaggtatcgctattgctaaagacgcaggaaagtacaaaggcaagcaagctaatcaggctcttcatagtaaggttgtaaaataccttgaagcgggaacttattcacctgatgagatagcaaagctatgtgaatgcggtagagctacagtgttcagaatcaagaaagagtggaaagcagtagcttaa

SEQ ID NO: 269479 - DNA, 465 bp, Klebsiella pneumoniae
atgtcggcacagcacgtcctgattgttgaagattcgctggtttatcgtcggctgctaagtcggatgttgacgcagtggggctatatcgtcagtgaggcggaaaacggcgtcgacgcgctggcgatcctcgaaaaccagcctgtcagcctggtgataagcgactgggaaatgccggagatgaatggcctgacgctgtgccgggaagtgcgccgccgccagtttggtcactacgtttatctgatattgctcaccgcccgcgaagatcctggcgatctaacgcaggggtttgaggccggggccgatgattttctcagcaaaccggtagagcagagcgagctgcgggcgcggctgcacgccggggcgcggatcctctccctcgaggctgacctcgccgcgcgcaatgcgcggctgagcgaagcgctgcgacagattgaacaggatctggagctggcggcgcgcatttaa

SEQ ID NO: 269480 - DNA, 480 bp, Klebsiella pneumoniae
atgcatgatgctctggtctgtggccgtcgttttcgcacgttcaatgtcgttgatgactttaaccgtgaagcattgtcgattgaaatcgatctgaatctgccagctctgcgcgtggtccgtgtgcttgacaggatcgcggcaaatcgcggctatcctgtcatgctacgcatggataatggtccggaatttatctcacttgcactggctgaatgggcagagcaacatgcagtaaaactggagtttatccagccgggtaagccgacacagaacgcttttattgagcgctttaaccgaacataccgtacagaaatactcgatttttatctgttcagaacgctgaatgaagtgcgggaaatcacggaaagatgggtgtcagaatataactgtgaacgccctcatgaatcactgaacaatatgacaccggaggaataccgacagcaccattatttggccgggatctcaaaaaatgcatggaactaa

SEQ ID NO: 269481 - DNA, 438 bp, Klebsiella pneumoniae
atggctaaagggaagattaaagcggggaaacttccggtagcagataacaaaattgttgccggaacgcccaatccgacgacaacaacccttagcttttctttccagtacattgatccagcacatgcgaaatttggtttctccggtcagacagcggcttacttttgtaaagtacttgaacggcttaaagatatatcgagcctgacatcacttgagtttacgacaaaccggaatgcggcgctcaaatcccactgtattgagtggaaaacgacctctgagcctgacggttttacccaccttaacgagcaattccagagctttacaccttatcagtttgcgatatcacgtaatgagtacggccgtatacatggttttttcataggcaacgtgttccatgttgtatggcttgatcctgaccatcagctttatcccggtcagtag

SEQ ID NO: 269482 - DNA, 630 bp, Klebsiella pneumoniae
atgcatgatgctctggtctgtggccgtcgttttcgcacgttcaatgtcgttgatgactttaaccgtgaagcattgtcgattgaaatcgatctgaatctgccagctctgcgcgtggtccgtgtgcttgacaggatcgcggcaaatcgcggctatcctgtcgcaaagcccttcaaaatggctcatcctgatgcggacgttcagcgcctggccgagcccggcggcctgctcttcgatatgctgctgcagcgcgctggtctgatagagcgcgaccagcggctcatggataatcgtcgcgaaagccacttcggcggtttcacgcaaggcatgggccggcggcacgatcagcaccagaggatcctccgcgacgggctccaggcgcagcggcccggggtcgaccgcatcggacaccaccccggcctgcgctacgcccgccagaatgctgctgacaatatccgcgctggtgcgctcttcggtgtcgatctgtatcccgggatgcgctgccatccacgcggcgagcttgcccggcagaaaagccgacatcgccgaggtattagcgaacaggcgcagcgttccctgctgaccgcgggcgaaggcgtgcatcgcctggcgcagacgccgctgctgctctaa

SEQ ID NO: 269483 - DNA, 369 bp, Klebsiella pneumoniae
atgatgcatagcaataaaaaacccaacaaatacataatgataataatttgtattaccttctcactttctatgttctacctatccacaaatgctgtagtttatacactcaacaaaaaagaggttgaagatttttcagaatccattctgaatagaagtattctattaatgaaacaaataaattttgcaataagtaaaagcaacaacataaatgaatccgcgacttgctcaaaagaatacataaataaattgcgtgagattctttggcctcagagatttattaaagacattggctatataaataaagatatgctcttatgtacggccttgtggggtgatgacgtaccaccagaaaagggctttgttgaataa

SEQ ID NO: 269484 - DNA, 192 bp, Klebsiella pneumoniae
atgactaaagggaaacacatgagcacagcggataaaattgcacaggtgttcacagcaataccgcaggagtttcaggagaaggcgattgaagctactctgcgatcacagttctacgaaaccattgactgccctgtcacgctcgatctggctttgatgtttgcaaggttggatggcgccaatgcgatttgttga

SEQ ID NO: 269485 - DNA, 3519 bp, Klebsiella pneumoniae
atgaaagcactgatggtcaggactgatttttccctgggagaatcagcactgaaagcagagcacgcagtaaaggtagcaaaggaggctggctataccgcggttatctctgctgacacgatgaatatcgccagcgttatccccctgcagcgagcagctggcgatgagatggcggtgatctgtggtgttaagctgaatgttgtcgacgatccaacatacgagtaccgggctaaactggctaaagagtctaatggatgtatggaatcattggatcgtggacgtaattactgcttcaccgcactgattaaaaacgagcaaggttatcgcgatatttgcgaactaatgactttagccaatacccgcgagcagttttacttcgtaccacgcctggcgctcgaacagctggcggccacttacgccaaaggcaatatactgttgctgacttcggatatcggcagcgtattccagagcccggacttcgctaaaattattagcgcgctgattactgccggcggacgcgagaatttctacagcgtagtttatccgcaccctacgccattctatgaccagatcaacgtgcgagccatgaaagtggcaagcgcactgaaaatcgagcccgttgcgttttacccagcttattacgaaggggttgatgacgctgacatcaaagacatcgcccacatggtgatgaacaatatcaaagtcgatcagccacaccggctgcgtatcccccaccagcgcgacaatgcaataaatggtcgccgtcatctgctgcaggcgctgaaagagttttctgtccggatgggcgtatctgtgtctgccgccatggcttctacaacgcaggactccatcgttaaggcgtgcgaatggcgctggcacgaaatggcaccggcactgccaaaaatggcagacgatgagcctgcaacgttgatgaagctggctgtcgcagggcttcgaaaacgtctcagcaacaaagaatttggctacacgccaccagcttccgagcatcgcgtttacgtcgatcgcctcaagtatgaaatggagacgctcactcgcctgggattctgcggttatttcctgatggttcgcgatctgatgaatcatagtcgggagactggtattccggtcggcccaggtcgtggttcatccgccggctctctggtggcatggtgcatcggcattaccaacgttgaccctatccgtcatggcctgcttttcgaacgtttcattaaccctgaacgtctcgacttgccggatgctgatctggactttagccaggcgcggcgccatgaggtgatcgaatatctgaatgcccgatatggcgaagagtatgttgcaggcattccgaacttcacttatctgggcgccgcttccgcgctgcgcgacacagcacgtatttatggcgttgatgcggctgatatggcggtttccaaggagctaaagaccctagaggatgacagtctgtctctgtcggagctgcgcgagcagctggccagcctggacaaatacgccaccaaacatccggacgcatttaaggcggcgaccaagttgcaaaacctgatgcgtggcttcggccgtcatgctgcagggatgattgtcgctggcgtgcctctgacggaacgtacccctgtagagcgacgtggagacgcgcgttgcatcgcattcgataaacgatactgcgaggccatggggctgatcaaactggacgttctgggcctggccactctcgatctgctggatagcgcaaaacgttacatcaaagagagcaccggtaaggatatcaacctcgatgccatcccactggatgatcgcaaagtacttgatggattcgccgcggggtatacgcaaggtgtgttccagcttgagtccggccccatgaggaagctactcaaagatctgggtggtggtatcgagccaatgagcttcaaaactgttgtggctacaactgcgcttttcagaccaggtccaattcagtcaggcatgttggacgactatgttgctgtggccaagggcttcatgccaccgcaatcacttcacccggtacttgacgaactgactgctgaaacaaacggcgtcattctctatcaggagcagacgatgaacgctacgcgactgctggctggctttaccatggccgaagctgatggcgtgcgtaaggcgatcggcaagaaggatatggaaaagatgaagagcatgggcgaaaaattcatcgttcaggctcaggctgggtggatcgacgtcgttatggaggatggcacggcgcagcgcatacaccgcgcagaacattttaaatgtgaagatggcaagttgcggacagtagaagaagcgctggatgccggcgttaagctgccgatggcagttgttggcgtgacagggtcacatcctgggttatctgaaacaaaagccagtgaaatctggcaagccttcgagaagaacggtgcgtatcagttcaacaaatctcactcagtagcgtattcattgatcagctatcaatccatgtggctgaaaacgcattttccggcagagttcttcgccgcagcgctcaccattcttggcgaggacaagcaccagggactggtaaaggatgccttaacctatggcatccgcgtactgccacccgacattaatatgtcctcgaatcgcatcgagatccgcacgctcgaagatggcagccaggtactttacgccccgttctctgcggttaaaggatgttctgaaaatgggtgccaggcaattatgcgagcgcgtgagaaagttggtggcaagttcgagtcgctggagcaatttgaggaagcggtcgagaagcgagcctgtaacagccgagtacgtgagtctctgcaaaaggttggagcattcgcctctattgaacctggcagtatgccggcaaccgatccggaacgtctgcgcgatcaggcagagctgatgggcaatctggtgatcgatgcggtgaaagcttcacgcccatttgaaatgggcccaaaacgctctgcagaggtcaatgtgctgatgactcgcatggccgcagaaatgggtctgggcgatgagttgatacgaccaagcatcggcattaagccgaaaattatggtcatactcgacaatgccaatggcaatgatgcacgcaccggatacttcatggagaacggctacgatgacttcaaagccaagttgctggtttctggtgacctgcgtatgggtgatttgtatgtcacaggcgtgtgtaaaaaggtaaaggataaggaaaaagactacaccaaagatgagatcggccagtttatcgactttatgcgggaagagataaatctggttcgtccaacctacgtgctgacgtgcggcagccgggcgacatcgctgtttaacaataagagcaagccatccgatcttgttgggcgcaaagagtatctgccagacctggacgtgaccgtgttctatggatttaacccgaacattttgtacttccgtccagaggaaggagaaaagctggaagccattctggcggaggtagcggagactattaacaaatga

SEQ ID NO: 269486 - DNA, 177 bp, Klebsiella pneumoniae
atgatcgtcctgggtaagcgagaaaaggaaaccctgcgtgaaataagcctgtggtcatgtgtctatttttcaaaaattacatgggagttaatgattccatacatcaaaataaaaatcaaaaaaacatccatccttcagctatggagacaaactctccatatagagcattatgaataa

SEQ ID NO: 269487 - DNA, 1038 bp, Klebsiella pneumoniae
atgtgtgcagacggtcaggacgtatttcgccggttcctgctgaaagacccgaaagccggcgtcggcataagtctctgcaataaagtattcgccaatccgatcccgaagtttgaggtgcagctggccaccgcttataaagaaaaaggcgacaagtaccccttcaaggcaaatccaaaagccagatggccaatgataggcagcctcaaactggatggtcttcgggttatttgtgaagtgatcgtggacgaggaagaggttaactttctgtcgcgtaccggaaacccaattacatctctcgatcacctgaaacctgccatgttggagctgggcaagctctccggctacaaacacatctttttcgatggtgaaggtaccgcaggttcttttaacaattcagtctcagcgctacgcaagaagaacgtgaaggcggttggcgcaacctatcatatcttcgatttcttcctaccagagtggtgcgtacaggctaaaacagtcgaataccagaagaatggtatgaagctgaaacagcgcctttcactgttggtggcctggttcagaaatacacgcggccaggattacgcggctgacattcatatgcaccccttctacatcatctacagccatgaagactttgtagagcgatttatgcagcgtctggacgataacgaagaaggagagatgggcaaagacccggattctgtatacgagttcaagcgcacccgcagctggtggaaactaaaagatgaaaacgaagctgatggggagattatcggctttctacctggagatccggatgccggctttgctcatacgctcggcaaaatcgttattcgcctcgaagatggaaccgaggttcgcgcttctggaatcaaacatcgctacctcgatgagatctgtcataaccaggaaaagtacatgggccgtattgttaaggtgaattttcacgagtacacgccagatggcagtctgcgtcatccgcggcttaagtggcccaaatgccttcgcgatgccgaagaacgtgtcggagataaagaatga

SEQ ID NO: 269488 - DNA, 441 bp, Klebsiella pneumoniae
atgcgaggggaagaccacgccacggcagagctggaagagaatgtatttatcttcgtcgttgagcatgccggtaaacaccacattgctcagcccgcgctgctgcgcttcacgacgcacttccgcctccagcggccctcccccgacgatcaccaccggcagccggctacgctcggcggcatccagcagaatgtgcagccctttgtagtagcggaaagcgccgacgaagaggaagaagttatcgccgacggtttcccgccagtgcgccacccgctgcggatcgtgctgcacgtcatgctgctccagaccaaacgggatcactaccgttttatcctgatattttttcagggtctggctggaggccacgtagttgggcgacgaggcgacgatgcagtcgacgctggcgagaaatcgctcctgcagcggctggtacagcttcattaa

SEQ ID NO: 269489 - DNA, 1860 bp, Klebsiella pneumoniae
atgcttgagattaacacatctaaaattaataacacggtgacattcaccgttgatcgtaattcaatgaagcaagctatggacgcttttgaccagattcagaaaaaagcgaaaggtattaaagatcccacaataaacatgaagagattcagccaggggctaaagtctgctgaaagggaattagatcgcattaataaaaaagcgtcaaagcctcgtgataacagccagcgtgaagcagagcgagcagcaaaggctaaagcgagagcagaggcacaggcagcgaaagaggccgcacgttcggcggctcgtcgtgaacgggctgaattgcggctcttagatacagccagcagctttaaatcaatgcagcaccttaccaatgttgaactaacacaggccgcgcttgcagcgtcacggatcaccaaagcctatgccagcggcacgatctccctacaacgccagaacagcgagattaagcgcttacagcagagctacagacgcattaacgctgaacgtagggaagcagctaaacgaggcgctacggctcctgtaggtggctctggagcgattacaggcgggcttatggggttaggcactggtgcgcttgctggcgctggtatcggtgcggctgcgtatggtgcttattcatggggtaaagaggctgttacagcccaggaagagcgcagcgagattgtgcaacgtgcgaagctgggaaacgttgattacaacgccctacaagcccaaagccaatacgctacggctaacgggatcgattcgggaatgggtattcaaggtcagcgaaaactccttgataattataaggatatccaggatcgcatcggtcaaactctcaatgaggctaaatacgataagaaatctggtcaatacaaaggtggtgatcaggggattctgtcagcagtgaacactgccggattcacgatggacgatttacgccgataccaaacaaacccgatgggctttacctctgcctatgttaacaccctggaaaaacaagggaaatcctctgagcaaatcctcgcatctttggaacagcttggtgatgacatgggtttgtatgtgggtgctttccgcaatcaaggtaaggcactcactgatcaggtggacgtgctcaagcgtaacggtcaatggttgaaccaggagcagcaagatcaacttgtagcgtaccgcaaattcaatcaggaacttagcattctctccgatagccagaagctggcattcttcgaaggcttcatggagtctctcgaccctgcgacggttaaagagtggaaggaagctatgcaggaggcgttacccttcttcaagggagcaggggcagcagccggtgatcttgtatccggcttgatgaagctaaccaactggatcactggtaagctgaatctcctgaacggtgacaacactactaaagaggcggtgagccagcattacggcacaacgtcagcacctgcacaacctgggagtaatccagtggctaacgcctacggagccagccagcctaaagcagacggcacacatgagcataatgtattcgacacaatgcgtgaatggtggaacggtacaagcggggcgcaggatgttagcagttacgctcagagcgccaacggtgattattctcctgtttctatgttgaaacaatcggcagcggctactgcgacaccgccagctaaaaatacagtggttcagccagtggtattacaaaataacctaccggaaggaatgatctctctcactattgcccctgatccgacattcggaaacatgctaaatgctaccgttgatcagcgtatcaatgataacaatcagcgtatggtgctggctatttcatctggacaagggacggggggctaa

SEQ ID NO: 269490 - DNA, 1188 bp, Klebsiella pneumoniae
ttgctcggtgtgaactccagggccttacggggtgagaatatatacgtcattaataatttagcaattatgccttcaccattcctatttacaagatttacattagaatctacaaataatgaaataagcgcaatagttagcgatgtaaaacatcaagctcatatcttctttattgggaataataccagcgacatttatagaatggaacacgaggcaaacaaaccgattggatatataactacaaaaaaatgcaatcatgaatttaatttatgcgcaacatctggcatgtattctcatagttttttcgacatacctaaaataataattgtattattatcgcttctgtcattggctttagggatattaatatatgtaagcataaatctcttcttatctaagaaagatactattttgtttcgtctcaaccaagcattaagaactgataaattaagtatagtctatcaacctattctatccatcaaagaaaataaagtaataggtgtggaggcgttattaagatggtatgatactgaatacgggcaagtatctcccgatgtttttatttctattgctgaaaaacatggaattataagccgcgttacaaaatttgtaatgcgcaaatcaatactggaaacgcacgaattaataaacacgtataaaattgacttgagcattaatattaattcgaacgatctgttttctgcgttatttaaagaagaactagtaaaaaccaccaatttatataaaattagccctagcaccattactcttgaactaacagagagacagtcggcaaatatatctttaattaaggagcatttggtgaacttaagatctctaggatacaaaatagcccttgacgattttggtactgggcattccaatttagactggttgtctaacctagaagttgataaaatcaaaattgacaggttcataacaaactcaattggcaaaaactcaattaactctcgaattcttaataaaattatatcaatacttagcgaaacgcataatcaaatcatattcgaaggtattgaaacagaggaacaacactcatacttaaaggctaacattcctaacgcgtatgctcagggatatttttatgccaaacccatgaatattgaagagttaagaaaatacttagataaatctaagttcaagaaagaaactgacatatgcaactattaa

SEQ ID NO: 269491 - DNA, 555 bp, Klebsiella pneumoniae
atgtccagtacagcagccacaatggctattcaaataccttggcgtgaactactaaccccatttgtaggccttgttggcgcatttggtggtgctttgctagccaatcattttgcagatgtaaggtggcaaaggcagattgaatatgaatcaaaaaaggattcactcaaagttataagagataaaggagaagagctctataccctcctttgtcgatgggaaaaaatgttgtttttgatccagatggcacaaattagatatatcaaaagtcagagggaatggtctggctttaatgaatatattgaaagtatatctctcgggccgggtgtgtatgatcggcttgagtctttgttgcatatttatttttatgagttaacaccacgtttgggaaaaattcgaggtgagatgaagaaatgcaatgatgttttcgaacattttaagagaggactgcagaccgatgttgagggaagtacaaaaaacattaatcagtcctcaatagaattggaggaacaggttctcatcatgaaagagcacataagaagtaagctgaaaatttaa

SEQ ID NO: 269492 - DNA, 822 bp, Klebsiella pneumoniae
atgggacagttagcaatttacaatacagtaatgaaattttccgggacgatattaattttcttattcgtacataatagctctcagatttatgtgataatgtttatacagagcgttacttttcctttaatttcaatacttacatttattcttctttacaagaataaaatggcttatctaactagagtgagcttttctgatgtgaaaaaaaatttcttcattagcttccccgtattcgtaagttctatattcacaagcgcatatacaacattgaatacactttttttaagtttttatatgtccagctattacataggtattttttcatccgcagataaagtcagaggaattatgcagtcatgcatgagccctgtacagcaaacaatttatccacatgtagcatcaaaaagaactgatgcaactttattaaataagcaaattacaatgtatggcacacgttttatttgctttgcttttgtaatgtcattgtctgcatttttgttatcaaaatatattatgctagtattatttggggaagagttttcaccatcagttaatgtatttcgtatattatgttggttaccttttgttacttcaattgcgattgtttttggtcagtgggggttgcttaatttagatggacagtcgttattggggaaaatatatggaatatcaggtgttttacatcttttttatgtgtttttatttattcgtaattgggaattgatggggttagctagtgcaatcctgatcacagaaagtctggttagcattgttatgtatttcgcatatgtaagtaaattgaagaaaacaatagctatttaa

SEQ ID NO: 269493 - DNA, 1122 bp, Klebsiella pneumoniae
atggcattcgttattttctcattaatattggcgattttttcgctgattgaaaaaagagcccttttctttatatctataatatgtatcgctttttatttttcgtttacttatgggtacggatatgattggatgaattatcgcgactcatacaataacatcttgagtaaaaatcaatactacatttttttcgttgagcctggctttttcatttttatgaaatcttttgcatttataggggtttcatttcatttttttaactcttttatcgttttgttatcatatttttttatttttttattctgtgtcaagagagaaaatccatgtttctctttatttgttgttttttcttttttcggttattttgctctcagcgagtggattcggcaggggcttgcgttatcgataatcctatatgcatgtgattatatacaaaacaagaaaaaattctttatcttgatttctatcgcattgttatttcatattggagctattgtcacttttatatatccattaatcggtaaaaactctaagcgaaatatgatgttctcattggtgctatcatttgcaatgatgtccattattgttttttccctctataatccggactatttttcgtcaataccaataattggtaaaaagataagtgattacaattatctcttgacatcaaatggacaagaaagtgcaggtttttttgactatattcttcaatcaagattatctctagtttatatttttttgttttttttagtattgaagaaaagctcacaagaaaatcgtatgtacacagcttcatctgccacttttctactgctgcttagtagatttgcgtcgtcacttgtccgggtaggatattatttcgttccattatttgttgtctctatcgataggtgtatgtctttacaagggaaaggtaataaaacgaatctctacaaaatattatttgttcttgttattttttcaatatcaacaattccgttttggaatcctgtgttttggcatgcatctgaaaattttttaacccttttctcaacaccatatgaaataaatattgagatttctaggaagtgcgctgttataaattattattatgaacaccatgcaatatggcgttgtaattaa

SEQ ID NO: 269494 - DNA, 795 bp, Klebsiella pneumoniae
atgctttacggtgttatgcttttattttatcctgcttatcaagttcgagctattaaaagatttgaaagtattttaaaaaaaatagatccagattttagacttttactggtggtcaataatgattcaataaattgtgatagtctctccggttataactatatattaggtgataactcgaattgggagttttcgggttgggaatctgctctaaaatacttatctccaattgatgatacatcatcagttattttctcaaatgatactttctgtcaccacaatttatggggggtctatgagataaataaattttcacaaacgtttaaaaggttatataaaaagaatagacgtttaccatcaccggtgctatcaggtagtactcagacatttaatgaggtattttctatattcggttcagaatctgacttatgggtaagtacttatctttttttgactactggtgccttgttaaataaattgaaattgaaaatgtctttatcatctgaccaagtagaaaaagttattaacattggcgatgatggtatcgtttcattttctacagaaatttcggataatctaggtgagcatataattgattggatgtacccaccagaaaattccgatggatggtataatcatagtgatgtagatgctctgcataagaagaaaaaaatagtgtcgattattaatgaaaaatatctttcgataaattgtattaaatgtgggggaagtattgttgaggtctttacaattaaacgggtaaaatattttatacggaagttaatttcaaagggatga

SEQ ID NO: 269495 - DNA, 1017 bp, Klebsiella pneumoniae
gtgaaaattaatattttctattctcctttggttgaaatgtcaaaccaatattgtgaacgtattgttatgattttatcaagggaatattcagtttccaggttttcttatctggagttcttaaaagagttttttttatttaattttacacggcacgatattatcgttgttaattggttcgaaaattctatagtgaacaaacataataaagtgtctcttttttgcatcgttaaagcatttttaaaattgtttgttttaaaactagcatttaaaaaaataatatttgtacgacataacgattacccacatggagttattggtgtggggaaaatgatatcaaaatggattactaatattttgtattcatttgcaaatgaaaagatatgtcactcaatagtgtaccagcgcggggggtataaatatattccgcatcctttgtatcatgaaattaaaccaacttcagttccttcgcggttttattttcgtgaaaaagaacatgatctatatgttatttttggtcgtattgttcggtataagaaaatagaagatattgttcgggtttttcctgaaaataaaagacttattatcgcaggtgtatgcgaggatttagattatcttaatgatattttagctttaactgttgaaaggccaaatatttctattttacctgattatattagcgatgaggatgcacgtaagttgatggataaagctgtggcaatgattatttcgcataacaatgacgaaatgcttgtttctggaagctttttttatgcgcttacagctatgttacctgttgtttgtgtcgaaacacttttcttaaaatgggctgaagaaactattggctataatttcattacgaattgcaaggatgtaaatgaactagctcttgttattagtaagactaaagaatttggttgcaataatgagtgtgaccttgcatatgtccataggaatgttgtcagggagtttaatgatgatattatttttgaaaagttcaaggatttaattgaaggttga

SEQ ID NO: 269496 - DNA, 585 bp, Klebsiella pneumoniae
gtgttctggtgtcgtgcggtggcggcggcatcactggatatttacggatatcattccggctcaaaagggctctgcaactttgaaacagcaggtacaggcgtgattcacgttaacgacgctaacgcccgcctggatgtgaacagctgcattacgccgcgggatggcgatgtggtgttcaatctcaacgtagacacaccgtggtatggtcctgtccggtacaacggaatgcgcggaatatggtcacaggtgtccggctctctgcgcacgcagacccctgcagatacgtcagcaacggtatatcgtccggtctggaaagcagggcagatattcagcatgacactgacgcaaaatatcgctattggtgccacgacagccacgctggcgggattgtcagtgggagataaagtctggctgaagttgaaacaggatgctacgggaggaagggctgtcagttttatagatcagattaagcttgcagcaacctggaataacactgacaccggggcggggaaaactacgtttgcggagtttatctacgacggcacagcactggtgctgaatagtgcaaacggatggtatgagtaa

SEQ ID NO: 269497 - DNA, 657 bp, Klebsiella pneumoniae
gtgcgtgccgcgtcgatttattccgccgcgaaaatatttctgaaaaacacccacctggagacacagcaacccgtgttctggtgccgggctgtagctgctgcatccctggatatttacgggtaccactccggttctaaggggctgtgtaattttgagactgccgggatcggaactatccacgtcaatgacgcaaacgcccgtctggacgtgaacagctgtattacgccgcgcgacggtgacgtggcgtttaatatcaatgtggacacgccatggtacggcccggttcgttataacggaatgcgcggggtgtggtcgcaggtgtccggctcgctgcgcacgcagacacctgcggacacgtcagcgacggtgtatcgcccggtatggcgggcggggcagatattcagcatgacgctgacgaaaaatatttcagtcggtgcgacaacagcaacattgtccggtctgtcagtgggagataaagttttcctgaagctgacgcaggatagcgcgggctcacatgcggtgagttttgtggatcagataaaactggcggcgacgtggaacaacaccgacaacagcgcgggaaaaaccacgtttgcagaattcatctacgacggaacggtactgctgctgaataacgcaaatacatggtatgagtga

SEQ ID NO: 269498 - DNA, 240 bp, Klebsiella pneumoniae
atgcttcgtcagtcagatatcacccaggcgttccgtgagtcgatcgcagtcaatcagaaggggtatcgttacctgcataccagagattttgtgtgtaagttgcaggagagaggaatacatttctcggggcgtgaagctaatgcatggatggagcgctatcaaacatacttcgttgacaaaacaacggacgatagcgaaaacaagatctggatgcttcgcaatatggggattgttttataa

SEQ ID NO: 269499 - DNA, 156 bp, Klebsiella pneumoniae
atgggctttccgtctccagcaaacgactacgttgaagctacgcttacggtcaacagcttatgtaatatcggtgcgaatacgcgcgttgttgaaaccagcgacggctacgcagtcattgatgtgtcccggcggccgcaggcgggtgatgaccactga

SEQ ID NO: 269500 - DNA, 768 bp, Klebsiella pneumoniae
atgaagaataatgaaattgtcatcttctcagtttccagcaccattacccaacggataatgaatgttcttattgagcgtaaactggaaatccccgtctatgaatttcgttattctgacgttctcaacaaagctaatgaaatgatccagtccggcaccagaatcattattagccggggcggcactgcggccctgcttcgcaataacatccctattccggttatcgaaattgcccatgattttcatggcgtataccgcatcctgcaggaagccaagaataaatcacagaaaattgccgccattggtttccctcagttttgccgggcgctgcggcattaccaaagcatgaccaacgacgagtttaaaatctgccaggtctacaatcaccatgacattgaaaatgttataaaaaatctgtcagaaaatggttatcatatggtcattggtggtttgactgtcgccgaaatggccaagaaatacaatctcaacgttattgaaggcgacgccgacaataattccattgaacaagccattaatgaagctcatggcttactaaaatatattaatcgggaaaatttaaagttagtcatgagccatgcggcattgaatcaatcacgcgaaggcattatgtgtgttgatcaactgggtgaaatcattaatatcaatgctatcggcatgaccttatttcaatgtcaggtgggtgacaaaatctttaaaaaagaagcttttaaagatatctatgccagcatgattaatgagtggctttgttga

SEQ ID NO: 269501 - DNA, 675 bp, Klebsiella pneumoniae
atgttacatattttgactgtgtcaaatacagttaaaaataaaatagttgaaacgtataatgtcaaaaaagaaaatatttcagtaatatataatgtagtaaataaatgttattacgaagaaattacactcttgccaaatcaaagagaaggggaggcaaagggctattatttatgtgttggatgtaactggaagcacaaaaatattcattcatttatagagaattgcactgaaacgattgttgaaaaaggattagtaattgtatgtggtaagacatcatacacagcagagctatatgatctcgttgaaaaattgggtcttaaaagtaatgttatttttagacatgatgttagccaagatatgttgagaaatttatatacgaatgcactttgtcttatttatccatctatagatgaaggatttggtattcctccaatagaatcttttgcatgtaagactcctgtgatattgtcagatatacctgtgttcagagagctattcggcgaaagaggtatatatgttaacattaatgatagcaatgattggtctcgtgttatatctgaagtctctaatttttctgtggatgataagttaaaattgaaagagttttcatatggttatagcttagagggcatgtcagatatgatttctaaattcatcactaaaattccaaattaa

SEQ ID NO: 269502 - DNA, 162 bp, Klebsiella pneumoniae
atgacctttatgtctataacttatgcgtccaataataccaattttgattcttacattaggaccactcgtattattttgaataaaagaatccctttgctctctatatattttaagatctctaaccctattcctcacgatttgcacttcagctttaggggataa

SEQ ID NO: 269503 - DNA, 471 bp, Klebsiella pneumoniae; identical to SEQ ID NO: 266429

SEQ ID NO: 269504 - DNA, 1887 bp, Klebsiella pneumoniae
atggtgacgcggaagggctttaattcatctggcgtgatgaccgatatggataaggcagattcttccgactatgaagaagcccgtaagcgtgtacctgtcagccagatcaactattttgatgcacagtggaaagctggacaaatccgtagagccagtgcctacagcacctttgaacgctctcaaacagatgaagcccagcgccagcagttaaacgcgacggtgagcacctccgtagagcaagaggccagcgcttacgataacccgatgcaggccagtttgattcgtggtgcccgcaagcactcgattgaattatatggccaggctcgcgggtggagtcaggaaagcatcgatggcgcaatctccgaagcaaaccagaaagcacttgagcagcgcgcgcagaactatgcggtaacaaatcccactggctggttgaatggtgatttttcactggtaaacagcagcaccggggagcttgatatgcgcgcggttggcctggtggagtccggcggtaagcaccgcaatgctgacggtagtcttgttacatcgcccaagggtgcacagggtgaatttcagttgatgccggaaaccgggaaggaactggcggataaacgtggcgtggaatacaaccctgacgatccggtgcagcatgcgcagctggcgcgcgattatgccgggcagctcagtaaaaaataccagtcagaaccactggcaggggccgcgtataactgggggatgggtaacgtcgataagctgatcgctaaagtcggcgacccgcgcaaaggcgaaatatcgatggctgatttcgttaagcagctgcccgccgaaacgcgcggttggctttcccgctataacaaaaataaaaccggccttgatccggtggccgtgaataaaatcgacaatatcgccgaggcacaaatacgggaacaacgcgcggcagtacgtcagcaggttgaccctattctcaacaatacgatggcgcagctgtacaacggcgaagtgccggacgccatgccgaacgcatccaccattctatttgcttatggtgaacaggggcagacagcggtcaagcagctggatattgcgatcgataacgccagaactttccaggctattcagtacgtcaccccggcagaacagcaggccgaactggcgaaagtgaaaccgcaggcaaacgacccggattatgcgctaaaacttgatgcgcacggcaaacttagtgcgctggtgcagaagagtaacgccaatattcaggcgcagcgcgattccgcccgctttaacgacgcgctgatctccggtgagaaactcgacccgagcaataaatccatgcagaaggcggcggacaatacgccgtcggcgcttaatttccgcattaacgatgccaccacgcacgacgctatcgtacagcaggtaaatcagaccggtattatcccgtcgcaggttacatcgcaactgaatgctatcgcccgctccagtagcccggatgtggtgaagcaaggttctaccttgtttgaagccatttacgacacggatcccgcgtcggtgggcgatatgccaaaggatatgcagagcttttatcttacggttaaacagttgaccgatgctggcatggcgtcagatgaagcggtgaagcaagcccagaatattacttataaccagactgatgcttttaaagcgcagctatcttccactcaaagcaccaaagagtataaaaacgatcgcgccagcgctatggattcggctgttagtaatatggcgcaaatctttcgttgggacccttcggcggatgattcaacgccagaagcagtacatttccgaaatgactaccagtccctttacgacatcaactatcgcaattctggcggcaatgctgatgtcgcaaaaaaatga

SEQ ID NO: 269505 - DNA, 345 bp, Klebsiella pneumoniae
atggtcgatctcgccgatgtctatatgaccttttttctgcccaccgaacaggcaggtctgctggcgctcggcagcgaagcgcgcttggtccttgatgccgcgccggatctggtgatcccggccaatatcagctttgtcgccagcgtcgcccagttcacgccgaaaacggtcgagaccagcgacgagcgcctgaagctaatgttccgcgtcaaagcgcgtatcccgccggagctgctggcgcagcacctggagtatgtcaaaaccggcctgcccggtatggcttacgtacggctggataaacaacaaccctggcctgaagccctggcggtgaggttgccgcaatga

SEQ ID NO: 269506 - DNA, 2178 bp, Klebsiella pneumoniae
atgaccatctacaacggcttatttgagccaaagaaatcggcgattaaagactgcggcgccgtgcagctggcgatcgccatcgatgcgccaaacaaaaaagtggccgaaagcatcatgaccggcaaactctgggaatcataccctgccaatggtgacaactatttcaaaccaaaactgtgggaacacattgaaggccagccgctgccgaccgttggccagttcgatgagtcattcgcccagcagcatacttttgacggtgaaaaatgggtttctactgcgcaggatagcgattccggaagcggcgctggtttacctgccgacgatgaagtgatcgacctaatgaccctttccgctgaggaacgctttgcttccgtcctgctttttagcaccgcggcgattgatggccatctttattctcaggttgtggattatctggataacctgaaaaaccacgatggggaatttgaagaggaagatcgctttaactttaatgtgctgtgcgccctgcaaaataacttcccggttcaaagcatgcatgtggaaggactgaataatcttgttcagggtattttctcccactttgaaaaccagacgcctggcaaagcggctatctctcagttcgttaaacgctggcttgagaatccgggcaagcgcgacgaactggcccccggcgtatataaaaataccgctctcagcaccagcaccagcaccagcaccagcaccagcaccgatgataaaacactcgtggtaatttctaagcgcgggtataaacacacttatgcaacgctggatcaggagatcgctaccgcccttctcccgctggcgcctggtgcgccggtactatccggaaaccttctggacgctaagaagatgatttccgatgaccgggaagattttaaacgctggtcagcatcgctgcacaccacgccgcagatactcaaatacgaccgcgccagcatcttcggcgtggtacagaacgtaccggcgaaagatacctaccatttccctgacagcctgcgccgccacatcgattcatggctggaggccaacggccgctttgaagaaaccgattcaggatccgtaaaacaaccagaggcaacgcaaaatacagcctcaaacgtgggcgaaaaagcggaagtgccgcagccggttgtaaccgatactcaggccaatcaggcgcgtgagacgctcaacgatatgggctatggcgtatatgcatctggtgaggatgcagaacaggaagagaaactgagtgaaaaagtaaaaactctcgttcaggacgttgatcagcttgttgaacgaattaaccgagaagagaacctgccgaaagctgccgaagttgtccagagcattaacgaaatgcaggcaaccgaacgggacaacctcgaattgtggaaaagcgtattcaagacagatgagcgctttactacggccttctcagttaacggtggcggtacatccattaatggcacctacatgactatgatggccacacgagagtttgggccaaaaggtcagggctggggcgttgatattctggaagaacgttttgatacaggcgcgccaattacccgcactatcaagggtgccgatggcaataacacgtgggaactgatccctgatggtatgggtggcatcctcatggagaagcaccacgttattaaaatcaggctttggtatctgaagaacgatgtacgcggcgaagaatttgcattcggctgcacaccatacatttacggcagcaaatacggcccgatttgcgatggtgaggcgacaaaaaaatcactcactgatgcaactaaaaaagcactatccggcctcggctttagcggcgatatcttcatgggcctctatgacaatccagaatatcgccagaaaaacaaagcagagtttgacctcaagaatgccagcgaaaccgccgaagatgcagcgcggttgcgtcaggagttcgacgacaaactaacccgcaacgccaataccctcgcaaacgctgtatcggtgaacgaaattaacaaggtgtttgcccctatcgcccgtgaactcgaagttcaccgcaaggatgcagaatcaaaaggagacacacagcgctcccgccacctcagtagtcggttgcgccgtctcactgatatcaaaaatggacgtatcgccgaacttaataaatctgaggagaaagcttaa

SEQ ID NO: 269507 - DNA, 771 bp, Klebsiella pneumoniae
atggcggctacgccttatccgggctacggagccctgtatatcaaacggttactcacaccgcaggcccgcgcaaggcagcgccgccgggcaagctgtaccagactccgttcccgtcgttatgccggatggcggctaacgccttatccgggctacggagccctgtatatcaaacggttactcacaccgcaggcccgcgcaaggcagcgccgccgggcaagctgtaccagactccgttcccgtcgttatgccggatggcggctaacgccttatccgggctacggagccctgtatatcaaacggttactcacaccgcaggcccgcgcaaggcagcgccgccgggcaagctgtaccagactccgttcccgtcgttatgccggatggcggctaacgccttatccgggctacggagccctgtatatcaaacggttactcacaccgcaggcccgcgcaaggcagcgccgccgggcaagctgtaccagactccgttcccgtcgttatgccggatggcggctaacgccttatccgggctacggagccctgtatatcaaacggttactcacaccgcaggcccgcgcaaggcagcgccgccgggcaagctgtaccagactccgttcccgtcgttatgccggatggcggcgcgctgcgtcttatccgggctacggttccctatatatcaaacggttactcaacaccgtaggcccgcgcaagcgcagcgccgccgggcaagctgtaccggactccgttcccgtcgttgtgccggatgacggctaa

SEQ ID NO: 269508 - DNA, 333 bp, Klebsiella pneumoniae
atggtcggcacgcagggtgccgccgtgggccgctacgatattgaggcaaatcgccagcccgaggccggagccgccgctggcgcggttgcgcgatccttccgcccggtaaaagcgttcgcacaggcgggccagctgctcatcgctgacgccgggggcgctgtcggcgaagtcaatcaccagcatccggccgctgcggcgggcggtgatgtgcaggctgccgccgctgtcggtatagcgcaggctgttctccagcagattgttgaagagctgcatcaggcggtcgcggtcgccgaagatcatcgcctgctccgggagcgacacctgaatgcttag

SEQ ID NO: 269509 - DNA, 231 bp, Klebsiella pneumoniae; identical to SEQ ID NO: 203619

SEQ ID NO: 269510 - DNA, 543 bp, Klebsiella pneumoniae; identical to SEQ ID NO: 213964

SEQ ID NO: 269511 - DNA, 495 bp, Klebsiella pneumoniae; identical to SEQ ID NO: 213963

SEQ ID NO: 269512 - DNA, 396 bp, Klebsiella pneumoniae; identical to SEQ ID NO: 183187

SEQ ID NO: 269513 - DNA, 687 bp, Klebsiella pneumoniae; identical to SEQ ID NO: 183188

SEQ ID NO: 269514 - DNA, 159 bp, Klebsiella pneumoniae; identical to SEQ ID NO: 183189

SEQ ID NO: 269515 - DNA, 366 bp, Klebsiella pneumoniae; identical to SEQ ID NO: 213959

SEQ ID NO: 269516 - DNA, 306 bp, Klebsiella pneumoniae; identical to SEQ ID NO: 213958

SEQ ID NO: 269517 - DNA, 567 bp, Klebsiella pneumoniae; identical to SEQ ID NO: 213957

SEQ ID NO: 269518 - DNA, 741 bp, Klebsiella pneumoniae; identical to SEQ ID NO: 213956

SEQ ID NO: 269519 - DNA, 1422 bp, Klebsiella pneumoniae; identical to SEQ ID NO: 213955

SEQ ID NO: 269520 - DNA, 435 bp, Klebsiella pneumoniae; identical to SEQ ID NO: 100988

SEQ ID NO: 269521 - DNA, 564 bp, Klebsiella pneumoniae; identical to SEQ ID NO: 213953

SEQ ID NO: 269522 - DNA, 204 bp, Klebsiella pneumoniae; identical to SEQ ID NO: 179588

SEQ ID NO: 269523 - DNA, 414 bp, Klebsiella pneumoniae; identical to SEQ ID NO: 213951

SEQ ID NO: 269524 - DNA, 300 bp, Klebsiella pneumoniae; identical to SEQ ID NO: 213950

SEQ ID NO: 269525 - DNA, 225 bp, Klebsiella pneumoniae; identical to SEQ ID NO: 213949

SEQ ID NO: 269526 - DNA, 894 bp, Klebsiella pneumoniae; identical to SEQ ID NO: 232197

SEQ ID NO: 269527 - DNA, 792 bp, Klebsiella pneumoniae
atgcgtcagagagagcttgcagccacagctaaggccttcatgttggatagacctgaagtctcgctacaggagcttacggaccacctccggtctatggctgagcagttcctgacagacgctagtgacgattactggaatggacttgaggtcgctactttggtggacgagaagtccaacctgaaggagctagccgctacgcaagccttaagtctggaccaacagaagggcataaggttagcgcttgaagtcctgaccgcagcacagcagagggtagacactggtgatacctctggtctgattaagctgattgatgataataaccatactgattactcaactataggcgactctacgtcaattctgaagaatgagcagggggatagaccagtagttttcacacaggagcgccaacctgaggtcactatctgtagtttttctgagctagtgtcctcgctgctggctgagaaggtccagaccctgaagtcctccagctacaaggacctctcgtcctcactaaatactgtctcccggttcctgcctgaagacatggacctgatgtctcgctctgagtggctggctgtcagggacgctatgctggcttctgaggtgagaccgtcgacgattaacaagctgctgactaaggcgaagatgtgtctggactatggcctgatgaatgggcaacttgagggccgcaacccgattgagcgcatgaagttaactaaggatgtagactccaagcgtagagcattcactgacgaggagctggagagactgacctgcccccagagttag

SEQ ID NO: 269528 - DNA, 1989 bp, Klebsiella pneumoniae
atggcctttattccaccgctcgggaacacctccccggaggtcctgctcgataatgccacgcgcatggataaattgattaacgggccagcggacaccgttcccgaccgcgctggcgacccactgtactcatggcgccagataatggcgatggccgcagatgtgctgaccgcgtatcaggaaaacggcggtgtgctggcgttcgccgatgaacagcaactgctggcatttacgccagataaaccgaacgtcctggcgctggatggtacgaccggcgcttactggttctgggacgggatgaagtggacaaaaaataaataccagtttgcggatatcgcaaatgtactgagcctggcaatacagcggctgtatatttcacaacaaattcaaatgtccgccattaacgatacggcacagaacgtggatgataataaccagcaggcgacagactggctgtatgggttagaacagtggttacagcggttatatctgggtcaacagaaccagatcactgcaatcagtgacaccgcggataaatcggatgcaaatgaaatcgcgttgcagcgcctttatctggcgcagcagctgcacgcggccacacttagtgaggttgacagtcagttagcttacctgagcccggaaaatcaactttcgcggttgatgatcatccagcaactgaccgttgccttgtctgcgctggagggctttgaccctgcggatacctctacttcatcacctcctttactggacaaacattttgtttttggtgagccggcaggaattattcgaatctccgttaattcgccgggtggtgttcccccgaataaaaatgctggtcaatatccgacaacggcgcgtctcgatgttgacggaaaagttatttcgttctacagcacctttgaggtgcagggtgacacatcagcgacgttcccgaaaaaaaatctcaatattaccttcagctcaaccgcagatcgtgatgaggatatggatttaaagattggcgatatcatcccgcacgatgagtggacatttaaatcaaactggattgataacactcacgcccggcagtatgcatcattcctgctgtggtcgcagatgatggattcccgtcgtggatggccgaaacgggatatcgataattgctacgtgggaaaagtcgggcctgatgggttgcctaccggcgcccgcgctcatccgatcggctatccggcggtactgtacgtcaatgatgcgttttacggcattggcactctggccgtcggtaagaaaaaggaaaattataatatccctaaaaacgacccattgaagatacatatttcgatggatgccaacacggcatgggtggatattaaaaaattatccaccgatgccatgaaggcgcaatacagttttaaagcaccaaagacgcagaccgcagccacgcaggctgcattagaggcatgggatgcttttgcatcatcaggacaggctgatttcactgcaaacatcgccactaaactcgataaaaataacgccattgatttttatctgttgctggccgtcattggcgcgactgatttatggtcgaatgacaatgccaaaaacgtgcagtttattacgtgggatggggttaagtggtttttcatgccctatgacctcgatacaacctatggccttaaatttgatgggacgacgattagttacctgcctgacacagtgccggggactgacagaagcgcaaatttattctggatgaaagtcaggagtgcttatggcgacgatgttaatcaacgctatggggatttacgcaatcaggggattttttcaccggataatttgtattttctgcttaaacaatttcaaagcaaatactcaccggatttagtaaaagcggacattaaaaaatggcccacgcaaccatcattaaacgtcaccagcattgaccagatcctgacgtggtttaaagcacgactggcatatctggacacctattttaactactcccaacaataa

SEQ ID NO: 269529 - DNA, 1125 bp, Klebsiella pneumoniae
atgtcaaccatcatcattaaagacactctgcgtcagtccgtagaagctgccagcggcggcgcacagacggtgctttacacggcaaagggccagccgtcgtttgtgaatatcatcccaaaggccactattgagtctatcgatccgagcctgggcaccggcacacatccggcatttattgttgacgggaaagaaatccctcagttatttatcggcacctatcagggggtgattaaaaacggggaatttctgtcgctcccgaatgccgtgccaacctcacaaaacccggacaactatatctactacaacacggcgaaagcctgcggcgcgggctggcacgccatcacggcggcagagtggggattgctggccctgcaaaccttcaaggccggtacgcaaccactgggcaacaccaactgggggttttcctctgacgccccgacggagttcggccgccgcgtggatggtcgccagccgggcgataaaaataacacgacgggcatcacgtttactggttcgggcccggttgactggcggcatgacaagacgttctcggggatttctgatctgtgcggcaatatcgcggaatacaactatggcatccgcctgatggctggtgaactgcaattcctgcccgataacaacgctgcgctgttcgcatctgatatctccccggcatctgctgcatggaaagcgctggatgcgattaccggggcgttcattaccccgacatttaccggttcaattgcgggcggggattacgtggcgaccacaccgaccagcgtcagagtggccctgacgtcagcgaatgtgccgttttctcttcagatcccgtcttctggccagaacccgtttacggatttcaaaaataacagcagccaaccaatttcggcggtggcactcaacaagctgaagctgctggcgctattcccgctgaccatcaacccagcagactttaagtccgacgggttctgggcgacagcgataaattcacagcgggcgctgctgtctcgtggggggcataatgcgctgggtagtgcggcggggattttctgcggtgagtgggggcgtgatgggggcggctacatttccggttcgcgcccggtgtactatgcgccactaagctga

SEQ ID NO: 269530 - DNA, 753 bp, Klebsiella pneumoniae
atgggtattacgctttacaccaataatactgaatccagcatttcagagcctgatggttattcgccaggatttgatacaacgtcccttcgccgggcggaaatatttacgtataccgggatcggaaataatttaatgcccggtgaagatttacccatcactgttggctcaccatcgtttattgatggaacgccatttgtttcattctctaataacgcgtcggttgcacacctgaacctcggtattcctgacagtggggcccaaacctggtttgcgcttttcgatccaaataatgacgcatcacagcgcattgttatgggaagctataccggcacgagtgcaaataatcaccctggagtcagcatacttgttgaagccagtggtatgatgcgtttgtctcagggttatcataacacctcgaccgatatttacggcgtggcgtatggtgatgtatcaacgttccacaaagaaaaaccgatgctgctaagtctggttcttgatggtgggaaaagcaccctgacagacaggacgaacaatatcgtaacgggtacgatgttaaccggctctcttgagcgagcgccggcaaatatccgggttgggaagggaggtgtggggttatggggttcaactacggctacaagccggataggtgcctacctggtgtttgatcgggtattgtctgaggaggaacaggccacggtacatgcttatctcctgcgatgcgtccaggcgaaattcccctctgtaactttctga

SEQ ID NO: 269531 - DNA, 2193 bp, Klebsiella pneumoniae
atggctgcagatgacctgaatccgccgctgggcacgacgatgccggaaattttcatggacaacgtaaagcgcgccgatgaactggtgaacgggccaccgaccaccgtccctgaccgcggcggtaaaccgctttatacctggcgacttcagcaacaaaaaatggagaatgcgctcgataacttccaggaaaacggcggcgctctggggtttggctcgcgtgatgaattgctggcctatacgccggataaaccaaacgtcctagcggtcgataccagcaccggagagcaatatctctggacaggcacagaatgggtttcttcggaataccaggccaacgagaaaatcaaaatgctgaacgaaaccattcagaaaggtaacgccagcgaattaattttcaaggttgtcgatcttcttggctggcgccagttttacgcgctgacaagcggggagtttgggacaaaactcacccgcataaaacctgacggaatagaattatctgagttcaatctgaaattctccgaagaggctggattttactttcaaaactttattgggcaacgcttgacggtcattgatgaaaatggcgttgttgctccgaagagtctgcgcgcgacagctgccggggctttcggaacggatgctgcgagactggcccggaatgggattgtgtttgacggcggtaatgcccggatcgatatctctggccctgagtttatcaaggcggccgatatcattggcagaactaaaactgttgtcgatagatacgggaattgggtcgggggcgggggcggaatgtcattgcaggacaggatcgatattctgaacgctgagaacctcaattattacagccaggtccgtagccgatacaacacagacatcgagcgtcttgtgtttgcacttacgttaattctgggctcgggccagtctctggaatcgactcaggaggggttcccggcgctgagcacgagtgtttacgagaatctgggtaacctgatgctgggtgatagcccgcgacctaacagcaggaccgccgcgaatttcacccccgtcggcacgccggaactgaagccgctaaaagcggtcgtgcaaagctccgacggttccacgattttgactgcagcgcaaatttccgcattgcccgccggcgcacccaacgaaggtgaaggcgcggtcgcgacggttaacatgctgcgggcgttattcctgcggcatatgtcgctgctaaccgatccatctcgctcatttgtactggcaagttgcggggtgaacgggaggaccattgaagccctttcgaaaggggccagccctgagttatataaccgcgttcgtgaggctgtgaccaaaattaaagcgattgcggacagccagggtaaatcgtttggtatcggcgcgattctgtttgaccagggccaatggaactacaaccctgcatatggcggcgatggtacccgtgagggatggaagtcgctattcctcaaatattacgatgacctggtggctgatttttgcgcggggcaaaatccccctgcggtgttcatgagccagactggggcgggatataccagcgatacgaacgaacttgcgatcgggatggcccaactggacctggtgacggccggcgggaatttttacggctccggtactacctaccagttgccggataaaggaggtcatttaaccagcaacgggtatcggtggcgatctcagcaggatgcaaaagttgcattccgtgtgcttgtccttggcgaaggctgggaaccgttacattgcgtcagcgcggaagttaaggggaatgttggcctgctctcttatgcggttccttatcctcccctccagtgggggacgccctatgttggcaggacagcgaccacttacgccgataaggggtatcgtgctaccgatgacaacggatcacttcccattgccgcggctgaaatcgccgcagatacggtagtgaaactgacattcagccgtaccgccgtcggtaccgtgaaaatctggtatgccgataagacggtgcataacggtaatggctgcctgaaagacagcgatccgttcctggctacggaaaattacgtttatatcgcgggtagcggccagtacgccgatgagaatatccccgaactagtggggaaaccgtacccacttcataactgggcctgggctcaggtcattaccacgattgcagcataa

SEQ ID NO: 269532 - DNA, 1263 bp, Klebsiella pneumoniae
atgtctcttaacgactcaaaaatccgcaacttaaaaccatccgcaaaacccttcaaagtttccgattctcacggtctgtaccttttagttaatccaggcggttcgcgtctctggtatctcaaatatcgcatcaatagaaaagaatcccgcctcggcttaggtgcttatcctgatgtgtctttggccgatgcacgtctgcaacgtgacggtatccgtaaaatgctggcacaaaatatcaacccagctcaacagcgctcagctgaaagaaccacctcctcaccagaggaaaccttcaaatcagtggcacttagctggcacaaaagcaacagatcatggtcagagaaccatgccgaccgtctgcttgccagcatgaataaccatatcttcccgataattggacacctaccagttacagaactgaaaactcgccatttcatcgacctgctgaaaggaattgagaaaaaaggtctgctggaagtagcggcacgcacccggcagcatatgtgcaatatcatgcgccatgccgtgcatcaggagttaatagagcataatccggcagccaatctggacggtgtcatcgccccgcccgtaaaacgtcactaccctgcccttcagctggagaaactaccggaactgttgactcgcattgaggactacaggcaagggcgagagttaacccgtttggcagtatcacttactctgcaccttttcatccgttcaagtgaactgcgtttcgcccgttggtctgagattgatttcaaaaacaaaatttggaccattccggctattcgtgaagccattcccggtgtccgctactcagggcgtggtgccaaaatgcgcacgccacatatcgttcctctctctcgtcagtctatcgttattttaaaacagataagggatatatccgggcatcaggaactgatattccccggtgatcataatccgtataagccgatgtgcgaaaatacggtcaataaagcactaaggttgatgggctatgacactaaagaggaaatttgcggtcacggatttcggtcaatggcctgtagtgcactgatggaatctggcctgtggtcacaggatgctgttgaacggcagatgagccatcaggaacgtaacagcgttcgagcggcttacatccataaagcggaatatttcgatgctcgtgaagcgatgatgcagtggtggtcagattatttggataaatgcagggaaaaatatattccaccttatgtctgggccagactgaaacgtataagatga

SEQ ID NO: 269533 - DNA, 540 bp, Klebsiella pneumoniae
gtgagacgactttggctcgcttcgtcgattgttaatgataccttacacactctacaagtgttctttgacagtcctccatctgctcattcccctgaaagatttcacgcggaatatagtaaagctgaacagattgctatagatcgtttttttgaggaactacttagtgacttccgtaaaaggctgaaaaacgctatcgccgagttaccggaggggccagcaagattcactctggcgcatgttaatgtaacctgttcactcgcattagcgatgacaccgtccatgcgaaccatgtttaagatgatttacctagagcctgattactacactatttggtcagaatttatagatgaggtttactctacagatacgataccagagtcgacacaatttacaactcgttatgctttggaaggccttttgttgcaaagtattattggcgaccctttgatgccggaaagagtgaatatgataaaaaattttgtttcgacattattatctgattgcaatggttgtgattataccatcaaattaaaaatgtaa

SEQ ID NO: 269534 - DNA, 744 bp, Klebsiella pneumoniae
atgagcaacatagcaggaaaagtcatagtgattacaggtgccagtagcggtttgggggaagctagcgctcgcctgctggccagtaatggagccgttgtggtactgggcgctcgtcgtttcgaaaaaattgaaagccttgctaggcaaatcattgaagatggaggacaggctgtcgcagtcagaaccgatgtatcgctcagagaggatgtttcgcgtctggtggagaccgcctgtagaacctttggtaaaattgacgttattatcaataatgcaggtattatgcctctctctttaattgagcaactcaaagttgatgaatgggaacagatgattgacattaatctgaagggggtactatatggtattgccgcagcacttccttatatgaaagctgcccgttcgggtcacattattaatgttgcttcaacggccggacaccgtgttgacagcaccaccgccgtgtattccgcgacgaaatatgccgtgcgtgcgctatctgaaggcattcgtcaagaggtcaccccttataacattcgcacaacaattatctcacccggagccagtgcgacaggtcttctggcaggcattagtgatactgaactgcagagcaccatcagcaattttacggctgatttcgccctctctgcagatactttcgcaagaatggtactatttgccatagggcaaccagaagaagtcgatgtaaacgaaattctgttccgccctacccgtcagaaaaactaa

SEQ ID NO: 269535 - DNA, 1236 bp, Klebsiella pneumoniae
atggttcgtgatcctggcagttactcgtctatggaaacaagtattaatagacttacacggcgacgttttatccagacagctgcaatgctgttgtcagctacagctttgccacgtgtacaggcattcgatcaacccatacctaaaagtcacgcgctggatgaatatctggtgctgggccaatccgggctgagagttagcccttttgctttgggatgtatgacttttggggaggatttaggatggggcgcaagcgttggcgattctgaacaagttctggatcgctatctggcgctcggcgggaattttatcgatacagccaacggatataccaaaggtcattcagagaaaattatcggtgattaccttgcccggaatccaggacggcgcgatcgcctagttatagggaccaagtttgccacgaatctttatccgggggatcctaacggcggaggaactagtcgaaaagctaccattgacgcctgtaatgaatccctacgtagattacgaacggattacatcgatctatattggatgcatcactgggacagcaacacgccagttgaagagactatgtcagctctgaacgatcttgtcagggcagggaaagttcgttatctcggcgtatcagatacgcctgcctgggtagcaactcaggcccagatgatagcgataacccgtggatgggctcccttcatcgccactcagatcgaatattcgcttgccgaacgcagtagtgaagccgaactgctgccgatggctacagctatgggaatgggtgttattccatgggctcccttggctgccgggaggatcagtggtaagtatacccggcagaacggtgctcaggcagaagggggaagagctgcactaatggggccgagggtcacagaaaagcatttgcagattgtggatgctttgacagaagcagcgctggagctgaatacaaccattccccgtgttgccctgagttggctccagaaccgaaacgcggtgaccactacaatccttggtgccaggctccctgaacaccttgaggataacgttcaagctctggcccttgaactacctactgaaattactgacagtctggaaaaactgacaacgcctgaactacctttcccgattgagtttctgaatcaaaatgcaaaggccctacaccagggcagcacaacagtaaacggcgtctccactcgcttacatccttatggcccccgtaatcaaaaggatcattactga

SEQ ID NO: 269536 - DNA, 1047 bp, Klebsiella pneumoniae
atgtccagccagctaaataaaggacgggatgaactcgtcattgagcccgacttcccgatcattgactgccagcatcatctttttgatcgtccggggcttcgctatcttcatgaagactatctgcaagatatgtcggcaggccataatattgttgcgagcgtttatattgaaactaacgcttttgcacgtgctgatggccctgaaatcatgcgcccactgggggaaattgaatacgctaacggcattggagccatggctgaaagtggttattttggcaagcgccgtatgtgtgctgctattgtgggtcatgccgatttacaagtcggaagcagaattggcgcatatcttgacgaagcgctgcagcgtgcaccagaacgattccgggggatacgacaaactgcgaattatcatccagatccgatgatacagcgttacattccaggttctccttcaaaaggcctcatgcgctcggatagctttttgttgggcgtcagagaactggcagcccgaaatctgacatgcgatgtcggtgtttttcatcagcagcttccggatctggcctggctggctgaccgtttcccgcagacactctttatcatcaatcatgccgcaccggctgttgccgcaggaaaagagctttcacagagttcagaactattcaatgaatggcgcaaatccatcatgaacatagctgaacgccccaacgtgctgtgcaaaatctgcgggcttggtctccctttctggggatttggttttaatgaacgaaaggacactgttcactatgaggaactagctttggcctgggagccgtatatttcaaccgtgctagaaacctttggcgcaggaagatgcatggcgggcagtgattatccaccagacggtcagtctgcagggtacgtaccgctctggaatgccatcaaatatagtgtccgtcatgcaagtgacgacgaaaaacatgcccttttctatgaaacggcccagcgcacctatcgtctgtcacttccggcaaccgttagcattcggaatcaggctgcgcagggcacgtaa

SEQ ID NO: 269537 - DNA, 1134 bp, Klebsiella pneumoniae
gtgctgtcagtcatgcttggcgtggccggaatgatcacatctgaactgcttcctgtcagtctgttgacacctatggcatccggcctgaagatcactgaaggcatggctggtcagtctgtgtcacttactgccttggtggccattttttccagcctgtttattaccaccctgacccgggggataaaccgccgctgggtggtggcaggcttttctttgatcctagcgctcgccaattttatgacggcactggcaccagactttacagtcttactggccgctcgttttctgcttggagttggtatgggcggattctgggcgatgtctgcttcactggcaataaaactggcggctccggcggatatcccccgagccttgtctatcatttttggcggtgtttccgtttcactggttattgctgcaccggcaggcagttttctggaagccttcattggttggcgtggggtgtttgaactggcggcgatactcgggatggtgtgcatgatctggcagatgttcgctctcccgtcgctacccgcgccgcgcaatcacgcttctgtaatcgctgtaatcagtgtaatgagacgaaatggcgttgcgacagcaatgttcactattttactggtgttcgtggctcagatggggatgctgacctatatccggcccttgctggaaacgtttgccggcttcccggtatcgggaatttctacggtgctgctcatttttggagtggcaaattttataggaacatccatctcagggctcatcctgagaaaaagtctgcgtgccggactcgcgatcccgcctctagttacggcgctttccatgagtgcactcttactgacaggaggccagcatggggtaaccattctggccatgacgctctggggcatgagttgcgggattgtccctgtggcttggtcaacgtggatcacccgtcggcttggtgatgatgcagaaaacgccggtagccttcaggttgcagtgatgcagggggcgaacacagtaggcgcggcagttggcggttttattttcgaccattcaggcgtgacaggcccacttttcctgggtattggactaatgctcatgacctttgtcctggcgctgacacggataaatacccgccgtattgcataa

SEQ ID NO: 269538 - DNA, 918 bp, Klebsiella pneumoniae
gtgtcacgtgccagtaccgatgatttaaatgcttttattgctgtcgcgcgggagaaaagctttacccgtgcagcaggcagactgggggtccagccctcagctctcagccataccattcgtagccttgaagagaggctgggagtgcgtctacttaaccggaccacacgaagcgtttcccccacagaggccggtgaacgcctacttgagacaatagcgcctcatcttgaagccatcgagctccagcttgatgcccttgccgaactacgggataaaccggccggtatggtcaggatcaccgccggcgaacacccagcagaacatatccttgcccccgtgctagcagaaattctgcctcagtatccggatattcgggtagaggtgatggtcgatgcctctttaagcgatattgtggcggacaaattcgatgctggaatcaggatgggagagttgattgctaaagatatgattggaattcctctggggccatctatcagaattgcggtggtagcatccccaggttactttgacaagtgggggatacctgagataccacgggagctgacccagcatcgctgtattaatatgcgttttcctaccctgggtggtgtcaggccatgggaatttgaagatattgagggtaaaaaagttcaggttcgtgttgaggggccattggttgtaaataatgcccgccttgcaaggcgggctgctgtcgatggtttagggatcgcctgccttcctgagcattatgtacaggatgaaattcacgcggggcagctgattagggtactggagccctggtgcgagtcctttccgggctatcatcttttttatcccagtcccagtaggcgccagcctactgcagcgttcagcatcctgctgagggctcttcaggcacataattcccgtagtaaaacgtaa

SEQ ID NO: 269539 - DNA, 1086 bp, Klebsiella pneumoniae
atgtcactggataaatacgtcactctggggcgttcagggcttcgggttagcccgtttgcattgggcaccatgacctttggcgacgacctaggatggggggccggaataaaagagtctgccaccgtactggatcgctatatcgggatgggcggaaacttcatcgatacggccaatgggtatactcgcgggcatgcggaaaaaatcataggcgatcacatagggcatgaaagctcgcgacgcgacagactggtcatcgccactaaattcagcactaacctttatccaggtgaccctaatggagggggttcaggtcgtaaatccattatcacggcctgcgaacagtcactgcgccgtctgcgtaccgattatatcgatctgtactggctacataactgggataaacatacgccaattgaagaaacggttgccgccatgcatgacctcgttcagtcagggaaagtgcgctatctgggtatatctgacacaccggcatggaaagtcgcacaggcacaattgatttctcagttccgaggatgggcaccttttattggacttcaaatagaatattccttggcacaacggaccgttgaaggagagcttattccaatggcgcaagagcttggtctgggtgttttgccctggtctccacttgcaggcggccgcctcagcggaaaatatacccgggaaaatgcaggaaatgtaagcgaaggacgtgggaaagtgcttggaaacatggttacagaccagcacctgcgcattgtggatgcactggccgacatcgcacgagagaaacaagtaaccatatcgcaggtcgcgctggcatgggttaaggacagaccgggtgtctcttccgtcattattggtgccagaacagtggagcaactggagcaaaatatatgtgctctggaactgtctcttgaggcaagccagattgcccgactggatgaactctccagaccagcactgcccttcccgtgtgattttctcaacatcacgccggcactccatgccggtggtacgtccgtaaacggagaatttgctgaaattcacccactttgccctcgcaccgacagtgagcgttactga

SEQ ID NO: 269540 - DNA, 669 bp, Klebsiella pneumoniae
atgaaagtttttttgagcatcggtacaggcccgggaatcggatttaccactgcggaacgcttcgctcaggacggttttatcgtcattctgagcgccagaacgcaggaaaaaactcgtcagctcagcgaacagctcaggacaaaggggtatcaggctgaggctgagcaagttgatgccacggatgttaaggccattctgtcactggtggaaagagtccgtcagaaatatggaaacattgatgtcttgcattataacgcagcagtcctacgtcaggccgctttacgggaacaatcagcagaaagcttctacgccgatacggctgttaacatcagcggtgctctggcggctgcatggagcgtagcaccggtaatggaagaggctggtgctggtactattctactgaccggtggtcatttcgggattgaacctaatccggattttctttcactgagtgtggggaaagccggcattagggcaatagcactggcactgtttgagccgcttaagcaaaaaaacatccatgttggaactgttacagtcgcggcctacgtctcacctcaaacccgtgaagcccgggaaattggtgagcgctttttcagtctttatgaacagcctgctgacaaatgggtccctgaactggactacagtgttacagccagcaatgaataa

SEQ ID NO: 269541 - DNA, 804 bp, Klebsiella pneumoniae
atgtcagaaattattggttttatcggcaccgggatgataggtggagcccttgctcgtctgagcgtagcggcagggtatcgtgttattctcagcaattcacggggacctgaaagcctcactcagtttgtgaaagaactgggtccccttgcccgtgctgccactcgtgaagaggtcgcggctggggccgatctggttatagccacagtccctctttccgcctacagtagcctgcctgcagtgccactgaccggaaaaattgtcattgataccatgaattattacccgcaggctcgcgatggtggcgttgacaggttggatcaggaagaggttaccagcagtgagctgatacaggagcatttatccggttctgttgttgtgaaagcattacacaatctggatttccaccatctgctggtcaacgcccgcccggccggccatccggaacgcactactctgccggttgccggtgataatgaagacgcagttgaaaaagtgtctgcttttatgcagaaaatcggctatgacgcagtacacgttgcttcacttcaggaaagctggcgcattgaacccggcacccctgtgtatgtctggccttacgttccgcaaattccggaaagtctctcaccggcagaggcaagaacatggtatatccagcatcccggcatgccgctttcagcatcagacgtgaaaagcctgaccgattctactacgagagtcagccctccgggggggagtccggcagagctgccacagacacatgtacagttggtgggtgaagtctatgcccggcgtagccaggggtga

SEQ ID NO: 269542 - DNA, 969 bp, Klebsiella pneumoniae
atgaattaccgaaaactcgcgaatattaaggtttcagcgataggaatgggatgtatgggattcagccacggttacgggcagcctcccgaacataatgaatcgctgcgattaatccgttacgcccatgatctcggctgtactcactttgatacagctgaaggatatggtgccggccacaatgaggaattggttggccaggcattaaaaccggtgagacagaaggtcgttctggccacaaaattttatatcgcagacagcagtccagagaatacggcagagaaacagatccgtgctcatcttgctgaatcgctccgcagactcggtactgattatattgatttgtactatcagcatcgcatcacaccccagattccagttgaggagatcgcactggtgatgggtaaattaataactgaaggaaaaatcctgggctggggtcagtctcaggccaatgtcgatcagatacgtcgcgcacatactgtcaccccgatgtcagctatacagagtgaatactcgatgatggagcgtatgtttgagaacgatgttattcctacctgtcgagaactgaatatcgggtttgtgccattttctccgttgggcagcggctttctgacgggaaccattcgtcaggggacaaaatatgaaggcgatgatgttcgacgtgtaattacacgatttgaggaaaatagcattcgcgccaatcaaccgataattgaacttctgaatagttttgccacagctaagaacgccacaccagcccagatatcgctggcgtggatagcaggcaaaggtgattttatttcgcctatccctggttcaagaaaggatgaacgtatccgtgaaaatattggtgccgccgaagtgatcctgacaaatgatgaggttgctcgcctcgatcacgccctgtccgaaattccggtcagaggaaaccgtactgatgaagacattgcacgcctccgtgtggtttga

SEQ ID NO: 269543 - DNA, 921 bp, Klebsiella pneumoniae
atgcaaaagaataacactcttacaatcaatattagcaatcactcggactgggtcaccatacaagaagctgtaaggttgattaattcattaacaccaaataaattaacagctggggatatttatcgacatgccttacatgaaaacatcaggctctctatatatttccagtcaccaattatattacgaagagtcaaaaccgaaaaaaacaaaataaaactaagaccaactgaaagttcacttataagtcgcctttgctttcttaacaaaaattattttattaacgacgtgaacttaatggtgagcactgaaagtaagaatgtgttaccaaaatgcaaaataattgacactacattgacagggttagaatatataatcatacaacgcttgcttgccctctccctcggcattccgttaccagttacgggggccaatgatcgtatacatggcatttcggttgagatttttggcgagatattcttactttttgaaaagattacatggcaggaaaggattaacaaacaaatagatcaattacctcaaaatagaataatggaggtctatgaccatcttgtatctccgggcccatccaagaactctttaaaagaacatttccctgttcatcaattaccaaaagatgcctgttttgttatccgtgatactgaacttgaaaagttaataaatctatcagtcattgataacacaaccaagccggattcaacacgtatatccacaccactatcccgtatgttctggcttgcctgtaaacataatgaagccataagcccattaattaaacatccgtataagttattatccattttcgagcaatgggcctctgatgacggcattactgaccggtttagtggtgatacgctaaaaactgcgcttgagcgtggttcgccctcatttccatcagattaa

SEQ ID NO: 269544 - DNA, 585 bp, Klebsiella pneumoniae
atgatcccatcaattaattacgccatattaactgatacgctgattgcgctgaaagaagggaatattcgccactgtgaagccttgggattcacattcgacgaaatgaacgcgcttaatcagttatcgcttgatgagatgtttatcatcagccgatcccctgtgcagtttgtctcaatcagtgtccaccatgactctttgcgccatctgatagcactggcccataaggaggtccgacaccagcgcttggttaaccgggcaatcagactgggtggttcaattgcattgctcaaccagtattttggcctcacctccaatgaaacctgccttcgccgccgaatgctgggtgtcagcgtcccatacggccgaacacctgaaccagatgaagaaaccgatgcggctatctggcagcaatggcagcagcaccgagtggataaccttgaatcgcttgacgcgctgaccgccatgatgcaggtaacggaaaacctgttacagaatgtagaagtactgccacttaccaccgtatggaggcgtatcgcactttgcgaacaggaagctgctatcaggagggctcagcatgccggatga

SEQ ID NO: 269545 - DNA, 210 bp, Klebsiella pneumoniae
atgccggatgagatcgaccgcgatcaggaattcaatgagcagcgacttgaagaaatgattgagcagagccgttttaaagcgggtaccgcaccctcacgatctcactgtcgtttctgcggtaagcccattccagagaagcgaaggcagtcattgcccggagtgacaacctgcattgaatgtcagtccatacttgaacgtcgcaatctctga

SEQ ID NO: 269546 - DNA, 234 bp, Klebsiella pneumoniae
atgagaaaacccatctaccacgtatttgtcacccaggaaggcccgcccgatacgcagggcgaaaaaaacacctactggaccagggttggcgtggcatttgcccataacggcaaacccggcctgaatattgtcctgactcccggtattgcggtttccggcaaactggtcctgcttgagccacgggaggatagcaatcttccacagaatgaggagcccggcgaaacggcgctttaa

SEQ ID NO: 269547 - DNA, 711 bp, Klebsiella pneumoniae
atgctttccaccactgcctttctggcggcggccatgcagtgtgccgccagcattcatccgtccaccgcgctcgatgtggcacgggtggagtccggttttaacccttatgccatcgccgaaattattccgaaggccactggtaccctcgaaaataacaatgttatctcccatcagcccgccagccgggacaaagctgagctcattattcgccgcctcgtgacacagggccgccgttactctgtggggctgatgcaaatcaccagcaccaatttccatcattatggcgtgacggcctctgacctgcttgatccctgcaccaatttgtccgtttttgaacgcattctcagcgactgctaccaacgcggcggttcacttgaaagagctttgagttgctattactccggcaattttcgtaccggacagcagcctgaagcggctttttccgggaccagctatctgcagcggatgggttatgtcgccgcatctccccgttatgccgtaccgggcacccgcgaggataaatccacaatgtcgactcacatggaagccatccctgcttataagccatcccctccccgggtggtctggccgggaaccgtcgtccggggcgtccccgcaaaactccgtcaggagaaaatcgccacagcacagacctcagcgccatcagtgcgccggagcctttcccagtcaccccgtgatgaggaagaataa

SEQ ID NO: 269548 - DNA, 294 bp, Klebsiella pneumoniae
atgatacgtttccgtaaactaaaggtggctgtcagccccctgcctacctgcatgctgacagttttttctgcacccccggtgtttgccgatggtttcactcgcgcaaataccgtgatggaaaaggtctccaccggtcttcatggtctggcggccatcaccatcaccgtggccgtgatctgggtgggttacaagaccctctggaaaggcgaaagcctgtcccagtgcgcctacatcattattggcgggatcctgattggcgggggcagtgagatcggcgcgctgctcatgagctga

SEQ ID NO: 269549 - DNA, 705 bp, Klebsiella pneumoniae
atgaaaaggcgttttcatgcactgattttcgcgtgcgtcattgtcagcccgctggcgcacgccggtattcctgtccttgttgatgctgacccgctgcgtgagctcgaatggctgaaagaagcgcagcgctggatgcagaccgcgcaacattatcagagccagatacaggcgtataaaaatcagttagcgacggccaccggcgtccgggatattgcagattttgtggatcaggcaaagagtctgaaatcggatctggaaaaactgcgcaaaccaggccagacactcaatgacctgctactttccggcggcacctcaggacagttcgatgcgctgtatacgaagttccgggttttcgatacctgcaatgccgaacagtcaggacgctatgcagatacctgcaaacagctggtcatcaataaggcgatccagcttgagcagactgacgagatccaggaacaggtcagccagacactgggcgagattaacggcctctcgaaccgtatcgcactgtccaaagactcaaaggagtctcaggaccttgccaacagtattcagctaaaatcagtgatgctgaacacgctcactgaccagtgggaaatgagcgtgaaggcagcagaaaagcgcgaaaaagtcctggaggatgcgcgtattaaacagtggaatcagcaacaattgactgcgccaacccctgatttaaacggctaa

SEQ ID NO: 269550 - DNA, 1065 bp, Klebsiella pneumoniae
atgcccggtggtgtatttatcggtgttgaaaaacacctgataggaggagttactgacgccacaaagggactgatgatgtcatactcctccatgatggtggggctggcggcaacgtcagccacgctctatatcatgtggcgtggataccagaccctggcaggtaagttgtccacaccaatggaggatgtcacgtgggacatcatgaggatggcaatcatcctgtcttttgtggcaaatgtcagcggttatctcgatggggtgattgatgccattaatggcctgaaggagggattttccggcagcgataatatctggcagttactggatagtttatggggtaaagcgaaggtattaggtaaaacgttacacgacatggataactcaacatacgtaaaagatgagggaatgaccgctcaattttatgtctggctcgggatattcgttttaatgattatcaccgcctttatttcaatgatcgcggaagtcatggttttactgctgagtattaccgcccctgtatttatcttttgtctgctgtatggctttttacgccccatgtttaacaactggctgcaaaatgtgttcgccgccatcttaacggttctgttttctgcactatcgctacgcattgtcgtcaattatttaaactcgcggttagaaattgcaacacaactgtctgcacaatccaacattgtggagctaggcgcacaggtctgtctggccagtgtctgtgcagcaatactggtctacctctccgcaaaactggccagcgcgctagccggggccagtgcaacagtgtctatgcaggggctggcggcggtgggtatcggcgcggcggcgtttggtgccgggaaactggcagcaggagccggtaagcagactacccgtacccttcaggacactatccagggctggagtgatgccagtgcgggtaaacccggcagcggtccgggatacagcgcagctcaggcacgtaagaatgcgattgaacagatgatcgcccgcaacgaagcccggagactggcgcgatcaagagaaacggccgttcagaaattccatcgttaa

SEQ ID NO: 269551 - DNA, 138 bp, Klebsiella pneumoniae
atgaaacgcttgattgcgctggttttgctgtgcgcgcttttcggctgcacgcaatcttcccgtcccccagcttttggtggtcagggcatcccggtgaacacccctcagataatggaggagttaaacagtcatgagtga

SEQ ID NO: 269552 - DNA, 684 bp, Klebsiella pneumoniae
atgagtgaacagaccctccttgcggattcccgcacctttgaacagcagatggttgagcgggacaaacgtgccacaaaagccgggtttatggtgggcggcgcgggcctgctcatcgccgcactggcgcttatcgcggtggtactgatgttgccgctgaaacaaacggtagtggaactgtacaccgtggataatcataccggacgagtggaacacgtcacccgtgcatcgaaaaccagtctgacggcggagacggcttatcagaaggcgatgacgtccggttacgtcaggctgcgtgaacggtacgtttacccttccctgcaggacgattacgccacggtacaggtttataacagtcctcaggtcaacgatgactatctggcgctgtatgccgcaaaagacgccccggacaaggtgtaccagaatgggacaaataccgtacacatcgacatcctttcaaaccagatcacctcaggcacggatcccgataaagttgccaccctccgttacaaaaagaccattcgccgcctcgcggacaacagcacccgcaccgaatactgggatgcccgcctgacatttcactccgaccccggcagagaaatgagcgatacggagcgggaggttaacccgttcggttttatcgtgaccagctggcaggcagaccgtgaaattcggggaggtgaataa

SEQ ID NO: 269553 - DNA, 1218 bp, Klebsiella pneumoniae
atgaacgatgaacacccgcatccggagcctgatggctcggtgccttctcaggcacaacgagatgatgatattgccacgctggagcgcgaggcccgagcaaggcgggaaacggcgcttctcaccgcgcaggacgatgaagagaacgacccgctacaacccgccgtcaataaactgaaaaagcgcaggcgcgggaaagccaccgcttttctggcgatcgccgccgttgcgctgattgcgctggcatgggcgggcaactgggtatatcgcaatctactctggcaacccggtgaagagaagcggcgggatgctacgccacagccgaaccggagcgattaccggcagcgtaccgatctgggtacgcaagataccggggccgaagcatccgaaccggcagaaaacaacccgcgcatgacgacagccccggagcctgagatgccgcttcaacttgataaagcccattttttggttcggcgtgatggttcagccgctgcggctcaaaacccggtccggaccaggcagcaggagatgacgcaggcagcctctgccggacaacaaccagacaccacgtcgccaccgtcggaaccctccccggcagcagtccggcgtattccttacaacccggacctgtacgtcccggaaaataccgctattccctgttcactggattaccgctttgtctcggatcgggcggggaaaatccgctgcacgatcgccgacgatatctggagtgccagcggtaatacgaagctgattgaaaaagggaccaccgccacgggcatttaccagacgggtgcggaaaccgggatgacgcacggacagggacgcgcctttctcatcatcacaaagctgcgtacccgccagcccccttatcttgatattccgctggtcgatacccgcgctgccggagggctcggcgaggctggcgttgatggctggatcgacacgcatttcagggaacgattcggcggcgcattactggttggtatgatccctgatattggcgcatgggcatccaacagcgccggtcagaaagatcgtaatacggactataccgaaaacagtcgtcaggcgatggcagatatggcacgaaccacgctggaaaacagcatcaatatcccaccaactctctacaaaaatcagggtgagatcatcaatctgatcactgggcaggatattgatttttccggcatctatacgctgaggatgaagagtgaataa

SEQ ID NO: 269554 - DNA, 267 bp, Klebsiella pneumoniae
atgacatgttatcgtgccgggggcgcattgacagagctcatcattgactttggggaaggacaaccgttctgcctcaccatcggtgaaggttctctggatgtaccgcctgtttcctcagacgatatccggctggcacataagcagatatcgctgcctgacgtcaccgatattatcattcttgtgacgacattagcccgctatgccggactatccccatccttctccgttgatggagaatcatctaccttgctggagttcagctcgtag

SEQ ID NO: 269555 - DNA, 1008 bp, Klebsiella pneumoniae
atgtcgaagacgaaggtactgttcgcttattgccatgaactggggcgctgcttgtccatcgatgaagcgcgaacggaatttttttccagaaagcctgaagaaagaaagcggttcactttttcctgtagcgatcgcaactgtaatgtcaccatcagtggcgttaactatcacgtcaaagctgaagatggtgaaaaattcaaggccgcacacttccgttcaccccatcctcaccagttcggatgtgaatggatcgcgttcaccgaggatgccgagcaggacagacggccggacgaatcagaagctgatttcacggaaagaaaagcaaaacaaaagctgacggactatatcaactgctttgatccttcaattgatgaccctgatggcgagccagccgatcccgttaagcttgctactcctgcacatgtaaaaaaaactgacggtgatgatgataagtccggtaaaggtgaagagccccgctggagtcgctatacgcgaactaaccagctacagcgacttatcgacacatggcaggaagcgaaaaaaacgttgcctcaggatgagttcagggcgttaagactcaggatcatgtaccacggtcagatctatcttcatgaatacataacgcatattcagcgaggattgactaaccagtacgcgggcgtcatttatggcggcgggacgctaatgcatcggtatggacggggttttcttttcaatttctttgataaacatgagggtaaacctgttcgcctgtatgtcagtaaagatctgatggcgaaaggccggtttggtcattatatcgatgaaattctggacacagagaacgtcagatatttccgtgtgtttctgctcaatccggttgtttctgaaagggaaaacagcgcaggaaaatccgttatcaaccttgaaatatcaaagctgcgtcaactggcgatttactacgagctgaactccagcaaggtagatgattctccatcaacggagaaggatggggatagtccggcatag

SEQ ID NO: 269556 - DNA, 309 bp, Klebsiella pneumoniae
atgcaacatagtccattatttctactgttgactttactcatagggccacaggcctatgcctccccggaatccacccagctcgcccttgcgctgaaacaactcgacggcgtaaaaacctcgctggaacgcgcccggagcagcgccagcaccgctccacaatcacgctatttcttcgactacgtacaggcgcagcaggatatctcaaccattgagcagggcatccgccgttaccttgccccggcaagagcgcagccgcgcgccgttcaaccactcagcaccagctaccagcgggagaaccccgatgactga

SEQ ID NO: 269557 - DNA, 1860 bp, Klebsiella pneumoniae
atgctgtccgatactctgcaaaggcgactggaatcaattcccgccctgtcgaaacagggaaagagaatcaatgggttgtcgcggattatgactgtaccgaagttctggttgcaggcgtatgaagatattgcacctaaccggggggcaacgacccggggagtcaccagtgacacgttagatggtttctctctggagcgtttaaccaaaattatcggtcaggtcagtaacggcacctataaattctcgcctgtcagacgggtactcattcccaaagccaacggtaagactcgccccttgggtataccaacggcgagtgacaagctggtgcagtcggctgtgaaacttattcttgagcgcatttatgaaccggtattctcgccaaaatcatatggtttcaggcggggatgttcatgccatgatgcacttctggatattaaacatcgctggaccggcgttaagtggttgattgatatcgatgtggtcagtttttttgacaacatcgaccaccgtgtattgctggctctgttagccagaaaaatcgacgataaacgcttcctcacactgatagaaggtatgctgaaagcgggttatatggaggactggaaattcaatgcaacctacagcggcactccgcagggaggcgttgtttctccgatacttgccaatatttacctgcatgaactggatcagtatctgacacagaaaacgttacagttcaacaaaggtgagcgccgtgcggataatctgcaatatcggcgtctcacacagcgtatatatcagcggagatgtcgggctgaaaaattccggagtgaaggtcgggaagacgaagctcaggatattctgagcccagttcgatgtcttgaagaggaacgttctgttatgccgtcaaaggacggaatggatcccggctataagcggctgatgttctgtcggtatgctgatgattttctgattggcgtcattggttccaaagatgaagccagagaaataatgcgcgaagccgcagcgtttctgtctgaaagtctccatctggaggcctcaccggaaaagagcaaaatcagtaaggcgacagacggtacgatcttcctcggttacacggtgaaagccatcatggacagccgtatcagaagaacgaaactgggcagacgcatggtgcgttcgcgggatcctgccggaagaatccatcttcttgttccacccgaaaggctggtccgatttaatcagcgcaatggctatggcgatcttggtcgcctgaaagcaatacaccggcgttatctggtggacagcagcctgctggaaatcgttttagcctataacgcggaaatgcgggggctggccaactattaccggctggcctattgtgcgaagttcagcctgcgcaagctgtggttcctctgggaaaccagcctgctcaaaacgctggccttcaaattacgcctttccgtaaatcaggtggcgcatcgtcttaaaacagaaaatggtcttgtggttcgtcttcacatacacggcaaagaacgggctattgccgtgtttaatctgaaacatctgaaccagcttccaaatatcgggagtaaagtcgatacgctggcagtcccctggttcaccagtggacgttcggatgttatggatcggcttttagcccaacagtgtgaatactgcggtgcaacaggcgttccatgcgaaatccatcatagtcgcaaacttgcggatatgaaggatacaccgctatggaaacaggtggcggcagcccgacgacgcaagcgaattgttctgtgtcggtcatgccatcaggctctgcacgcaggcactctgaaaccacttaacgggaatgggaacaggcaaacatggagagccggatga

SEQ ID NO: 269558 - DNA, 177 bp, Klebsiella pneumoniae
atgtatatggatacgacagtgaatctgtgcgcatttaaaaatttatcccccaaaggggatatactcaaaatatcagtcgtgggggataaaatgaacgtaacctcacccaaaattctggctcaggcagtcaagaatgcacgcaagcaacgtaagctgacccaacgtgaaactgcataa

SEQ ID NO: 269559 - DNA, 810 bp, Klebsiella pneumoniae
atgccattattgcccgactatgttagtgctttattactgtctctaaaagggaaaggtgcgtcaataacaattatattggcatcaatagaacttattggtttgttatttttgttttttattttcatgaagatgccagcatcgtcaaaaaataaaatagtcaatgaggtaagtgttgataagattctaagctatagaaatataaatatattctcatattttggatcgatagaagatacaagggatattcaagtaattgtaacgtctgagaatagtgatttagaattagctagcttttcaagtacatcaatatctggcagggtaagaaatatggcatcatcaaaggatgatgttgggaatgttatatctgatccattgtatgaaaatattgttcgttttaaaagagcacataacaaatataatgattttaatctagggacatgcatttcctcgcaacctttgaagttacaaaaacatggtgtgaagcgtgttattcacgcgatcgcgatcaaaaaaaatacagacaatacaataagttacgacgctattgctataaaaaaaataatttcctattcaataaagagttgtatcaacgactcttttgaaagcatttttattcctatctttggtatcggaagcgctcaacaagatcctacggatttaattattacacagttagaatcaataaaatccgtactggatgatgagttaatgtgcaccacatccacgttgagtttgaatatttatttgggcgtttatcgcgaattggattgtttatttttaaaaaaatcagcaataaaaaaatttaggtag

SEQ ID NO: 269560 - DNA, 564 bp, Klebsiella pneumoniae
atgcataagatgttaacttcaaaggaatttacatgttatcatggtaccacattgagcgccattccgtccataataaataatggatttaatttgagtcaatcaaatgaggattggttagggcatggcgtatatttttttactgatggtatatcagaccctttaaaaaatgcaattgaatggtctaaaaataaaagtaaaaacgatgatatctgcataataaaagttaaggtaaaagtcgatgattcagaagttttagatttgagaaccaccaaaggtttaaatgtatataattttcatagggatagtatcattgataattactatgatgtattagctaagagacgtgacatcactataaaaaaaagaaaagataccagagtagatgattgtactattatggatatcttacagcagacattaaattataaagtaattatacataatgtttatataaagaattatcaccaaagaaaacttgcattagagtcaagctatccaaatagtactgttttatgtgttaatgacctttctggcataaatattattgatgttataaatatttaa

SEQ ID NO: 269561 - DNA, 684 bp, Klebsiella pneumoniae
atgccttttgcgatagaacaacttgatgtttcaaatcacgatattatcatatctagtagccatgcagtcgcaaagggtatactcaccggtcccgatcaactgcatataagctatgtccattcaccgatacgttatgcatgggatttacagcatcaatatcttcgcgaagcaggcctaaccaacaatatcaaggggctaatagcaaaatggatgctccataaaattcgtatgtgggactatcgcactgcaaatggtgtagatcattttgttgcaaactctcaatttattgccagaagaataaaaaaggtatatggacgacatgccgatgttatatatccgccagtggatgtcgaaaggttttctctttgtgaagataaggaagatttctatttcacagcatctcgaatggtgccgtacaagcgcattgatgtcatcgttgatgcatttaaattgatgcctgataaaaaattagttgtaattggtgatggctcagagatgaataaaattaagaaaaaggcaggtagtaatgttgagattctcggatatcagcctaatgataccaatacttttgaccttttgcataacaaattcctgaaatttacaaacaatgattttcacttctcccagcaagaagccgcatgcagagttgtggtgtttgtgtccatattatttacacagcattaa

SEQ ID NO: 269562 - DNA, 204 bp, Klebsiella pneumoniae
atgcaacataactacttcacttattacgaaggacttgattcagacggagccgttattttcaatggcaatggaattttcagtacagaaccaggcagagcaaacggccagaatgtaattgagcatgggaattatctactcaaaaccgcccaagagaaaaatcctcatatagccagaatagtaataaaacacatcaccaaattatag

SEQ ID NO: 269563 - DNA, 240 bp, Klebsiella pneumoniae
atgaaaaagatttatgtactctccccgtttaatttcaacgacggcaaagagcaaaagcatttccaggtgggtttccatgacgtcgatgattcggttgccgatcactggttcgtaaaagcgcactgctcaccggatggtgaagcgccagcggtagcagaagacccgcgcattgctgaactcgaagcgaaattgccggagactaccgataatggcaagaaatcaaagtctgccgacgcctga

SEQ ID NO: 269564 - DNA, 1068 bp, Klebsiella pneumoniae; identical to SEQ ID NO: 199020

SEQ ID NO: 269565 - DNA, 219 bp, Klebsiella pneumoniae; identical to SEQ ID NO: 199021

SEQ ID NO: 269566 - DNA, 246 bp, Klebsiella pneumoniae
gtgaaagaacaacacgccaaaataaaaggctaccgtgatctgtcagccgacgagatcgcgctgatgaacgaaggcaaggatctggcccagaaagtcggcgagttcgtggggaagctggaagccgcagaatttgctaaatcgaaccttgaagtgccggataaacgctggctggccatcggtaaaactgaccttcagaaaggcttcatggccgtgatccgcagcatcgcaaaaccaaccactttttaa

SEQ ID NO: 269567 - DNA, 336 bp, Klebsiella pneumoniae; identical to SEQ ID NO: 199022

SEQ ID NO: 269568 - DNA, 516 bp, Klebsiella pneumoniae; identical to SEQ ID NO: 199023

SEQ ID NO: 269569 - DNA, 144 bp, Klebsiella pneumoniae; identical to SEQ ID NO: 199024

SEQ ID NO: 269570 - DNA, 498 bp, Klebsiella pneumoniae
atgcatatgttcagcaagttgcaggccttaatgcctgacggtcggcatcgcatgttgtataccgttggaaccccacctgaagtatatgaagtacacttcaacgaaattgttgattatgatgactctcttttagagatcccggacggcattctcactggagtccggccgacactcctgaatcaaatgggtggatgttacgaaatcgccttcgacctcgtcagcaacatcaaaaaaggcacctcgttcgaaccaccgaagtcttacgacccgaacaagcttggtacaataattgaccgtgcgatcatctaccactacaatagacacaggccatattgttatacgttcttggcgtactcgccagctctgtcacggctttacatgcgaacgctaatgaagttaaggcatgaatttagcgacagaatcgacaagatccacactcatttagaaccaggaagaagagggtatgtcattgaatttaaaaccaaagaaaactcgtaa

SEQ ID NO: 269571 - DNA, 153 bp, Klebsiella pneumoniae; identical to SEQ ID NO: 199026

SEQ ID NO: 269572 - DNA, 492 bp, Klebsiella pneumoniae; identical to SEQ ID NO: 199027

SEQ ID NO: 269573 - DNA, 540 bp, Klebsiella pneumoniae
atgattaattacctctccgatcttcttcgaaataagcggtttgagcggaatgttaacgcgtccctcagctttatcgaaagtcgtatcgaaaatctcaacgaacgcatccgcgtacttgaaagcactgtagtggcacaagcaaattccatcgcctctctcacgaagtacagcgcatccgggccatggcaaatttccaagaagggaaatgtcgcgttagagaatgcagttgtcagatcagcgccgatatcatcagggataattacaaatggaaaagtatcaagtaaagagactaagacctctggcgatactggtttgcgggctaactttggctccggtcgcgctgactccagccggttttctgctggagcagactctacccagccgcaatacgacccatatgccgggtacgaaggtgccaccttctcaggatcagtctcctcgcgccacaaccacaaccaccacgagcacgactgcggtgacactggagggtatgactctggatgctccgattcgtcctcttcatccgggtcttttgactaa

SEQ ID NO: 269574 - DNA, 783 bp, Klebsiella pneumoniae
atgaaagaattaagtatcaccacagcaacgatgaccagcatggatattgccgagctgatcggaaatcgccatgacaaggtcaagcagtccatcgaaagacttgtaaaacgcggcgttataacttctcccccaatgggggaaaagcccacggcaggccgctccgcgacgtttttcgtgttctccggggagatggggaagcgagacagcattatcgttgtagctcagctaagtccagagttcacggcgcgtctggtagaccgctggcttgagcttgagaaggctgtaaaagaaccggctctgccacgtacctataaagaggctctgatccaccttgttgctcaggttgaagaaaatgagcggctgactgaacagaatgaagcactggatgaagcactgagtatcgcccgccctaaagccatcctcatggatcgcttagccggaacgtcagagcaactctatggtatcaatgaagctggtcgcattctgggtacgtcaggggctgttatggcttcctgtatggatatggttggcaatgtctttgctaaaagaaaatactccaccaccccgcgccagtttgtgaagcaattcattgatcgcgaatatggccgcaacgtaaccagcaccggcggcggtcacatccaggcgaagtttacgtttaaggggctttgctttgtcgctctccacctcgtaaaacgcgggatcatcaccgtagacgccattccatatcatgcatgtcgcgatagtgttaaagctgccatggtaatgagaaagtcagctgcctga

SEQ ID NO: 269575 - DNA, 513 bp, Klebsiella pneumoniae
atgataaaaaaaatatacatgctaattgggtgcgggttgctggcaggatgtgggctgttaaaaggtcctccagtttacaaaccatatgtaccgcgtgtggaagagccgcttatctatacggatgcttgggtatatagcgactgcatgatttacgatcgtgaaactaaattaacttactactctaaaaacaaaatcatcagcgcgaataccgcccctgaaaagggatttattggcagaccagctcagttcatggtcatagaccaaagttccccgtttggccataaaatcctatcccctaaactacattttttccatgaaactggtacttttattaacaggtcaagcgcagaaacggatgactattactacggacaaagagggcttttaaaccaatactatttggagtttgcaataattcataaacctacaaacacgtacagatactatgagtgcgatactagggtctttgagaagaagaagattcgagttgaagatttcctggtggttaactaa

SEQ ID NO: 269576 - DNA, 381 bp, Klebsiella pneumoniae
atgtttgtagagggtctggctttgtatttggcgaagatgggggttggcaaagtcggctccactatttttgctgatgcaatgccacaagatgccaaaagcgccgtgatggtgacttcaccaaccagcggcattgaagtcgatcatgaacttgccggcttctatatggactcagtgctgattgttgtgcgtgatatttctctatcagccgcacagaggaaaatgcagagtattaatgcgcatctgccagcaaaagagatctcttcgggtagtgttttcttcaagatgctgcgaccaatgacattgccagtcgtttacccgcgtaatgatggggcgatgttcgagattgggcttcctgtggaatttgccgggtatatgttgtaa

SEQ ID NO: 269577 - DNA, 615 bp, Klebsiella pneumoniae; identical to SEQ ID NO: 220990

SEQ ID NO: 269578 - DNA, 693 bp, Klebsiella pneumoniae; identical to SEQ ID NO: 198140

SEQ ID NO: 269579 - DNA, 1467 bp, Klebsiella pneumoniae; identical to SEQ ID NO: 198141

SEQ ID NO: 269580 - DNA, 180 bp, Klebsiella pneumoniae
atgaggttttgtgtcaccaaggcaaccaaactcagccagttcattaccagaaatcacaaactgaacatcaataaagtctttatgtgtttcaggtgtacgtttctcaggcagatcggtattcgcagtaaatgtcttataaataacgccatttacttctttctgaccatcctgatgtactga

SEQ ID NO: 269581 - DNA, 1017 bp, Klebsiella pneumoniae
atgtcattagtaaagtttgatgaaatgaaacaaactgttaaacaagcattcctgaatgccggtttaagcgaaaaacaagctgatgtttgtgctcagattcataccgaagcgagctgcgatggtattttctctcatggtctgaaccgtgttgcccgttttgtcgattacgtcaaaaaaggctgggttgatatcaatgcggaacctaagcaggtaaaagcccttggcagcatggaagtctatgatggtcagcgtggtatcggtatcaccaactcattgtttgcggttgaaagagcaatggagctcgccagtcaatttggtatcgggatcgtaggtatgcgcaataccacccactggatgcgtggtggtacctacggctggaaagctgctgagaaaggttatgccgcgatttgctggacgaacacagaatcctgtatgccagcatggggagctaagaatccgcgactgggtaataacccttatgtcatggccgtgccaatgaaagaaggcgctctggttcttgatatggccatgtcccaatatgcgtatggcaagctgcaagtaacccgtctgaaaggtgaaaaattaccgttccctggcggctttgataaagagggtaatctgacggatgaaccgggtccgatcgaagagtccatgcgtattcttcctgctggttactggaaaggttctggcatggcagtacttcttgatgcaatggccgcattccttaccgccggtgcgccgactaatgagatcgataaaattcaggaagggagctgcaccggagcaagtcaggtgtttatggtgtttgatcctaaacattttggtggtaaagaattcagtgaaaatatggctgcaagcgttgctgaatatgttaaaacgtcaacccctgccgaaggccagcgtgatgtgtactatcctggtgaaatggaactggctaaccgcgctaatttcactgtaaacggtattccggcagatgacggtgtctgggcagaagtacaagaactggcgaaacggtaa

SEQ ID NO: 269582 - DNA, 1530 bp, Klebsiella pneumoniae; identical to SEQ ID NO: 198144

SEQ ID NO: 269583 - DNA, 1020 bp, Klebsiella pneumoniae; identical to SEQ ID NO: 198145

SEQ ID NO: 269584 - DNA, 1215 bp, Klebsiella pneumoniae; identical to SEQ ID NO: 198146

SEQ ID NO: 269585 - DNA, 255 bp, Klebsiella pneumoniae; identical to SEQ ID NO: 198147

SEQ ID NO: 269586 - DNA, 396 bp, Klebsiella pneumoniae; identical to SEQ ID NO: 198148

SEQ ID NO: 269587 - DNA, 774 bp, Klebsiella pneumoniae
atgtcagtaattaaaaccgtggttgcaggaatcattgtaatggcaggcctgtcttctcaggcagtaatggctaaggaatggaaagaaattcgcattgctacagagggtacttataaaccctttagctacattgtcgacgggaaactgacaggctttgatgtcgacattgcaaatgctctttgcgaaaaaatgaaagcaaaatgcaccattgtgtcgcaggaatgggatgggatgatcccaggactgatgtctggcaagtatgatgcgatcgtggcaagcatgtcgataacgcctgagcgccagaagaaaatcgactttaccgataagtattacgcgactccggcccgttttatcgcgacaaaagacagcgacatcaaggaaacaactcctgcttcactcaaaggagtaaccgtaggcgttcagggttcaacctcccaggcgacctatctcgaagacaacttcaaagatactgacgttaaaatgtataaaaccgtcgatgatgccaacatggatcttgcaaacggtcgtatcgacctcgttttctcagatgctgcaatcctgtccgattggatgaagtcttctgaaggtgcttgctgcaaatttgtagggagtgatgttcgcgatgaaaaatactttggcgtgggtaaaggtgttggggtccgtaaatccgatacggatcttcgcgaccagttcaatgcagctatcaaagccattattgctgacggaaccttcgaccgaatcaacaagaaatatttcgatttttcgatcaagtaa

SEQ ID NO: 269588 - DNA, 711 bp, Klebsiella pneumoniae
atgagtgaatacctgaattatttgtcattcgggaacggaggatgggctcagcccattctttccggggccctgttaacaatcgaaattgcagtcgcgacgctgccgtttggtcttgtgatggggctgctactggcaagcggaatgttgagtaataaaaaatgggtgcaacggttttgcatagcgtatggcacgattttccgggcgcttcctgagctgcttaccatttttattatcttttacggctcgcagctcgcgatcaaaacagcatgtgatttcttcggctgggaaacaccacagattaatggctttattgctggcctcattgctctgggtgtcgtattcgctgcattttcatgtgaaattttttataccgccctcaagactatccctcaggggcagtatgaagcttcctacgcacttggactgtcttcgaagacgagctacttccgtgtgacgttaccgcaggtatggaggatcgcattaccgggccttggtaatgtctggctggtgttgcttaaggatacatcgctggtttccgtcattgccctttcagacctgatgcgacagacctatatagcggtaaattcgacaaaagagccgttcttcttttatgcgttggcctgtgctgtttatctgattttttcctctgtgtctgggctcattctgagttttctcgaacatagagccaatcgctattacgcccgggggtaa

SEQ ID NO: 269589 - DNA, 684 bp, Klebsiella pneumoniae
atgtttgagcttttccaggaatacggcccccgaatgcttaatggcctcgggattacgtttcagatagtcctgacgtcagtttttgccggtgctgtcctgtcaatgctgatcctgatgcttcgcatgtctggatcatcactcctgaaatcagtttctctggcatacatctatttttttcgaggcacaccgcttttggcccagactttcctggtgtactacggggctggacaattcaggcatgaattgcaggggctgggattatggtggttcttccgtgaagcctactggtgcaccgtattcacctttacgctgaataccgcggcttaccaggctgaaatctggcgtggtgcgatccagtcagttccgggtggtcagcacgaagctattcatgcgttaggcatgacgcgcaccgccggttttctgaaaattattcttccccaggcttctattgtcgcgttgcggccgctgggtaatgagctcgtgctcatgatgaaatcgtcagcaattgccagcaccataaccgtaatggaggttatgggaactaccgcgttggcattttcacgctcattcgatttccaggtctatttgtgggcggccattatctacctcgttatcgtggaaatcattcgccgtctggtattgaaaatcagcaatcgcctgacaaaacacatggtcagagtctga

SEQ ID NO: 269590 - DNA, 753 bp, Klebsiella pneumoniae
atggctactaaagaaattcacaaactaatcgtgcagtttcacggcgtcaataaatggtatggcgattatgccgcattgcgtaatatcgaactcgctgttagcaaaggtgaaattgtcgtcgtgtgcggtccgtctggaagcggaaaatcgacactaatccgttgcgttaatgggctcgaaaagtatcaggaaggaaaactggtcgtaaacggtaccgatttaggcgtgacgcgttcaggtgatgacaaagtcagatgtgaaacaggcatggtgttccagaattttaatattttcccacatatgacggcgctcgagaactgcatgctggcaccacaatctgtgctgaaggtttccaaaacagaggctcatgagcgcgcggtaaaattcctgaccaaggtcggcatgtcccataagatgaatcattatccaagccagctttcgggcggtcagcagcaacgcgtagcgattgcccgggccttatgtatgtcccctcaggttttattacttgatgaacctacctctgcactcgatccagaaatggtgaaagaagttctggatgtgattttatcactggctgaaagtggtattacgatgatgtgcgtgacgcacgaaatggattttgcacgaaaggcagccgacagggtggtatttatggatcagggacaaattgtggaaataaatacaccggatgaattctttactaacccatcatctgaacgtgcacgacagtttattggtcagatatctcattaa

SEQ ID NO: 269591 - DNA, 747 bp, Klebsiella pneumoniae
atgagttttctgttttcagatgagatgctggatcaccggttaccaaagacgatgcaaatcttctccctgatgcgtgatgccatcatcgcgatgcgtcttctacccggtgaggtgattcaggaaaaagagattgccgctcagcttggcttgtctagaacgccagttcgtgaggcgttgctctctctcgcaagtcagaatctcattattgtcaggccaaaccagggcactatcgtcagtcccatcgacataaaactagtgctcgatggtcagttcctgcgtgaatcccttgaaccccgtattgctaagctcgcctcacgcttttaccgtccggagtttgatattgaatttgatgagatcattaaccggcagcgtttcgcagcaactaatgccaacacgagctacttcttcacgctagatgacgagtttcacaagctgatagcgaagtgcgccaacatgccagaaatctggctgacgctgcatggtggcactgggcatctggatcgcgttcgcaggctggctttcactgtggagcagcattatgagtcagtgattaaagagcatgaggcgctttaccatgccattcgtcgcggagatgagacttctgctgaagaactgatgacaattaatcttgaagtgtatgacagccttatgattctgctggataagcaccgacattattttgaaaaagatgatactcttttatcccatttggattcaaaaaaaggattgcgtcatcttcttggataa

SEQ ID NO: 269592 - DNA, 1059 bp, Klebsiella pneumoniae
atggcagacaacatttcactggaagcagaagcgaccaatgcgctgaccgcgcaacagagcgatattggctgcgactttgcagcagacgtcctttctaagtattacggtattcgcggtgaagtccgcaaattgcgtagtgaaagagaccaaaactttctggtgctgagcaaggatgggacgaagttcacgataaaatttgcccatcccggcgaagaaagaatggtgagcaacttccagaccgagctaatgcatcacatcaatcttcgtgctcctgacctaccgattcagcaggtcagggctgctgtaaacggcgaatttgagctctttattgattgcctgggtcagatgcgtatggtcagggtcgtgacctatcttgaaggcatgctgatggcgcagtcaccggcttccgacgtccagaaattcaacctcggcagtatggctgctcatgtcacgaatgcactgatggatttcagccatcccgcgcaggaccacgtgctgctgtgggatgcgcaacacgcgtcattgttacgtgattatatgaatgcggttgtcgcccctgcaaggcgtgccatgttggcattctgtctagataattttgaagcacgcgttaagccacttttaccctcattgcgtaaaagcgttgttcataacgatatgaacggtgacaacgtgttggttaatcctcagaacactgacgaaatcgcggcaattcttgacttcggtgattcggttaatacagcaatagctattgatgctgcagtaggagcgacttaccagatgggaactggcgagcatcttctcgatggcgctctcgcctatcttcggggctacgtagctcaggtcccacttcaggaagaggagatcaacattatgttcgatctgttcctcatccgcatgtttgtccggattgtcatcaccgaatggcgggcccgtcaattcccggaaaatcgtgaatatattctgagaaacacctcaaccagttggtcacagctggaacagttgttatctcggccgtttgacgaaacccgttatctcattgaatcagcctgtaaggaataa

SEQ ID NO: 269593 - DNA, 1350 bp, Klebsiella pneumoniae
atgtcacagtcattttctcccactgcgggtatgcagaatggatttgatatcgcccgtttaaatgagcttaatacgcgcgagcgtgaaatcgtttcacgccgcgaatcactcctcggcccatcctacaagctgatgtatgaacaccccgttgagtttgttcgcggcgaaggggtattcctctatgacgcagaggataatgcctatctcgattgctacaataacgtgccgtcggtaggtcactgtaatcctgcagtcgtagatgctgtatcgcgtcagattgccacgctcaatacacatacacgttacatgagcgaaaatatcctgaattactctgagcagctactgagcacttttgagcctgagctagggcatgtcatgtacacctgcacaggaagtgaagccgttgatctttcactgcgcatcgccaagttttataccggtggcacgggtataatcgtgacggattatgcttaccacggtatcaccacaaccgtggctgcaatctctaccacgatgggtaaatacgttcctgttgaccagcatgtccgtacggtccgcgcccctgacgcctatcgggccggggaaggtgtagatgtagcacagcgactggctgatgatatcgaagcggcgatcgcagatatggaacggcatggcataaagttcgcgggcttcattgctgacagcattttctcaaccgatggtctgcttaccactccagcaggcttccttaaaaaagccattgacgtcgtacacaagtacggtggtgtatacattgcagatgaagtgcaaccgggattcgggcgtaccggctctcacatgtggggttatcagcgccacggtatcaatcctgacctcgtcgtcatgggcaaaccaatgggcaatggcctgccaattgcagctgtcgttgccaaaccacagctgctggcagattttggccttaaaatccgctatttcaatacctttgcgggtaacccggtctgcattgcagctgcacaggcagtactgaatgaaattcagaataaaaatttgctggagaactcacgccttctgggtgactacctgctgaacggcttccgtgtcattgctgaaaattatcctcagatcggtgatgcgcgtggcgcgggtctttaccacgcgattgagtttgtgaaagatcctgacacgaaagagcctgatacagaactgactcgtaaagttgtcagtgaactacgtgaacgccgtatccttatcagtacaacaggtaaaggtgaaaacagcctgaaaattcgtcccttgctgacgttcagtcaggataatgctgacctgctgcttaaccagttcgaagacaccctcaaagccgttatcggataa

SEQ ID NO: 269594 - DNA, 879 bp, Klebsiella pneumoniae
gtggcactccgtcattttttgatcgtcattctggttgttgcgatttgggcgtttaacgttgtggcgattaagctgggcgtgacggagctgcccccgctcttcatgacattgctgcgctttgttgtggttgcagctgtcgttgttcctttcgccagaatttcaagagagcaattcaagacactgttaatactggcgtttacatttgggtttatgcacttctctctgttatttgtgggtacgcgttataccgatgcgggtacagccgcaatcgtggttcagttaggtacgccattcgccatgatcatggctgccgttgtattgaaggaaaagttgagcttcattcaggtcatggggattgtgatttctttatcaggcgtattcttccttgctggcagcccttcatcagcctcgatgcttgcaataacattgttattgaccagtgcaactggctgggcacttacaaatattattgttaaatgttcagcgccgatacaccctctgacaatggcgggatggctttcctttttggcgatcccactggtggcgctggcatcgtctgtttttgaaacgggtcagtttcctgccatagagaatgccagctggcgcggctggtttggcgtattctacagtgcaattggttcatctattatcgcgtactcgttgtggtactggctgttaaaaaaatatcccgtgaataaagtcatgccatattcattgttaagccctgtattcgccattttcttcggcgctctgtttttaggtgatagcctaaatatatggaaaatgtcaggcgcaacgcttatcgttggtggaacctttcttgccttggttaacccactgagtatattcagacgttacagaggaagtttatttaattaa

SEQ ID NO: 269595 - DNA, 1362 bp, Klebsiella pneumoniae; identical to SEQ ID NO: 198118

SEQ ID NO: 269596 - DNA, 417 bp, Klebsiella pneumoniae; identical to SEQ ID NO: 198115

SEQ ID NO: 269597 - DNA, 1404 bp, Klebsiella pneumoniae; identical to SEQ ID NO: 198114

SEQ ID NO: 269598 - DNA, 963 bp, Klebsiella pneumoniae; identical to SEQ ID NO: 198113

SEQ ID NO: 269599 - DNA, 1194 bp, Klebsiella pneumoniae
atgcctgctcgccaagtatgtcagagttttttccgcgatgcgttagcaccgtttcacaaataccgacaaaatgctttgctggatgccaccattgccctcatcaatggcgcatcactgacgctgaccagtatcgggcgttatttacccggcacggctcaggtcaaaaataaaatcaaacgcgttgatcgactgctcggtaatgaatctcttcaccgcgatatcccactgattttcagaaatattattgccatgctgacgagccagctatctctttgtgtcattgctgttgactggagtggatatccatctcaggaataccacgtcctccgcgccagcctgctctgtgacggacgctcgcttcccctgttaagctggatagtcccgtcagaaaaacagcaaaactcgcagatacaaaaagccttcctggatgcccttgccggggctgtaaacaccagggccagagtcataatcgttaccgatgcgggcttccagaatgcctggttccggcatataaggtcgctcggatgggattttatcggtcgcgtcaggggaaatatccagatgcggctggacagcaaaggcgagtgctggttcaggcgtcaggaattacaggccagtagcaagcctgaatatctggggccgggtacacttgcccgttcggaatatgcccgctgtgatggtcatttttatctgcataaaaaagagccgaaaggccggaagaatcgccgctcccggtgccgcatagagcgtaaatcccaaatacaggacggacgttcttcggcaaaagaaccgtggcttatctttagcagtatgaatgactttaagccccgggaaataatgaagctgtacagccgtcgcatgcaaatcgagcagaacttccgggatgaaaaaagcgagcgcttcgggttcgctctgcgtgccagttacagtcgttccgagggaagaatgcttgtactgagcctgctggcgacgctgagcacaatagtcctgtggcttattggctatcacgctgaaaataaaggattacatctgagataccaggccaacagcattaaaacgcggcgtgtcatctcgtatctgacgttagcggagaatgtcttgcgacactccctgctaattttaaaacgaacggtgctgagcaccgttcttaatcacctcgccagaacctaccagaatatggtgttggtttattag

SEQ ID NO: 269600 - DNA, 402 bp, Klebsiella pneumoniae; identical to SEQ ID NO: 198111

SEQ ID NO: 269601 - DNA, 621 bp, Klebsiella pneumoniae; identical to SEQ ID NO: 198110

SEQ ID NO: 269602 - DNA, 126 bp, Klebsiella pneumoniae; identical to SEQ ID NO: 198109

SEQ ID NO: 269603 - DNA, 1176 bp, Klebsiella pneumoniae; identical to SEQ ID NO: 198108

SEQ ID NO: 269604 - DNA, 1200 bp, Klebsiella pneumoniae
atgagtggaattttgaatacacagaaaatgcttgctagcgggaagaaatcacgaactgaggctatttccatagccatcctctcattggcagcattcgttatcgtgaccacggaattcatcatcattgggctgatgcctactttggcaagagatttgaatatctctattccagtagctggccagttggtcacagcatttgctattactgtggtctttgccggcccgctgctaactgtattttttgctcgcattgagcgacgctctctgtttacctggatactggttgctttcgcattgagcaatatagcggttgcacttgcgccgaactactggactgtgcttattgcacgaatagttcctgcagcgcttttacccgtgttttggggtgtcggcagtgatgcggcaggtaaactggtcgccaaagaaaaagctggcaaagccatttctcaggtctattttggtgtcaccgcagctttgctattcggactgcctttgggcacggtactaggtgatgctgttgggtggcgtggggctttctgggtcttggctgtgttgtccctcgcaatggcaattcttttacacaaggtcatgccgaagctgtctcccggcccccaagagtccctgaaaagtcagattgccacgttggctaaccgctttttcatcgccaatctcctgctttcgctcggtgtgtttaccgccatgtttggtgcatatacctatctcgccgatatgttggaacgttcaggtggtattgcaccggctcaggtcggctggtggctgatgggcttcggaacggtgggcttgctgggaaattacctcgccggacgcctcgttgatgagcacgccgtcaaggcgaatatacttttttgtctcatgcttggcgcaggtgccgcgagtacagcactgtttgctgggcagccacaattgtttgttgcttccctcgtgatttggggtgtcgcgcatacagcgctgttcccgcttggacaaatacgcgtcatcaatgccgcccgcagtggcaaagcgttggctggcacgctgaatatctcagcgtgcaacagcggtattgctgccggcgcaatactcgggggctgggccatagatttcagcggaattacagccgccattcttgccgccagcgtcctcattgtactttgtgccttcgcaactccggcagttgagaggttgcgtcccgatgtatag

SEQ ID NO: 269605 - DNA, 759 bp, Klebsiella pneumoniae; identical to SEQ ID NO: 198106

SEQ ID NO: 269606 - DNA, 129 bp, Klebsiella pneumoniae; identical to SEQ ID NO: 198105

SEQ ID NO: 269607 - DNA, 183 bp, Klebsiella pneumoniae; identical to SEQ ID NO: 198104

SEQ ID NO: 269608 - DNA, 726 bp, Klebsiella pneumoniae
gtgcccgccacggcggtattcggttcacgtgggggactgaccggcgtactggccgaatgttttgaccgtaagggcgtagcgaccgcgttgcgtgcccgtcacacgtttgccactaccggtgaacgcagctatgccgaactgcgggccggcaatgcgctgatgggtgatgtggctgcctacagttccgctgaggcgctgagctaccgcctgttaggcgatgctggctgggagtcaataacgctttatgacggtgaaaaagaggtgtggcaccgggatttgcacgcagaactgggccgttctcagcgacagtttcgtgtacgtctgagtggcgcacgtatcaaagaccgctaccgtggggcgtactggacaggacatattgatgtcatcgggacgcccatcaatggcttctccctgactggcgctgacccccctgaacagacagtatggcgcgagagtcatacgcagattgggttgcggacggacaccaatggagacagcgacacggtgacagtcagcacgggtgggctgaatggggcaacggtacgcgtgcatctggaaatcagcagctacatcaaagtaggcgatccacttacgcctcaacctcattcatgggcacccgttttagatgctgagattgatggcaaaacccttctgttatcgggcaaagagacttttgctctggcgggcactgagctgctggtcgagatcgagttggtgacggaatag

SEQ ID NO: 269609 - DNA, 135 bp, Klebsiella pneumoniae; identical to SEQ ID NO: 198101

SEQ ID NO: 269610 - DNA, 522 bp, Klebsiella pneumoniae
atgaagtgtttctgggttttctcagttgctttaactctgtcgtttacagccgttgctgctgagaagaacgacaatgttacgaatgtaaaaccgtccaccggtagggacttatatcttacttgcaaaggttatcaggtgaagggttcatctgtaattaacatcgataaaccttcttaccttgaagggacaggtgagcaggttgaatttgcaatcattactcctagtggtacgtctgatggacttaaggttttttttgattcatggggtttttctccttttggattgattgaaagtcatgtgatgcaggatcactggtctttagtccatgtaggagggcgcgcttcagttaagggggacaagattgattattcatttgttgataaccagccacaggcgggagatggttatcaacccaaaactggggtgttcctgtacggctgcatgacctcggataaaaggccatcttgggtcgaaaaaatctactcaagaacaggcatgtttcgagggggcatagaaggctaa

SEQ ID NO: 269611 - DNA, 648 bp, Klebsiella pneumoniae
atgccgggtggcggctgtcgccttacccggcctacagggtcctctcacaggctcaaacctcgcaggcccgcgcaagcgcagcgccgccgggcaagatatcaggcacggtacctgtatcgccgggtggcggctacgccttgcccggcctacaggggcctctcacaggctcaaacctcgcaggcccgcgcaggcgcagcgccgccgggtaagatatcaggcacggtacctgtaatttcgccgggtggcggctgtcgccttacccggcctacagggtcctcttacaggctcaaacctcgcaggcctgcgcaagcgcagcgccgccgggcaagatatcaggcacggtacctgtatcgccgggtggcggctacgccttgcccggcctacaggggcctctcacaggctcaaacctcgcaggcccgcgcaggcgcagcgccgccgggtaagatatcaggcacggtacctgtaatttcgccgggtggcggctgtcgccttacccggcctacagggtcctcttacaggctcaaacctcgcaggcctgcgcaagcgcagcgccgccgggcaagatatcaggcacggtacctgtatcgccgggtggcggctacgccttatccggcctacagggtcctctcacaggctcataccccgtag

SEQ ID NO: 269612 - DNA, 375 bp, Klebsiella pneumoniae
  misc_feature (314)..(323): n is a, c, g, or t
atgagtaagcttaatataagggctgtaagaagttatcgtagtgataaatcagtcatattagatctttcgaagagaataaatttagtctatggccagaatggctctggtaaatcaacgatatctggttatttttataagtcagatgatgaagcttataaaaattgctcttttgaatgtaatgatgaatataagtttattgtctacaatagtcagtttgtggaggattcattttataataaatctgaacagccaggtatttttaccttgagtcaagaaaataaagaagtaatggaggcaatagaattaaataatgnnnnnnnnnngaaaaatagcaagtctgaagaaaaaattatcaagtataagttcagaacttga

SEQ ID NO: 269613 - DNA, 1221 bp, Klebsiella pneumoniae
atggaagatataaataatggcagcgcttacagaacattattcaactctttaagatactgcacagaaataacaccgccgtgtaaaatagaagacccagataatgacatcattcaagatttcaaagtaaaatgcgacagctatataaaaatattaaaaaaccatacatcagcgacaagcattgctaataatcattacaccactgacaaactagcaatgaagaagttacgcggttatataaatactatatatgatgttcgcgatactgttattgattgtcttgagtattttttatcaggcgatatacaagcggcgtacgatctctttgatgaaacatttaatagaacaagcaaaaaccagcatttgaaaaatatttgcattcatctgaatgatatttgtaatgattcagatcctctttacagagtaaggaagtccgaaaaatttttagaacaacgaaacgatctattccatataccatttaaactcaggcacttggtaaatgctcaacgttattcggtagcagggttgccttgcttatacctaggcacatccctatacatttgttggcaagaaatgggaaagcctgattttgacaagctatatatttcagcttttaaatctgagaaaaatggaaataatagattgatattaaacttcgcctcagagttgttgaattcatccctttccctcaaaaaagatgacattttcagaaagacttccgaggaaaatttaatatcttatctttgtttatggccactaattatcgcttgtaattatataaaaaaacaaccagacgcagcatttaatcaggaatacataatccccaacatattaatgcagtggattagtagaaaagaaaactctcctataattggtattgcgtaccgctctacaaaaattacatctattaagcatagcgatttagctattaatgtcgttatccctcctaaagccacatacaaacaaatgacaaatagctcgtactgtccgactttgagcaaaacctttacacttaccaaaccaatatcatggcaattacttaagacactagattatccattgataagtgatggcgaagctgaaagagcaattgaacatttgagaaaaagagatatacaaaatttccatgaagacctggtgagattttacccagttactgattttagaagacttgagaggaccattgatgagcttctaccgtacgaggctatagaaggagactag

SEQ ID NO: 269614 - DNA, 606 bp, Klebsiella pneumoniae
atgagtaacaacctgttaccaccgggggcgtctgcgctggaacgcaggctggcgcaggcatgttctggcatcagcgacttaaacgtgccgctgcgcgacctgtggaacccgtggaaatgcccggtaaagtttctgccgtatcttgcctgggctttctccgttgaccgatgggaggaaaactggtcggaaacagagaaacggcaggctgtcagcgacgctttctggatccatcaacgaaaaggcacggtcgccgcactacgccgcgtggtggaaacgcagggttttgcgtttgccattcaggaatggtttgacgtggatgaccggccaggcacgtttcatcttgaaattgacgtgaacgaaaccggggcaacggacaagtcgctgaatgagctggaacggctgattaatgagacgaaaccggtcagccggacggtatcaaaaatgaacattctgtcccggactgacgggccgacctccatcggtgcggcggtctgctgcggcgacattattacggtttatcccggccagtatcagcctgagtccggtgttacctataacgggcagattcattttgacagcaattactattttgtcggtgacgaatga

SEQ ID NO: 269615 - DNA, 2277 bp, Klebsiella pneumoniae
atgacaacactcagtgagcgcccgcaatgggaaagcgacatttaccagattaagcgcagtgacctggtggccggtggccgcgatggcattgccaataagcaggcgcagcagctggcgaaccgcactgcgtttctgaaaaaaagcgcgctgaaatcaggctatacgttccgtgatggtgccattctggagacagaaaacgacctgattaaatacggcgatgtgctgtatgcgtggaccggggcatttaataaagaggtgcctgccgggtcatcgccggaaagcaccggcggcatcggagaaggtgcctggaaacaggtcattgacagcaacctgcgccgggatattgcctcccgggatggtttcgggaatatcggcaagggaaactatgccgatattcgcacctacaccggagccgcaaccagctttctctgttatggcgtggcgtccgcatttgatggcgggcacggtgagtttgaacgcgctgacgacgacagcaccacgcctgacaacggcgtgaccgtcctggttgacgcccttaaccggcgctggttccggcgttttacgggtaatattcgcgcagagtggagtggtattcacgacctcagccagagttcgtcgccggtggacagctatattgaccgcctcctgatggcttctgccgtcggctcaccggacggttaccccaataaaattattgatttcggcaaaagccgccgtttccatgtttccaggcgattttatatccggggcggggtgtataaagcctctgccattgtcggtgtaccggacggggtcaaaaccggattcggcattatcgggcgctttgcctgtagcggaaatgcaggattcttctgtattcagatgattcagccttattttgatatcgaggtggacaacggcggttttacgccgctgaccgtgccgggtattgatgattatttcttccgtaccgaagcgatgatttccaatcctgaaattcacattaagggtaattactacccgggtacctgctggtatcagaccggctccaacgatatgagcgatgtccgggcgcaatggccggatatcaccaacagcatggtcggggtgcagaatctgaatgaaggtaccattcgcgtgaatacctgtggacgcgggtttgtgctgaagggcaccacctccggttttggtcacctgacctccatctgggaacaggcaaacgtccgtcgctcggtgatgcatacgatggccgacgtcggcatcgtgagctatgagaactacatcccggaaacgtcagaggaaggcagtggcctgttgcttcagagctgcggaacggtctcatttggtctgctggcgtccggtgccggtggcaagccgcagatacaggtgtttgattcacagacggtctctgttgccaatgcgctgtttattgccgggaaaaatgttgccggtgattccgttgccgggcagtgttgcctggaggtgtcaggctccctgatgcagattgcaaacctgcgtctggggaaagtcggcagcgccattcgggcgggctttggttcggtgctggacattggtgatatcaccgcctctggcctgtccgatattctgacgctgaccgaagacaccagcctgatgacctatcggggagccaataccggcggcggatatgaaacccgcgcgaccatcaagggcgggcggtgtcaccggcttaaccgttccggcttcggttttgcggcccgcgccccgatagtggtgatgccggaaatactgacgggtgcgctggttgtgaataatctccagtttaccgaatgcggcagcggctggaatgatgagtcagataaatacctgattgatataagaacagtcagccgcggtttttcgttccagtcctcattcagtcgttatcaggacaacaatacaaactatcccatcaggctcgggcatgttgagcagctgcgcggctggaacggcaatatttttaacgcggccaaaattcgctatgccgatggtgcggaaagtaccggatacggacgcgaggtcattattgctgacccggcctggggtatggggtcatggagctacacgcgctggcgaccggcaaaatttaaggggatagcagtgctgtcagcagacaccaatttcctgataacccgcaacggcgtcacggcatttaacgccaataaagcgggtaaccattattttgagattgacctgcattacggcgactacgtgaccatcagcgggaatgagtcactggtgacactaacccaacgctcctggagcatgacgacagaatag

SEQ ID NO: 269616 - DNA, 294 bp, Klebsiella pneumoniae
atgagtttcgtactgaccagaacgctggcaacccggaccatttatatgcagctgggtatttatgtggatgccggtgaaaaagaagtaacggtagcctatatcgccagggaaattatctccctgtcagcaggtgccgcggttgcggcctttgatgtggtgatacccgacactccgctgatttcggaagtggtgcatcagtttacgtattccgggcagggaaacccgctggaggaggcggaagcctcgctgcttgccagtctgtccgcacagaaaaatacagaggaggcggtatga

SEQ ID NO: 269617 - DNA, 1167 bp, Klebsiella pneumoniae
atgacggagaaagcctatcgcaccatcattaccacggcaggggcgatgaaactggctgaagcggccgtcagtggtgagccggtgggtatcaccatgatggcggtgggtgacggtaacggaagccagccggtccctgacccggaacagaccaggctggtcaatgaatgttaccgtgctcccctgaataaattggtggtggcagacagtgcggcgaacatcattgaagctgagatggtgatgcagccgcaggtcggcggctttacgctccgggaggcggcattattcgacgatgccggtatctgcatcgcggtagcgaacatgccgcccacctacaagccggagctggcagagggggcgggtcgttttaccacagtgagaatgtggctggccgtcagcagcacttcagatattcagctgattgccgaccctggcgtggtgcttgctaccatgcatgacgttctggaggccggaaacagcgtaaaggactactgtgatgatttgctctctgatcacgagaagtcgcgagaccaccctgatgcgacactggaggaaaagggattcacgaaactatccagccagacggacagtgacagcgaagcactggcggcgacaccaaaggcggttaaggccgcgattgccgaagcgattcgcggtgcgtgggagctggacaaccctgtcggtaccacgcgattttttaacaaaaatctgaaccctaatgaccagtggccgtggtcagtctgggtatataccggtgaaaaccgcactatccgcataggtaaatctgacggtaccaacgtgggacaaaccggcggcagcgataacgtcacacttcagcgggccaacctgcccgccgttcagattgatgtgagcggcgaaaccagcgaacaggggcagcaggagctgacgacatcgggcaacggaaggcaccggcacagggcaggagacggggcaccgggggatacctggcaggatgccacacacggaacggataaccagaaatatacggggtggaactataccgactatgcagaagaccatcagcatggcgtcacgatcccgccccacaaacacacgaccaccggcaaaaccgataacctcggtgaagggaaatcaatcagcgtggttgaagcccacacgctgctgatgtgctggagccgcgttgcctga

SEQ ID NO: 269618 - DNA, 1785 bp, Klebsiella pneumoniae
ttgaagaatgaagttgtgtgcaggtcggaaaggctatctaaatataataacataagatttacaattacattttatgtcgtagtttcattcactgttctttctggtatttattgggaacgtttttttgatgtgccctacaaatatctttttgtcagtccctctttctataattatgcatatcttaattggattggtagcgtctggggaagtatattaggtatacatggtaccatagccgctttatctataacatttatgagtatgtttgtaggccaagtatctacgtcatcagagtatggtttcgaatctatatccaaagagcttctgctaagaaaacataattttttaagttttagtattcactctgtatgtagccttttatgtggtgttttcttattgcttgtcggcagtggtttgttgggatatatgatttcaaccttcctttcattacacttcataatccagtatggggtcatgtattataagttatataatctcactgagaagcccgaaataattaaatcttttttgtttgatgcgatagaggatgtaggacataaatatgataatatcaacgaacaaggtttagctatagaaaatgcattccgtacaataatttttaaacatgaattctatagcacagaccgtagtggtgtttattgggatgagaaagctattatattaaatgtatttcctaatcagtcagctaaaatagtttcgggatttgattctgaatttttatctaaactctctgacaaaataatttcgatgaaatacaatactccaccaaaattatatttcttattctcttttctatctccattatctagcgcatcaataaaaattaccccgagttctggggaggaattattggagtcggatatttctgaaattacatctcttttaaaaaagtgttttgtttatagttcagtaccttctgtatataatgaattcaagaaattcgaagaagcattagtaaataatgttagaaatagtttgttgtttaatgatgaatggtcactgagttttggtgtaaaagcgttcaataaactcacatcaagtgataactatattttaactttgaaaaatatcgacctctcaattacttcatccagtaaaaaggatattgttgaaatatcagtcttggctagctttttagataaaatgactgcggaagctttaaatcaacgtgatataaataaagctgctgatattctgcggtcattgatggatcttgcgcaatatatttactctaaagaaaattataataaattttatgaggttattttccatcattttgaatatatggttaagtatcaagcggaggaatcaaattatgcatatgttgacctgtatatatcccttgttattcgtcattttgtttatggtaaccacgctgcatttaaaattgatacgaatttcataacaaccaaattaagatacttggatttatataaccagaacgaaaatgattgtttgaatgaattacaaagaaaaatgctacgttgtttatttgagattatcactttgctgattatgagaatagaatatgtagataaaaataaaaaagataatgaggatgagttaggaaaccttcggtttttattgaagagttgggtgaatgctgaattcttagaagagttatattttaagaaagagctctatgacctcttgtttacgatcccaaatgattattcggtttttgatgcacaaaataagttgcgtgaaattcctgagggtgaagcaacttggcgttcaatttctagcgatacttggctttgttga

SEQ ID NO: 269619 - DNA, 996 bp, Klebsiella pneumoniae
atgctaacgcagagttctttcaataataataatctcaatgttgtttttattagggatgataatgatttctatgaggttacgaaattaagtacgcataaaattaaggacgtaattaattatttgaaaggagatggttttttaaatcttattaatgttgtttcggaaggtgaggatgtaataaataacagagctcaaatcatatcaaaattagaatcaatattgtcatcgatgaatgcatcaatattaaatgaagtgattgcttcagagttagcacccgagttggttggtaaatatattcaagaggttcgtctttcagttgaaaagttaattggacttgtcatccccttggataagcttgaaataactaaagaattgcttggggttgaagctaatttattggtttataagagagaagttatcccttctgtggataatagcgcctatatgatggactcacataatcatagtaattggttggcttattattgggtaagggaaaatattgatagcattcgtgacaatcctcatgacatagtgggaattgattctttacaagatttgaaaacagacaaattaataactatagaatataaggttgaaagtgggttgaatgtttataaatatactaagggattgaaagttaatgataaggaagggtatttgggtttaaatgggtcaggtatgtattatattgacttgttggataattttgagtttaaaagagaggccgatattttatcgattagtatcgggaaaatagatgaagacaacttaagaaaggcaaaagaactcttgggtgatggagatgaaaatcctttactatatgcaatgatgagcgtgctattcaaaatattggcaaaccctaagggaatatttaaattatattatctttctgaggataaatgcaggtttttaaatcaaaaagaagagagggaaatggagcagttattaaaggctagccgtgtagacagtatcgataacagcagcatgtcttaa

SEQ ID NO: 269620 - DNA, 1323 bp, Klebsiella pneumoniae
atggaaaaaaaatatcaggtatttttgagctccacctatacagatttggtggaagaaagggaaagcatcatcaaagccgtcctagaattgtatcatatcccgattggcatggaaatgttcagcgcagaagatgaagatcaatgggaaataataagaagaactatagaagtaagtgattattacatcttagtgttagggttaagatatggctcaaaaacgtccgacgggataagtttcacccataaagaatataattatgccttagagaaaaaaatccctattcttgcattcttaatgaaagacagtgtggctttatctggagataaacgagatgatgatctcactgacattaaaaaattccgcgacattgttctaaaaaattctaaaatgtcacagttttgggacacaaaagaccaattaataaaaaatgtttcagtttctttaatgaagcagattatgcaaaagccggggataggctggatacgcggagacaatactgttgttagtgagtctctatccaacgagttatcagttctaagcaaagagaatagagaattaagagaaaaaatcacgttacttgagtcaaagatagaaataaaaaaaccagatattaagttgtacattaatcatccatctgttgatgaaaaattcaattcatttgcaaaggttagtatgcctgaagcgttaaatataaattacatcgaaccacacctccttgaatttattacagagggtgatatcgagttgtataatagccgcatccctagtgaatctgagcttgaacagtttaacattgaaggcgaaaaatactacaaaatagaaaactattctaccgcgttaagaattgaaatttccaatgaaggaaccgctaaagcaaataatatatttatagatttaacctttcctccagaaatcctcatatataaaattgatgaaaagccggaagaacctaaatctccagtcccttccaatccgctaaccgacgcgcaagaatgttatcagaaaaaacaggacgatttgaattcctcggaattacgttctatttatgattcattatatttgaacggtttgatcgcaacgaataatttcaaagatgccaattttttcaaagttcccaaactggctaatgcttcattttatactttgctggatggcaacactataacaattaaaatagatagcttaattcatacaaggttaataacatttagtgatgagtacatgattgtgcctttgaatacgggaaagcacattgttaaagctgatattatctgtgaagaatatactcagcttgagaatgtgacgattgaactgcaagtctag

SEQ ID NO: 269621 - DNA, 900 bp, Klebsiella pneumoniae
atgattgatgcgcttattagaaacttacagagtgatattgcactacttcaactttatatcgcacaacgcaaaaaggctggttttcacgacatggaaagaatgattgagtcattgaccatctttatgtttcgcgcactacgaatgggagaaatgaaaaatatgaatcagattaaagtaaattttcccgctattgatctagctgacagccaaaatatgatagctgttcaggttaccacaaatgcaagcccagcaaaaataaaggaaaccatctcggcctttgaaaaaaagaatgaatttggagtgagtctaaaagataaattctctgttttatatatttttggtttttgtaacgcatcaaaataccaagctcccaaatattgtaaaatagttgaccctagcttttttataaatgaactatgtgataaagcagatgaagatatgattcaggatatgcttgatgctatccgacgccataaagattatacttcgctacacccttggagtgataaagattctcttgaaataatactcaacattattaatcgcaatgcaattaaacatcaaatgcgttatgaaggcagtatatctgacatgcttaccggcttaaaagaaattaatgaattaataacaaaaggaacaatccaacgtaagcaacgatcaaaatcgatctctgacttcaaagatcaaaacataattaattttttgagagatgtaatggatgatctgtctgtcattcaagcaatagtaaataaatcaaaagatgaacatcatgacattgtttacattagccacgaagatatgaccatcattgataaattaaaagctaaaatagcagatgactcatccaaaattgctagtctgaataatatcaaattaaaactaagtgttgtgaggttataa

SEQ ID NO: 269622 - DNA, 2190 bp, Klebsiella pneumoniae
ttgccatactcttcagatgtagatgccctgggagggtttgcaaaaactgatatcgtagaagctttacaaactaaaggggatgaagaagttagattaggtgaagtcatactaaaacaaagtgcactcaatgaaattcgcttacataaacttagttttaaagccaaacatttagaagatggcgaacaagttttctttagaaccaaagcagataaagcttcatatattaagagaaaaacagcacttcaaagaatattagatcgtgaaagtgttataagtaatttatctcagtattttgatcctgactgtaatattgatgctactcaatataatattgaagttacagatacggatttttcacgatacgatcgacaagatgatcatggaaataatataatccttaatcagcaacagcgtaatgctttttcaaaattactaaacaatggcccattatccttactacaaggacctcctggaactggaaaaacagagttcattgctgcttttgttcattatcttattgaaaagcagaaatccaaaagtatcttattagttagccaatcacacgaagcagttaatactgctgctgaacggatcagaaagcactgtatacgcttagggacacctttaaatattgtgaggtttagcaatcgcgaaggggctgtatcaacaggacttaaagatgtttactcaaatgctataattgcagaaaaaagagaactttttagagcagagtttaaatatcgagtagaattcttagcccaagcattaggattacagcctgagttcatttcctctatagttgaagctgaactttttctatttaaacaaatcgaaaatttgagtaagtgctttgatgctatacaaaatcaagagctagaaaaagacgagcaacaccagttgaaattgaatattgcatctcttgatgcgagtatacgaaaatccttatctcaagtttattttctagattacccagcagataaagatataagaatggcgaaacgtgaagtcattaatcatttatgctcacgatactcagttcgccctgatgaggcaagaaaagcgactgctttggctactgtatcacgtgacatgatagatgttttagaaacagaacgtgtaaattatgaagaattttttgcgcgctcaaggcaattagtcaccgggacatgtgtaggtatcggacaaaaacatttaggcatagctgaaaatcaatatgattgggtaataatagatgaagctgctcgctctattgcaagtgaattagctatagctatgcaatcaggaaaacgggtgcttttagtcggtgaccataaacaattacctccattgtattctgatgctcataaaagagctcttgctttaaaattaggtattgcagacaaggatgttgacttagatgctattttacagagtgattttgcgagaggctttgaatccccgtatggaattcaagcaggagcatctctgctaactcaatatcgtatggcccctcagattggtaatattgtttctgcaactttctataacggcgagcttgaaaatggggctcgttcaatccccgatatttataacgatgttccagcagcattacagagtattgttacttggattgatacctctaagttggggaagaaatgctatcacagcgaagataaaggtatcagtatctacaatcgtactgaagccgatatcatcatcaaattactaaaaaatatatcctgcaaaccagatttcattaactccttaaaggacatagtaaaaaaagatgaggctgcaataggtgtaatttgtatgtatggtgaacaaaaaagaattataaggcaaaaatttaatgagattgattggaatgatgatttcaaatcattggtgaaaattgatactgttgatagttatcaaggtaaagagaatagaatcataattctttctgtaacacgttctagttctgataaaaagcctaaatttttaaaaaaccccaatagaataaacgttgcaatatctcgagctatggatcgattaataatcgtgggttcaacacatatgtggacaggtgctaataaagatctcccactaggaaaagttcttagctttatatcagatcgttcatctgaagataagcaaaacttatatgagaaatcacaaaattatcgaatagttggtatcgagaaaaatcttgaagaggtatcaaaatga

SEQ ID NO: 269623 - DNA, 564 bp, Klebsiella pneumoniae; identical to SEQ ID NO: 193017

SEQ ID NO: 269624 - DNA, 552 bp, Klebsiella pneumoniae
atgccggacctgctgcttcagttttgtaggccgggtaaggcgccagccgccacccggcataaagcggctccgtgcccggcggcgctgcgcttgccggggctgctgcttcggttttgtaggccgggtaaggcgccagccgccacccggcataaagcggctccgtgcccggcggcgctgcgcatgccggggctgctgcttcggttttgtaggccgggtaaggcgccagccgccacccggcataaagcggctccgtgcccggcggcgctgcgcttgccggggctgctgcttcggttttgtaggccgggtaaggcgccagccgccacccggcataaagcggctccgtgcccggcggcgctgcgcttgccggggctgctgcttcggttttgtaggccgggtaaggcgccagccgccacccggcataaagcggctccgtgcccggcggcgctgcgcttgccggggctgctgcttcggttttgtaggccgggtaaggcaccagccgccacccggcaacaacatgccagcaatgtgaggccgctttcgcggcctttttag

SEQ ID NO: 269625 - DNA, 1917 bp, Klebsiella pneumoniae
atgaaacacagtgagttttacgagtatctagatggcgaattagaagctatcatctcaagtgaggtttattcgcagtattttttaaaacataaacataatgaacaaaaaaagtctgtggcttttttaatttggtttcttaaaacttacgcagatacagggaatgttgaggaatatatcactgatggtcatgatgatttttcatgtgatataattcttgagaagaaagatagtcagaaagtgaatagtttttatattgttcagtcaaaatggaacaccaaaaaaaattgcaattcagaattcgatggtaaagagctaaagtcttttttaagtgatatacagagtgtcctgaaaggtgagaaaagcaaaggggctaatgagaagtttaatgctcaatatgataagttaagggaacacataagaaaaaatgggcgagttaaaattatatatttatctttgaagaataattgtgatacttcgaatgataacattaagtcattaaaagatgttatgagcggtgatatagatgttgaaggttttgatatcaacaggcttaaaatagattacatcaaccgagaatataaaaaaagcatccctcctaatcctttggataacatatatgatccaagccttgaaagaatcatgatgcatgtgtgtcgtgatggaggtaataattgtgttgagattaaagttccatttaatgcatacgtttttgtagttagaccaaagttaatatttgaattggttaataagtatggcgtctcattatttgagaaaaacgtacgaaatccaattacaagttcaagtatcaatgatgagataaaaaataccatccaaaaaaacccagcttatttctggtattacaataacggtataactgcaattactcgtaggatacctaaaattagtaatgaagcggaaatgtttgaaattactgggcttcaaattattaatggtgctcaaactgcatattctatttatagtgcctataaagaatgtagcgaagaacaaaaaagtattttggatgaagaggttaagatcacatttagattgctgaagtccggtggtgatgaatttgatctcaaagtaacaaaatacactaactctcaaaatccggtcaatgatcgtgatttctggtccaatgatcctatacaacaaaaattacaggattatttctttagcacatcattttggtatgaaaaaagagaaggtgagttcagagaggttcctgagaatgtggaaaaaatagcaaacttttattttgcatcgtcttatctagcattctgtcttaatggagctgtagatgttatgaactcttcatttactttacgcgatagcgatgttgatcttattttcacctctcggatagataataaagatggtctttatgagaaaatatttaacaacaatattgaacctaaggatttccatgcttcatttataatgttagatcaggtttctcaactccccatattgaaaaaactaaaccccagccatttacgtttttcaaattgcttccatctattagcgatcgctagggtccttttggaaaaatacttgaaggctaaatatggtcccgaagcgcaagttattccatttgtaatgaaagaggcaggggagtatacctgtagaactcaaattgatatacttatgaaagttgtcgtatatgctctggatgagtttttcaatgaacttgaagcaaaagatgaggaagagcaatcagagcatttacttaatctaatgtcaaagcctgtctactttgagatgtttatcgaaaggattaaggctaaagaaatatcagtggaagatattgagtcagttgatgtttctaaacttgagtctgaaatagaagagctagataatctttcagacgcaaaatacgaagatgacaattctgatgaagaaagtatagttcactaa

SEQ ID NO: 269626 - DNA, 1188 bp, Klebsiella pneumoniae
atggcgcgcattacacgccccctcactaacaacgaaattcttaaagctaaacctcgagacaaagactataccctccatgatggtaatggacttttcttactggtcaaaaatactgggaaaaagctctggcgctttcgctaccaacgtccggccagtggtagcagaaccaatttaagtctcggctcatatcctgcccttacgctcgcagatgctcgtcagatacgcgatcaacatttatctactctcgttcaaggtttggaccctcaacaccaagtagagcaagcattagaaaaacgtcagattgaattagacagtattttcttaactgtggcttctaactggtttaaaattaaaagcaaaagcgtcacggaagattatgcaaaagatatatggcgttcattagttaaagacgttttccccactattggtgaggtacctgttcaggagattaaagccagaacgattattgaagccctaacccctataaaagcacgtggagcgttggaaacagtccgccgcttggtacagcgtatcaatgagataatgatttatgcaattaacaccggtctgatcgaaaccaaccctgcatcaggtgtaggcatggcattcgagaaacctaaaaagcaacacatgccaacgctgcggccagaagagttaccaaaattgatgaagactttgtctatgtcaaacctttccattccgactcggtgcttgatcgaatggcaattactgactcttgtaagaccctctgaggcttctggatctagatggatagaaatcgattttgaaaaaaaggtctggacaatacctggcgaaagaatgaaggccaagcgtgagcatattgttcccttatcatgtcaagctttagaaattcttgagataatgaaacccataagtgcaaatcgagaatatatttttcctagcaggtctgatccccaaaaacctatgaatagtcaaacagccaacgcagcattaaaacgtataggttatggtggaaaattggttgcacatggattacgttcaatcgcgagtacttcaatgaatgaagaaggatttaatgcagatgtgattgaatcagcattagcccattctgaaaaaaacgaagtgagaaaagcttataaccactccatatatttagaagccagaaaaaccttaatggaatggtggggagatagagttaaatcttaa

SEQ ID NO: 269627 - DNA, 240 bp, Klebsiella pneumoniae
atgagcgaccatcaaaatcaagatgcaaaacgtcacgctccgcgtcgtggtcttgcatcgttcgtagcagttcttgaggatgtacgaagggagcacgaacgtggcgtgccattgacgtggatttttgagacgttcgaggatcggctcgatattggatacacccagttcacgaaatacgtcacacggtacatcaagcagagccagccagttgtggcgtcttataagcctcgcaaaagctga

SEQ ID NO: 269628 - DNA, 789 bp, Klebsiella pneumoniae
gtggctcccggagccacaggcaagagcttctgggcgctggaagccgcaatggccatcgcgtgcagcgttgccggtggcgatcttgtagggcttgcccccgcgtgcgctggccgtgtggtctatttcgctggggaagacccagaagtcgcactggagcgccgtatccatgccatcggtcagcacctgaatcagcaggcacgtgaagccatcgcggagaacctcacccttgagccgatcatgggtaagcgcttgaacgtgatggatgagcggcaccttgtccgcgtcattgaattttgcgccggtgcccggttgatcgtactggataccctgagccggattcacgatcgggacgagaatagcaacggcgacatggcacgacttgtcgccacgctggagtacgtcgcggtaagcactggggcgtccgtcctgtacctgcatcatgtcagcaagggcagcgcccgcgatgggcagacggatcaacagcaggcagcacgaggagcatccgccttaatcgacaatgcccgctggtgcggcttcgtcgctaagatgaccgcggacgaggccaagagcctcagcgaccgcgcctatgaccgtcagcccatcggcaacgaacgaagaggcttttttgttcgctttggtgttagcaaacagaactacgacgccaccccgctcgatcaatggtacaagcgccacgacggcggcgtccttgtgccagtggaactcttagcgacgacgaagaaggagagcactctgcacatcgtcaatggaggcgacgatgagcggtggtaa

SEQ ID NO: 269629 - DNA, 492 bp, Klebsiella pneumoniae; identical to SEQ ID NO: 236923

SEQ ID NO: 269630 - DNA, 348 bp, Klebsiella pneumoniae; identical to SEQ ID NO: 182324

SEQ ID NO: 269631 - DNA, 759 bp, Klebsiella pneumoniae
atggctggcccttttaagttcgacttttttacaaaaaactccattccggactggtgttgtcctgcatgcggaaggccaactcttgaacttattcctgatagtttccatgcaaaacgtacctcttatgcccagcatcagtatgaggccgacgagggattctgtcctgaagacgatgaggatgtattcagttgtctcttgaggtgtagtcaaagaaactgccttcagccggtatcagtttctggagacggatatcacgatcgagagtatgagaactcttataatggtgagtttaactatattgcaatttaccgcccgaggtacttttatccaccactgtctcttttcacaccttgtgagagttaccctgaacagattaaatcccagctaaaagaaatctcatcacacttgccgggccatcgtcaggccgcgattaacgcgctacgaactacgctagaaagcgttctcgaccattttggaatacctcgagaacagcaaagtcgctatctaagtctagataagcgcatctcactaattcctgagccttataggtatattgaagccggattcagagcgatgaaatggctcggcaatacaggcagccataacctcaaagagatatcagatgaagatattgaaggagcatgcgtgatgctcgatgattttcttcttcaaatttttcgtcaaccaactgatcatagtgaaacaattgcccggctaaccaaaaaccatgctccaaaaatgagagatacagagcagtaa

SEQ ID NO: 269632 - DNA, 543 bp, Klebsiella pneumoniae; identical to SEQ ID NO: 247745

SEQ ID NO: 269633 - DNA, 309 bp, Klebsiella pneumoniae
atgattgtaagctacaagactaaaagcggcgtttttctcgcgagtgcgtatatcactttgtcaacgctcctggtgcactctcactttgtaaaagtgtcatccgctcttgatgagggggaggatgtcgaaattaaaaacaatgacatagagtgtcattttgatgtttacgccagttatgaggcatatgaaacaggactacccccagttgaatcgcttgatagagtttatccgtacgatgaagcaagaccagcaaaagaacaagcggcaggaatgcttttggctgaattgtcacaacataccgcatattag

SEQ ID NO: 269634 - DNA, 1842 bp, Klebsiella pneumoniae
atgtaccatctcgacaacgtcagcggcgtcccggagatgccggaaccgaaagacactcagtctatttcgccacgctggtttggggaaagccaggagcaaggcgggataagctggccgggggcggactggttcaatattatccaggcagaattgctgagtgtattaaaagagtcggggttatcacccgataaactctcatacaatcagttatcacaatcaataaagtcccaggcaaaaaaagccgctaatgatgcggtgaaatggttctctattgatgattttggcgcagttcccgacatggatgtggcaagtaaaacagttattactgattcagccgaagcgattaaacttgctcagcaggctgctgaaaaagtcaatggtcgcatttatgttccccgctgcccgaagggaaaagcgtattatagtagtaaaggatttacgttacgtgaggcacctcaggatccgtcagaaatcgctcatggctgggcgggagtgtcgctatatggtgatggaaaatattcctcccgaatttacttcgacacagatgactggtgggtagacatctcaggctcctcaggctggccaagtaacatcgcattagacaagatatccctttatccttatacagatttcaagggaaaagcacttcgaattaatggggtatgcgtcattccagttggcgaagttgctgtctatcgtgcagggattggcctgcaattctctaatgctcaaaagccgggtattttcacagaatttagtacctgtcgggatttgtggatcgaagactgcactataaatatcgatttttcacgggatggtggtgatgcgtcatttcatggtgtaagacttgatggagtaacgtccaatagtcggccgggtcagacagcaatacacatcgggccgggctgtaacgtttataactctgtctggtatggccacttcttcgctgacacgcccgatgccagtaaaggtgagcaacccgtcttgtggattcataacgaaggatccagaaatggttttgatcttcttttttttgaagggccaggagcagtaaaaaacgaaggcggttgggtcaccaaaggaatgtggcgggtagagaatagcacggggctcattaccgattattcgacaacaccattttgtgttgataactacatgacaccagttcaaccagaacattcagcttttcagtcattaggaaatatcaaattttcagcgttaaatacgccgacacaccctgagccgtggcgagggctgataaggtacagggcacagaacaccgaggggataggttttatcggtactgaagttggtaattttgattaccaggggtttctgatgatgagcctgccatatggacaaaccatgagtaaggcaaatcctcgctggctgcatcattacaatggattatcacactggcgacctgaataccgacttgagtacatggggcaggcaccgcaacttgttatcagatcatcaggcttttcatctggcaggaaaggaaaaagaacgactggaacaattaaagggaatccttcacctcaaacgattactacatcaggctttcattttcctgagtccggcacgcctgcacatgtgatgattaagttgttcaccgtaactcaggatgtttattactccgcactttgggttggagcgtcaaatcctgttggagaatcgtcaatgaagctgatccatgaaactgtagatgttgatttaaatggggatttaacgcagccagccagcatcaaggttaatacatcaggagacattgtattcacactgacagctaaaaaggacatgacatacgtaattggcattgatggtgttaacgttttctga

SEQ ID NO: 269635 - DNA, 330 bp, Klebsiella pneumoniae
atggcatcagagaacgggattaaattggtatctacattagtttttcctgatatcactcagatgagatacgaaatatttcagggcaccaaaacatcaactatgtgggggtttcatgtatatatgctcaaaagtgtggatgtttataagagcgacctccctgtaagcatgaaaagaacaggtgcgaccattacacataaagctcaaacatgggtattcatcaaaggcgtgtcttgtgaaaatgtcacaacactgattcaggctgaggaattcgtcgaagattatcatgagaaaaatagattgatgctgtcgagttattttaacgccctctaa

SEQ ID NO: 269636 - DNA, 2484 bp, Klebsiella pneumoniae
atgtctggttttttccttgatttaacaaaactttcttcgggtgtaaatagtgacacagcaatcccaccccgtgatatattcacagcactcccaagcaaagatgcaaaatttcaatacccccgagacgtacagtctgaagtttgggaaaaatggtatgatgcaagaaaaaatcaaaccaatgtaataaagatgaataccggaagcggtaaaacatcagtcgggttaataatattaaaaagctgtataaatgaaggggaagggccagctgtatatgcggtccctgacaactatctggttgaacaagtcatattggaagctagtcaactcggaataccagtaacccaagacgagagatcccccaaattcattgcaggcaaagagattttagtcacaaacatttttaagctggttaatggacgttctgtatttggcgttggagatgaaggaccaaaaatcccaataggcgccataataatagatgatgctcacgcctgtctttcatcaatcgaagaccaattctctatcaacatacagcgaaacaatcccgcctacgataggcttttcagaatatttgaaaactcgttactgacacaagctagtgcaaagacacttgaaataaaatcaggcgatagaaacgcatatgtaagagttccattttggaaatggcaagaaagcataaatgaaataacaaaaatattattagaaaacaaagatcatgatgatttaagcttcaaatggccattaataaaggaaaatataattttatcaaaatgcgtcgttagcgcatcaaaaattgaaatatcacctcactgcatacctattcaaatgataccgagcctatcaaatgcgagaagaaaaatattcatgacagctacgctggtcgatgagtcaatccttgctagtcacttcggtataacagatgaatcactatcaaatcccataacaccaaaaactattggcgacattggcgatagaatgattctcatgcctcaagttattaaccctagtttatccgatgtagacatcaaagctatgtgtaaggagatatcgtccaaacataatgttgttgtaattgtaccctctgactacagagctgggttttggcaagatgttgcagatagagtattagataaaactacaatttaccgcggtgtacaggaactgagatcgcaacatgttggtttagttgtcctcgttaatagatatgacggtatcgatttacccaatactgcatgccgcttacttgtaatagatgggcttcctgacgttcgcagactcgtagataaagtcacgcaaagtctgttattaggaagtgaaaaaaccaaggatgagatcattcagaaaattgagcagggaatgggccgtggggtacgctcaagtgacgacttctgcggtgtggttttactaggaaaggcattaaatggtgccgttttccttggttcttcgttggataaattttctccagcaacaaaagcacaaattcaactctctcagcagttggtatcaatattgcccgatactacaattgattcaattaaaggtgctctcgattattgcttattacgaaagccggaatgggcatccatgagcaaaggtgtattagcaggtttgacgttagaaaaaaaccagattgaccagcacataataaacaaaagattagcatacgacttagcgtcgagaaatatgatgcagcaagcagcgtctacgttaataaatgacagcaacacagcagataaaatttacagaggttatttaaaggaacatgcagcagaatatgtaaacctctacgacaagtcggaagctcaagtagtactacagtctgcatcaggtgacaattaccgcgttttaaaacccctaattggtgtaacctataatagactcaatggcgcggcattagaacaagccaaagaatgcagcacctatctcaggggtaactttaaagcagcaaatcaggtcgttgtgtatactaattcagtattagagaatcttattttctcagagggtacatctaacccatttgaagatgctattgataaagtggcaaatttgatcggattccgtagtcaacgaccagaaaacgatacaggaaaaggaccagacaacttatgggcaatgggcgaaaacaattacctagtaattgagtgcaaaaatggcgcatccgcagaaagaataagtaagcacgactgcaatcagttaaatggctcaggtgcatggttcagaagcatgtatgatcaaacagccactttcactcctgtgatgatacatcactctaatatgcctgaatatgctgcaactttaaatgatggctctcgtataatgacaatcaaagaccttgataactttaaagcatctattcttaactttatcacagctatttgtacaagtgacaaattgcacgacgagatatttataagggaacgactaatttcatgtaaattacgcgcatcagatatagtcgatacctacacaagaagatttcgataa

SEQ ID NO: 269637 - DNA, 1128 bp, Klebsiella pneumoniae
atgtccatgacattttatggcgagcggttaaggctcgcacgtttactaaaaggttataccctacaagaattgggggatgccgttgcggttacaagacaaagcatccaccagtatgagagtgatgccagagcacctgcatatgatatacgcaatgctttggcagagctcttgcaggtatcgcctaaattttttgaatatcctctggctggtgatgtaaaaccagaacagtgccattttcgtaaacgccagacaacacctgctggtgtgaaggaaagggtgcaatcgtatagtactattcttgaacaattagtatctgaattatatgagcacttagacttacctgagaaccgttttaatctaattgataatgagaagatccctgaactcactgctcctattattgaaaagattgcagagggtgctcgagttcgctgggggttaacagatgatgcccctatagacaatatggttaatgttgttgaaaaccaaggagcaatagttacgacttttgatggggtttcagataaagttgacgctctttctattaacaggaaataccctattatcattcgtaatactgctaaagaaagcgtttgtagaatgcgttttgatattgcacatgaatgtggtcatctaatcatgcatgatggcattgaaactggttgtaaaaaaacagaaagagaagctgatgcttttgctagtgcatttttatttccacgtaaatcttttgcccgagaatttcctgcttgtataacatcaagaggaacaattgattggaaaaaagtatacaacctaaaattaagatggaaaatgagtgcaagagcgataatatatcgtgctcacttcttaggatttattaatgctcagcagtacagaagtgccaatgtttggtttagccagactagacaaactaaaaaagaaaaatatgatgattccatcccaatggaagaacctcatatactacaagagagtttattggttttaaaagaacagttgggtatttcattcgaaatgcttgcagataaactgtgtgtaaaacctcatttgttagcagatatatgtggtatcgagtatactccgcctaaacaagataattacgaaaatgtagtggtcccgtttaaattttaa

SEQ ID NO: 269638 - DNA, 714 bp, Klebsiella pneumoniae
atggaaattaactcctttacagaatttcatggtgtttttggtgaatataggaaaaataatcaatggatgttccgtggtcaagctaatcattcatgggaagtaaagcctaaggcaggaaggcatccttatcttgaaaaggatgatttagaatatcttgagggttggaaaaggaaagcgtctgaatacattaaagctaagccgcaaaatgattgggaatggatggctattgcacaacatcatggattaccaacgcgattgctagattggtcttataatcctttagtagctgctttttttgcgtgtctctctgaacctgaggaagatgccgctatttactgcttatccccacattgggagattatccctgataaagcgaaaccgggtaagcatagtaatatcgctagatataaacctactatggttgcatctagaattggtttgcaaagtgggttatttacagcccatccaaaccctgatgaagatatttcaaaaggtttaagtaaagaagataaatttgaaaaacatattatcaagtcatcttataagaaacagatgctctttgagctcaatcattatggtattaatagattgacattaatgggggatcttgatggattgtcatcacacatgtgttggattctagaaaaccgacgttattgggttgatcatgatgagtttttaagtgagttatcaggaaaaaaacctgttaagtga

SEQ ID NO: 269639 - DNA, 876 bp, Klebsiella pneumoniae
atgaatgctcatagaatatatatgccacccccctcgaattggcaggattttcaaacgttagtgggtgacgttgccagattgaaatatgttccagagtcagttcaagagtatggaaggcaaggtcaaaaacaaaatggagtagatgttattgcagagagtataaatggagatataattggctttcaatgcaaagagacaaagaaaggcactattactaaagaggttgttgactgtgagattgaaaaagctaaaaacttcgcgcctaatttatctgtgttctttatagttacaacttcccctagagatgtacatttgcaagattactgtaataaattaaataaaaatggtggtcttgggtttaaagtttatatgaagttttgggatgatatgattgacgatattaatcgttctagatcattacttgtatcatcttataagtattacctcgaggaattcggaacgcgggaaaaagaagcccatctgtatgcaatagctcaagcctttaatcggccagcatttacagatgattttttgcatgaaagaaatatatctgacttcgagtctgcattggttgataccaaggctttgctaagaacaggatatttatatgatcgctttggtaaaaatttagtattgcaaaccattccctcatcgacaatcggttgcatagaatataagacatttatcgatgaggttgataaaaacattgaggtaatttatcaggctgtattaaaggataaaaagttgctacagaaaaacccccgacaatttgatgagcgcgctggggagtataatataaaaaggagaaggcttatgcgtaagataaatgaaatcttaaatgataacaatatacaaaaaatagattgtcattattga

SEQ ID NO: 269640 - DNA, 1554 bp, Klebsiella pneumoniae
atggacgaccataatattccactaatctatcttttaaacactgatgtagattctgacaaagcacttcaagcatctggctttaatgcacacagatataaactgaatggttatgttgtacaggaacagtcttatcaagctaaatcaattgcttatcagcataaaattcctgataacattcacgaagctgagattatagttatcgatactacgctgagtaactttagccatggggcaggaagaacgtcgtcagttcgtgtgtattttgaacatacaccttcttatgttgacttgcttcctattgatatgtccgtaatcagcaatggaattttttctactaaaaaaaaacaagcagttgttgttttttgcagtagtaatactgacatgatttatgcaatggaaaatggtcctgtcaggaatcctcaacaaattagatatagaacctacaattttaatgatagttaccttggtgttactgatagaacaggtaatcgttttaagaagccagataatgtgattgctaaagatttaacggacttgatatttaaatactcacgcggcagtggttataatattgtttttaatggggttaatgagcgggatataattttagctgaaaatgaaagtggagagattatatcttttataagagcaataaaagaaaaaatctttatctttttaccagtaataaaaaccaatgagattgaagagctgaaatccgagtacgaaaaaaataatttaaaactacaaaaagagctaattgatttatctagcaaagaagagaatgtaaaaacaaaagctttgcttactgcgactgatgatgagcttgtattttcggtaaagtggttccttgattatattggttttgaaaacgtagttgttccggatgaaaatgttgatgaagaaaatggtgaggtttttgaagaggatttaaatatagaaacacctaaaataacatacctttttgaagtgaaaggaattggcggaacttcatctgatgatcagtgtgctcagatttcaaagatagtttatcgtcgtgaagaggctaatcctgatcataattacaaaggcgtttatatagtaaatcatcaacgccagaaaaaccccaaagagagaaaaaacccgccgttctttgaacagcaggtgttagatgctgcaatagctcgcagaggcatgacttacacatatgaactattccaagtgtatcatatgattgagtcaggcatactagagagagctgatgtaagagaggcattcaaccagcgcggccttatagatttccgcaaatcatttaagccccttatctgcgaccatatctttcgtgacatcaatgtgtactcttttgaccttaccagtacaccaggcacgactataagtgaaaaagatagggttgtggtgaaggatgatgacaaccactggcatttactatcgattgtagagatacaggtaaataaaaaaacaatcgaggaagcaacttcggatagcggtgctagtgccggagtgaaagtagacagaattgtaccaaggtcgagagaatttttccttttgaaaaaataa

SEQ ID NO: 269641 - DNA, 516 bp, Klebsiella pneumoniae
atgctctatgtcgtcgaatgcgcctacaccgatccccaaagcgaagcggcgtggaataccttttacaatcaggaaaaactaccggcgctggtctctgtgccaggtttctacgcctcccagcgcttccgcgctctcagcgagggctgcccctgctacctggcgctgcacgatatccacgatgctaccgtcatcgacagcgacgcctaccgccgcaacggcggcggccattttgcccgctggcaatcggcgatcgccgactggcatcgccatctctatctaacgaataatacgctgcgggaggttgccccggatgaagttctgctgctgggcgataccgcggaggacttgcccgtcgctgcgccgatactcctgcagccaggcggcctggcgaccgaacaaacccggtatgccgccatcgtcccacgagacaacctgcatcacctggccacgactgccgccgtctatatctatcagcccatcaccgcccggttacgcaacccggcgcagcgcgcgtga

SEQ ID NO: 269642 - DNA, 1821 bp, Klebsiella pneumoniae
atgaaaaaagtctttgtttatcactgggttagctccgatcagcagctcgacgggtcaggcatcgcacgccaagcagaactgcttgaagcataccttaaacgtactaacatccttgctgagatggatgatccagagcctgtaatcatcaccgagtcgggcggagtgagtgccttcaaaggacacaacatgctaatcacttctggcttaggtgcatggatgcaagaagtgcgtgcatctatgtgggatggttctcacctcgtgtacgagaacggcgatagattttccaggcagaatccgtttacggtgattggatacatcaacgatttaatcaatcacaatataacgattcacgatgcaactatgaatattatcattaatcgtgaaaatagtgcgatgttgcctatggttttgatgaatgctcaacgggcatatgatgaatctaagtataaaagtgatcgtattcgtaaaggctgggcgaagaaacgcgaacaagcatttaacaaaggtactattgtaactaataaacgtccacaatggatcgaagtggaaaaagataagtatgtacttaatgagaaagcggcagtagttaaagagatttttgctctttatcaaactggcatgggatgtcctacgattgctaaacaacttcaagggaaagaaggtgagcaatataaatttaatcgtccgtggactggtgaacttgttcataagattcttactaatcgccgtgtaactggtaagattttcatttcagaaatcatccgtaaccatgctgatattgaaaatccagtaactcagaaaaagtacgatatggacgtgtaccctgtagtgattaatgaagaagaatttgaattagtacaaggattgcttaagtctcgtcgtccaaatgctggacgagttaccgtaaagaaagacggacaggaagaggtattgattaaaagtaatttgtttagtggtatcgcacgttgtactgaatgcggcggtccaatgtatcataatgtggttcgtgctaaacgtacaccaaagaaaggcgatcccaaaattgaggaatatagatacatccgttgcctcaatgaacgtgatggactttgtgaaaacaaagctatgacctatgaaacggtagaacgatttgtagtagaacatttgttagggatggatcttagtactgtaatgaaagaacaggaatttaatcctgaaatagaagtattacgtatccagattgatcaagtaaaagaacaaatcactaactatgaaaatggtattgaacgtcgtaaaagtgctggtaaaattataacttttgatatgcgtgaagatctcgatgatgctaaatcagagttagagagattgttagcacgacaggcttcattagctacagtacaagtagatgtaccagtactacaggatattaacgttactgaattgtatgatgtgaataacgtagatatacgcacacgttatgagaatgaactaaacaaaattgtttctaatattcgtctaaagcgtaatggtacatcttatattattgatattaactataagcagaacaagctaaaaagacatgtactttttgttgagaataagaagaaagaacaaacgttaatcagtgaggtgatcattgaagatgtagatggttctaagttctattataccccttcattcatgatcattgttaaagatggtgaaattcgttttcagcagactaatgaagatctttcaatcattgattactcactattgctgaactatatagatgctgtagatcggaatgatgccgtaggtgtttggatgcgtaatcaatttaattttctgacttctaattaa

SEQ ID NO: 269643 - DNA, 165 bp, Klebsiella pneumoniae
atgactaactttctaattgagatactcgctacactaatctacatgttcgtactattcccaatgttcatagtactgaatttcttttttatgattctggtagtacttctacttccactaaagataccagtaataaatagatgggttaggaactacctgaaacggtaa

SEQ ID NO: 269644 - DNA, 537 bp, Klebsiella pneumoniae
atggaaagagttaatgatttaaaaaatgtacgtgaacataatgattatccacatctaaaagaaggtcgcaaagcattcaataacatgttcgataggacattgtataaccctgattatgctgatgttacaattagtgatgagtttagtaatctaacatcattcttagattggcatgaacagaattatcatgaggttgaggaaagtaagaaatggcaacttgataaagatattctaactcctggttctcgtgagtactcacctcaaaactgtatgtacgttcctcctgaagtaaaccaactcttcaaaagtactaaacctggtaagtacatgaaaggtgttgaagcatcaggtaagaaattcaaagcatattgtagtgttgatgggaaaaagatttgtttaggtacttatcccacagaacttgaagcacataaagtgcatatgaaatggcgtaaggcacgtttgttagaactcgctgagaagtacaaggaatatgaaaaactaagtgcggcactattagaacacgctaacaaaatctaa

SEQ ID NO: 269645 - DNA, 390 bp, Klebsiella pneumoniae
ttgctgccggtctgccatgctgcgctgctgacggatgacgatcttccggggctgcttaaccggctaacgcgcattcaccggcggcaaaacccggacgcctggctgcactatgcccgcgagtgcggtctggcgctggataaccccgcccaagggccgcgctacgatctgcatgagatggcgatcgccgcggtacttagccagcaaggtgtggccctggtgccgaagatgtatgtggaaagcgagctgagcgccggaacgctggttgccccgtggccgggctccccgacgctggctaagcgcttctgcttgatcaaacccggcggcggggagggggagccagcgctgcagatgtttgagcgttggctgcagacggagattgcggcaggttaa

SEQ ID NO: 269646 - DNA, 450 bp, Klebsiella pneumoniae
atgttcatcgtcggcgaactgctgacctacgtctggtcccgcgaagggatgcacgacgccctgtggctggcctacatcgccacctttattaaacagtggggcttaacctccgccaccggctttatgtgggcgctggtaccggaagttatcgcgtacggcgaattaaaatcgggcaaacgcaatgccgccattatcaatgccattatgggactcttcttcaagatcggcttcaccatcggcggcgctatcccgctgtggctgctggcggtgtatggatttaatgaaagcggcgccgtgcagagcgccagcgccatcgacgggatcattatgaccgcggtgtggatcccaattgcgctggccgctatttcgatggtgatcatgcaggtttatccgatctccgataaacatgtgaccgacatcaaccgtcagctggatgagatccgcgtgtag

SEQ ID NO: 269647 - DNA, 522 bp, Klebsiella pneumoniae; identical to SEQ ID NO: 249837

SEQ ID NO: 269648 - DNA, 342 bp, Klebsiella pneumoniae
atgacgactgacaccgcggaccagcttgaacaaccggcgggcattgccatggctggctttaaacagtgcctcgctgacgtcctggctacccgcaccaggcagcatactgaccgcaatatcagtgatatcgctctgcggcagggaatcaccgatacagagagcgaagcctacgcggctatacaattgttgatactcacctcgcttacctttgaggttgatgatgagccgaggcattccagcaagtaccaggccaatacccgacttgtcatggatccgacgcaaggtttccagcgcacggtatggcaggttttcagcctcatccaccatcagaagacgacctga

SEQ ID NO: 269649 - DNA, 1410 bp, Klebsiella pneumoniae
atgaagacattactaacatcggggtgtactaatcaacggggagcaggtcacccacagttgttaggtatcaatttgaagagtggttatgattcggtgttcattgactggactgaatcaaacgtaccggattatgcgggaatcgttctacaaatcgcacttgatgaagggtttagctcagggtcgaagtactttagcagtgctaaccgctattcagcatcgtttggtattgaagatggttcatggttcgcacgagtagcagcctatgacgtgttcggacaggatgaacttgtatggtcgcctactatcggttttaaccagaacacgaaggttccttacagcaaattgaacgaagatgttattgatagcctactgaacagtgatacggctactggcattgttgagaaacagatcgtagatgaacttgggtcacgctggcagctacaggtatcaaacaacggtaacgtaacgggcattgctttagccgcagacgagaaaacatcagtgtttaccgtcatggcggatcgctttagtgtcatcagtactgacagtgccaaactatcagacagagtttatcctctggttgttcaaaatggtaaggtttggcttaactcagcggtgatagcatcagcgagcatcaatgaggctatgatcaataaccttgctgtttcacgtgcgaaaattcaggatgccgctattgataatttaaaactcgcaaatggggcagtacgtaatattcacataatggacggcgtgatcgactcagccaagattagccagcagatacaatccagtaattgggatggtactaatggttggatgatcaataagaacggtacagctaactttggtaacgctactattcgcggtacgatttttgcgaacagtggagtactaaataacgtcactatcaatgaaaactgtaacattcttggtacgttaagtgctgcacgtatcgttggtgatatatgccgtccgcaaagtacaggaataaagggcattaacaatgtttttgatccaagtctcgatagcccattatattttactaatccagtaccaaatcaacattatcttgcactgcgaatacgtggtgaagaatttgatcgttacttagacagtaattcattagcattaagcttttggacttatgatcgtaattatttctatgttcgcgttggtggggatggaattgggatgacaaatgtgtggtttaaagatactggtaatgaaccgcgtgatccatttaaatttaatttgaatggtatctttttgcccgcagttgggcgaggacgttggaattatatctatgttatgtgtacaacaaatcgacgttcatcatgccaattaattgttccagacagatggcaggcttgggtatatcgtgctggtgatcagcctttatataacgcctga

SEQ ID NO: 269650 - DNA, 279 bp, Klebsiella pneumoniae
atggacattttaacaattggttcattggttgtttcagctttagtattgtgctggactgtatatagagattttacatctgactcagacgaattagatgctcgtatttctaccgttgaaacgaaagttgctttgatggatcagtctctaacttcgcttgggcaggaacaagatcaaatgaagaagacattgaaaaacttggaagatagtgtacatatgcttgatattaaaattgagcgtgtgattactatgcttgaaacgctaaaaaacaaaaggggctaa

SEQ ID NO: 269651 - DNA, 447 bp, Klebsiella pneumoniae
atggatataaagaacaggctaattaactatgaaggttcaattacctatcaaactaaagttggttattttaagagtggtaaattctggacgtataaagatagtcttgggtatccaactattggatacggtagattactaaaaccaggtgaatcttatccaaacggtattacaccggaacaagccgaaaggattttagaagaagatatcagtactgctaagtctgctgttcgctcattaggattagatttgccttctgactggcaggacttcatgaccattatggtttttcaacttggcctatcaggtactttaaagttcagaaagatgattcaagccttacgtgataaaaactataaagaagcgattgtacaggctaaggattcactctggtacagacaaacaaaatcacgagttgatcagatgattgaagaactcaccaacaaataa

SEQ ID NO: 269652 - DNA, 975 bp, Klebsiella pneumoniae
gtgatctacatcgggaccattctgcattacgactcagtgctgtcacgtaccctgaaaaacccgctttggaaacgcaaacgctttaaggcactcattacctggccgtcagacatgacgctctgggataagtgggaagaaatcctgcgtaacaacgacgaggatggcgagctgctggcccggacgttctacgacgaacaccgggaggcgatggaagccggcgcgttagtttcctggtcagcgcggccactctataccctgatgttgatccgcgcccgtgacggtcacagcaccttcgacagtgagtaccagaatgacccggtcagcggcgatgatgcaccgttcgccacctgtatcaccttctgggtgaaccggctgaaggaatggtcattctttggcagcattgaccccagtctgggtctaaaaggtaattctcgagacccgtcggcaattctggtcggcggctttaaccggatgaccggcgttctggacgtcgtcgaagcccgcattaaaaagcgtctgccgagcgtcattatcagcgacaccatcgcgctgcagcgggaatacggctgtctgtgctggtcggttgaagcggtccagtttcaggagtttctgcgtactgagctggttcgtcagtcagcagagctgggggtcccggtcccggcgatgccggttaccccgcactcagacaaaatcctgcgtatcgagtccctgcagccttacgtgttcaacaaactgattcggctcagcccgacccaggtcaccctgatagagcagctccgacatttccccatggcagaccatgatgatggcccggatgcgctgcatatgctctgggcgctgtgcaactcctttgggacgcgagacgggttccgccacgttccgcgccggcaggacgatgacagagataatgacaacagacattcaggccagtcgcgccagcgttcccgctcgcgctttggcaacggaggatggtaa

SEQ ID NO: 269653 - DNA, 1947 bp, Klebsiella pneumoniae
atggttgttacggctcctgcatcatcgccgctggaagttgtcacgtccccaaaaagacctcgtcagcctgtcccggcaagtgatggttccgattacctgaaaaccatccccggtttttcacagatacgggccggtggcacgaatggcgacccggttttacgcggtatgttcggatcgcgtctgcgtatcctgaccaataatggcgaaatgctgggtgcctgcccggcccgaatggatgcccccagctcttatatctccccggaaagttttgaccttctgacgttgaccaaaggaccgcaaacggtcctttgggggccgggtaactctgcagggacaattcgtttcgatcgcgagcagccgcgttttgataaacccggcgtacagggaaatgccagcctgcttgctgcctcgaacaatcgctgggatgagaatgcggatatcagcctgggtagcgaagatggatatttgcgcctcatgggtaacaaatcacgttccgatgactataaggatggtaatggcaatcgcgtcccctcaaaatgggataaatggaacggcgatatggcgctcggctggacgcctgataaagataccctgattgaactgacggcagggaaaggggacggggaatcgcgttatgcgggtcgcagtatggacggctcccagttcaggcgagaaagcctgggtgcccggttcgaaaaatcaaatatcggggaggtattccagaaatttgaagcgaatgtctattacaactacgccgaccacattatggataactattcacttcgttcacccgacggtggtatgtcaggaggtatgtcggaagaaatgacagacagcggcatgggtgactcaatggatgcaggcatgtcaatggatatgaatatgccaatggcgatggaagtcgacagacgtactgttggcggtcgtatgatgggcacatgggagtgggcggatgtggagctgagaagcggcgccgatacccagctgaatacccatcgtaataaaatggataacagctgggtcaaagatgcccgtttccatgattatggtctcttcagtgaactcacctggaatacctctgattcaagcaagttagtggggggcgctcgccttgatcgtgtcctcgtggataatttttccgggaaaggctcctcagagcgaacggacacccttcctgccgggtttgtacgtttcgagcataccctcgcagaaatgccgctaatgctgtatgccgggcttgggtatacagaacgtttcccggactactgggaactgttttcccccacctacgggcctgacggcacctcagacgcgtttgataaagtgaaaactgaaaaaacgacccagcttgatattggcgcacagtattccggcaaacgtacaaacgcctgggtttctgcttatgtcggtcacgtaaatgattttatccttttccgctacgatcccaacgatgcatatatcagccaggtcgataacatcaacgccaccatcatgggaggcgaagccggtgtcagctataagctgaccgacagctggaaaaccgacgccagtctggcctattcctggggcaggaacatggaagatggtaaaccccttccgcaaatgcctcctctcgaagcccgtctgggattatcctgggaaagtggtaactggagcagtaccgggctggtacgtctggtcagtagccagcatcgggtggcgattaatgaaggtaatgtggtgggcaaagattttgacagcagcgccggttttgccgtggtttccgccaatgccgcttaccgcgtgaacaagtactttaaagtgagcgccggtgtcgataatcttctggacaaagattacagcgagcatctcaacctggcgggtaacagtagctttggctactccgccaatacctccgttaacgaaccaggaagaacattctggggcaaaattaatgtgacattctga

SEQ ID NO: 269654 - DNA, 375 bp, Klebsiella pneumoniae
atggcacttgaagaatacgtcggctcaatcgttctgtacgtggacggccaggagattgaggttaccgatattcgtccccagacgaacaccgggcgcaagctggtgaaaaccatgaaccggaccggccgcgccaaaggctattcgaaaggtatcgcagagcattcattgcagatcaccgtcgtcatcccgaaaaacgttgctcagccggattgggatgaaatggtcggggccaaactgaccactatggatatggacggaaacccgttgtatagctatctggactgcttcaccactcagaccggcgaacagtacagcgtggataacgaagcccgccgcgatatcacagtacagtcactgcgtaaggtacaaggctaa

SEQ ID NO: 269655 - DNA, 1419 bp, Klebsiella pneumoniae
atgtccagcccgaatatttctttcgacaacatcccgtcgagcatccgcaaaccggggcagtattttgagttcaatacgaaacttgctgtccgcacgttgccggcgaatgcgcaaaaagtgttgattgtcgccccgatgctcgccagcggcagccttgaaccgcttgtggccaccagtgtattcagcggcgatgaagccgcagtgtacttcggttacggctccattgcgcatctgatggtggtagctgccatcaatacctattcctacctcgatctgaccgttatcggcgtcagtgatgccagcgccggggttgccgctgctggtacgctgaccatcaccgggcctgccagttcgcagggtgtggtcagtctgtggatcggtaatacccgcgtggatgtggccgtcagtgcggcagataccgcaactgaaatcgctgcagcgatgaaaactgcgatcgataatcagccggagctgcccgttactgctgcagtgttagctggtgtcctgaccctgaccgcgaagaacaaaggtgcggccggcaacgatatccgcctgcgtgcgcagaccactgcatccggtacgacgactgccgtcgttggaatggccagcggggccactgacccggatatcgcaccggcgctggcgaacgtcgtggctgcaggccacaacatcatcgtcagcccgttctgcacccagaccacgctgacagcactgcgtacccatctggattttgtttccggcccgatggagcaacgcggcgcggtgggcgtcgccggctggccgggtacgcttgccgccggtaccactctggcatcacaaatcaacagcgggcgaattacggtgggctggcataacggttccgttatgctgccggcagaaattgcggcggcatatggcgcacgtattgccagtgaagaagacccggcccgaccgctgaacaccctgacactggcgctggatgtgacggacctagccagccgcccgggacgaaccgagcaggaaaacgcgctacataacggcctgactccgtttgaagtgggttccggcgagacggtgcagatcgtccgcgctatcacgacctatacccgtaatgccagtggcgtcgatgatgtatctctgctggacctgacgaccatccgtaccctggattacgtgcgtaaagcctgccgcgagcgaattgcgctgcgcttcccgcgtgaaaagctctctacgcgtacgcctccactggtccgcagcgaactctatgacgtgctgctgaagctggaagagctggaaatcattgaggaagttgacgccaataaggacgcgctgatcgtcgagcgtgacagccaggatgttaaccgcctgaatgcccgtattccgtcggatgtggtgaacggtctccacgtcttcgccggtcgcatcgatttgcttctgtaa

SEQ ID NO: 269656 - DNA, 198 bp, Klebsiella pneumoniae
atgaaagtgaaagcccgtgaagggatccgggtaccgcgcgaggataacgcccgccggtacatcgaacaggaaccggttgaggttcctgaaagcacctactatctgcggcgtctgaatgagggcgacctggtgaaggtgacagatgcgaccgttgatgttacggccgctgcagcaacgaccggcaaaggaaccaaataa

SEQ ID NO: 269657 - DNA, 771 bp, Klebsiella pneumoniae
atgcagaatggtcccgatgtagatcacatcaaacttggcccccgcgccacccagcggcaggacggtctttttcagccagttatccagcttgtcgcgctgatccgggttgcggaccagctcatcattttcaatatcatccagtatggccaggtcaggacgatacgggccatggcgcaggccgcgcagttttttaccgctgccggcaacctgcaccttgatatcggtcgccgtcaggatggtacccatctgccagactcggcccgcgccgcaggcgtcggaaaagtccatcttcagacgcgggttccagcagagctcagccttgatggcttccagcatcggataggcctggtcgatactgtccatgatgatgaccgggtattttttcagctccaggatgatgcaccacagaacaaagagctggctgactatggtcgatttggcctcaccacggggagctgcgatggcgtcctgctgactgatggtcgcattaacgatttcaggcagacgctgaaacaggaacttatgcagctccgactcatctttatggcggatatagtgcgggaagtagttctgcacgaagtaacgaaagccgttaatcggatccctgaccgcctcacggcgctgattgacggcctcctgagacgggtcaaagccgacctgttccgcctcgatggaccggcgcagcgatgcggccagctcgttgagctgggcctcaaactcctttttgttcaggctgacattcttcttacgcaccattttattgacctttaa

SEQ ID NO: 269658 - DNA, 609 bp, Klebsiella pneumoniae
atggcatggcgtaggggcaatagcccaaatgatatgaggcgttttataaacaacaacagcccagcgatagggcaagagttcaaaaaagaactcagtaatcgtatgcgtatagttacccaacatatgcaacgtaaagtagataatgatgtagcagggggtggtgtaccgtttactggtaagagcatgtactttaactttaaaaagattagtgactacaagaccgtaaaccagatcatagtactacctaatcaaacttcatacttgaagtacattcttgatcctgcatatagacacattaacgaaggaaaaattattccctataagaatgctaagttaacgaagcaggggaacattacacaactacgttcaagaactcagaatgataaatacaaaaaggtaaagagcaagaacggtaatacgtacttggtcgatactaccaagaaatcatctaagcgtaatcccaagttggcacgtgaaaagagggttattggttattatggttccgtaggcagaaaaccaatgtttgatttctacgatgaaaccgagaagcaagtaatagaacaattaagaacattacgcggtacgtttgattaccgttggaggaagtaa

SEQ ID NO: 269659 - DNA, 528 bp, Klebsiella pneumoniae
atgcagaatggtcccgatgtagatcacatcaaacttggccccggcaccacccagcggcaggacggtctttttcagccagttatccagcttgtcgcgctggtccgggttgcggaccagctcatcgttttcaatatcatccaaaatggccaggtcagggcgatacggaccatgacgcaggccgcgcagttttttgccgctacccgccacctgtactttgatatcggtggctgtcaggatggtacccatctgccagacacggccagcaccacaggcctcaggaaaatccatcttcagacgtgggttccagcagagttctgccttgatggcttccagcatcggatacgcctggtcaatactatccatgatgatgaccgggtattttttcagctcaaggatgatattccaaagcacaaagagctggctgacgatggtcgatttggcctcaccacggggcgctgcaatcgcatcctgctgactgacggtcgcagcaacaatttccggcagacgctgaaacaggaacttatgtag

SEQ ID NO: 269660 - DNA, 360 bp, Klebsiella pneumoniae
atgagtttattactaagcctgctttttgatgtgatcgttgcagtttctctggtgcttggggttctgtggggcgatgaaaggttggtgaatatcggctattttgccggctggtttttcggtgtagtcaacctgactgccctcatcagcgcaaatggcagggcgactattgcgcgtgagtataagccccgctctctgttccggcgcggttatgacgttcttacacatacggcgtttattgtgtttgccatctggtctggctggtatgtcatgggggccgtctatgccctgcaggctgcgataaaagcgcagatgttggcagagctggagcgtaaattagcagcacaggctgtgccggagtaa

SEQ ID NO: 269661 - DNA, 540 bp, Klebsiella pneumoniae
atgaatactgcaaaccattttattaccaccgggtcaggtcagcacttttatttttgtaattctggtcctgatattgtgtatatcgaagatatcgccctggcgctttcaaatctgtgccgctttacgggacatctggatgagttctatagcgttgcccagcattgtgtactcgccagttatcttgtaccggcagagtttgcacttgaggcgcttctgcatgatgccagtgaggcttactgcaatgacattgctgcgccgctaaaagcactgctaccggattatcgtggcattgaaaaatgggttgaaggtttaatcagccagaagtttggcacgcctgaaactatcagcccggaggtcaaacaggccgatctcattatgctggctactgagcggcgggatttatttattgatgatgacactgaatgggccattcttcgggggattcagccgacgaatgaatttacgattaatcctcttctgccccgccaggcaagaaagctgtttatggagcgctggcatgagctcagctcgaaagtctga

SEQ ID NO: 269662 - DNA, 522 bp, Klebsiella pneumoniae
atggccaccaaaaaagtgaatagcgcacgtgcccttgttgcttccggatctctcgtgcgcaactgcatgccatggtcagtaggtcgaagtactggcaggatcgtcgacgcaggcgcatgccggatgatactgaagcgctggcccgtatccatactgttatcggggctctgcccacctatggttatcgtcgtgtatgggcactgctgcgcagacaatcagaacttgatggtatgcctgcgatcaatgccaaacgtgtttaccggatcatgcgtcagaatgcgctgctgcttgagcgtaaactggcaataccgccatcgaagcgggcgcatacagggaaagtggtcgttggagaaagtaaccagcggtggtgctctgacggcttcggattcagctgtgataatggcgaaaaactgcaggtcacgttcgccctggaatgctgcgatcgtgaagcactgtacagggcggcaagtaccggtggatatgacagtgaaaccgtacaggacgtcatgctggttgcagtag

SEQ ID NO: 269663 - DNA, 381 bp, Klebsiella pneumoniae
gtgcataagaaactggggattcctgtcccccaaaaagatgaggcggtactggaggcacccactcaggccagcgcaccgtcaccggttgcactgagtcatcggttccggcgcattgccgccctgaccaccgccgcagagctgtcagacccggcacaggaggcactggataacggccgtccggtaccggagaagatcgcggccgcaatggaaaacctgattgcgccgctggtggcggccctgcaggacggcaagctaccggatgaggcgatggatatcattgccggcagttatccggacctggacgacagcgagctggtgaccctgctggagcaggcgctttttgtcgcagacgtatgggggcgactgaacgccgatgcctga

SEQ ID NO: 269664 - DNA, 216 bp, Klebsiella pneumoniae
atgaagagcctactgcgtaatatgaccgctggtaattttaaccagcgttttccggtgggctcccggtttcggtactacatcgttcccgggatgcctgaagtagaagaagttgtcaccacctcagaagcctggcatgtacgtaatggccgcttggtcgtcagggttgccgggaaaatcgggggcgtgtcggttaataaactcgaacccattcagtga

SEQ ID NO: 269665 - DNA, 381 bp, Klebsiella pneumoniae
gtgcataagaaactgggtattcctgtcccccagaaagatgaagcggtactggaagctccctcacaagccagcgctccgtcacccgttgcgctgaatcagcgcttccgtcgcattgccgccctgaccaccgcaacagagctatcagacccggcacaggaggcgctggataatgggcgcccggtaccggagaaaatcgcggccgcgatggaaaagctgattgcgccgctggttgcggcgttgcaggacggaaaacttccggatgaagccatggatatcatcgtcggcagttatcctgacctggacgacagcgagctggtcaccctgctggagcaggcgctctttgtctccgatgtatgggggcggctgaattccgatgcctga

SEQ ID NO: 269666 - DNA, 408 bp, Klebsiella pneumoniae
atgaagcaatggaattacaatgatgattggagtgaggaagaattaacaaacggcagttatgtaggattcgtgtacttgttccagtttgaggacaatacctcttatataggtagtaaacagatgtataagagagttaaggacgttaagaaattaaaagctaattcaattgaaaatggatggcgtgagtacagttcaagttcaaaaatagttaatcaaaagatagaagagggcttagattatactcgtactattttgtgggctttcacatcaatgaaagaaacactattcgtcgaaacagcactaataattaatgaaggtttgaaaacaggaaatctgaatctttccgttatgcataaggcacgtctaccgagtggcaaggatgctgtacgtattcgtgaaatccggtaa

SEQ ID NO: 269667 - DNA, 213 bp, Klebsiella pneumoniae
atgaagcacctgctccgtaatatatccgccgatatttttaaccggcgttatccggtggggtcccggtttcggtactacatcgttcccggaatgccagaggttgaagtggtcaccaccacatccgaggcctggcatgtacgtaacggccggttggtcgtcagggttgccgggaaaatcgggggcgtgtcggtcaacaaactcgaacccatttag

SEQ ID NO: 269668 - DNA, 129 bp, Klebsiella pneumoniae
atggccaacggcgagggaacaacgatgcaattacttgatttattcgcaggcttattatggttaagcagcgttatcttcctgctgtttgttcttgatgtgatcatcacccgttatctttatcgtaaataa

SEQ ID NO: 269669 - DNA, 372 bp, Klebsiella pneumoniae
gtggccgccgcgcgggagctgattgcccaggggccggaagtggtattagttaagcatcttgcccgtgcgggtctgagtatggatcgttttgagatgctgctggtgacggccgaagaagcctggcatattagtcggccgctggtggatttcggcctgcgtcagccggtgggggtcggcgatgtgaccagcggtctgctgttggttaaattgctgcagggggcaagtctgcgcgatgcgctggaacacgtcaccgccgcggtgtacgagattatgctcgccaccaaaaatatgcaggaatacgaactgcaggtagtagcggcgcaggatcgcatcgccgtaccggagcactgcttcagcgccacccggctgtaa

SEQ ID NO: 269670 - DNA, 300 bp, Klebsiella pneumoniae
atgtccgttattctcagtaagccgatcacgcgcggcgaccaggaaatcacttccgttaccatcaataacaatatcaaacaggccggctccctgcgcggactgcgtcttgtcgatgtgctgaacttcgattttgatgcggtttccaccctgctgacccgtgtcaccacgccgtcgctgaccacctccgacgttgcggggatggcaaccggtgatttcactgctctgtgtgaagagatcacgccttttttggcgaatccggcgccgtccgcaccgaacgcagcggagacggagagcgagtaa

SEQ ID NO: 269671 - DNA, 288 bp, Klebsiella pneumoniae
atgtcatttaagatgaccaaaacgtttaacgccacaatgaccggcgataacggacttgctatggggacgcagcagattgaagcggaggtgatatataccatcacacttatccaggtgatcgatgaggggacggcgcacgctaccattaacgcctcggtcaacggacagactccaacacaggctgacgtgtttcagttcccgtattcaatgaacggaacaggcctgtttgaacaggctgaaactgccattctcgccagcgaaaaatatgctggcgggattgttatctga

SEQ ID NO: 269672 - DNA, 516 bp, Klebsiella pneumoniae
atgaccacgttcagtgtagaaattcacgaagatatcgtcaccagacttaaaaggagcgccaagccggagataacactggatctgccatcagtcccggagcctggcgataagctgtgggtgaaaagcatgcgcggtacttatatcgtcgaaaccgaaaagtgcatgattctggagtcgtgccgtgtttcacgcctgcggccgactgtgcggttggtattgttatttggtattgcaactaatcatgggcatgatgcttcatgcgaacaggaagccctccgcgaaaggcgccagcatgcaccattgccagagatcattcacagcatcagatcggaacaaagccaaaagaagctgtcgcagcgtcgcgatcaaatggcccgcaaattagagctgttgaagttgaataagaaaagcaccgccacttctgaatgtgctggccacacatcgagtaccattacaaatgaccgtgctgcaggtggagtggaagatcctgattccgtagggagcgataaagaatga

SEQ ID NO: 269673 - DNA, 699 bp, Klebsiella pneumoniae
atgagctatctgggaagcaaggcggccagtggtgtctatcaaagaatcatcgccgaaatgccgcctcatgacacctacattgaaacgcatctgggcggcggtaccgtgatgcttcgcaagcccccagcgcggcataattgggggatcgatatcgacccggaaaccgtcgaggcgtttaaccaggacaaccctgattttctggatagcctggcggataacttgtttattgatgttggtgatgccgtcgggtttttagagcactttgatttttcttctgccggccgcgttcttatctatgccgatccgccgtaccttcatgaaacgcgcagtagccgcgcccgctaccggcatgaatattctgttggagaccataaaagactgcttatgtgtttacgatcgcttccctgtaccgccagcgtgattttgtcgggctatccatcagatttgtatgatcaccagttggtcggctggcgtagcaaggagtttcaggctatgacgcgtggtggtgcgcggacagagaaaatctggatgaactatccggaaggtcacgcctacccccacatatttgcaggtaaggactacaatgatcgttaccgcattaagcgaaaggcgcagcgatggagagacaagttttcggctcttcccgctgccgagcgtttggctataatgcaggcgcttttcgaagttgatggcgattga

SEQ ID NO: 269674 - DNA, 741 bp, Klebsiella pneumoniae
atgcccgctcttgccagctattcctcccgcaaaaaacagttcctcgaccgtatggatgttctcgtcccgtggtccgatatcgctgatattctgctcccgtggtatccctcgtcccgacggggacgcagaccttttcctctgctgctcatgctgcgcattcactgcctgcaactctggtttgacctcagtgacagtgctgccgaagatgccctccatgacatgctgccatttcgtcagtttgccggtatcgactgctgcgtccccgaccgtaccaccatcatgaatttccgtcattttctggagaaacataaggccggtgaacaggtactgtccctgattaaccttaaactgaagcaggcaggactgatgatgcgtaagggcgtgattatcgatgccaccatcatctccgctccctgctctgtgaaaaataaatccgggcaacgtgacccggagatgcaccagacccgtaagggaaatcagtggtacttcggtatgaaagcgcatattgcggttgatgccgcgacaggcctgactgaaaaagtggtcaccaccgccgcaaatgagcatgaccttaatcaggcggaaaatctgattacggagcctgtggaagtggtgtttgctgatgccggatacagggggggcggaaaagcgggagtcactgagcgggctgtcaaaatactggtttattgcgaaaggcccgcttgctgtaaaagaaatgaaacagcatccgcgtcggaataa

SEQ ID NO: 269675 - DNA, 717 bp, Klebsiella pneumoniae
atggcacctaaagttgcagtaaaattttctgacgtgaaatataaaaaaatatatttggaagagatttggttcttggcagagtccataatcagaagagtaaaacagcttgatgaagtggctaacactcctgaaaatggatttttgattttcagcatgcctgagattacagatctgatacttggaatacttagcagctcagcgaatataaaaaaacttaccaacccagggaggcaggctaaaggtgaatcagcaggtgctttccagtttagagtagatcgctgcgactttattaagaatagttttccagaaatcgatttttctggaattatggatacaaaattaagaaacacactagagcattttgatgagtatttggatgatttcatgacgacagtagcaaagggtgacttcccgcacgcatatcccatgactgcttttaatgttggactttctgatcgagatgtattcactccacacatatatcctataagaatgtatgaatcaaaaactaaaacattttataactttgacaatattgtaagcatagaatcgatttatgaagttgcattagccatagacagaaaattgaaagatgaaaaattaaagtcaatacaacagaaacgcctcctgaatcctaacgcaccgacgaaaagcatggaggatagcggatgcgctgggggtttaattattccaagaacattactctgcgataattaa

SEQ ID NO: 269676 - DNA, 390 bp, Klebsiella pneumoniae
atgcatgaaaattttgaaagtaggttggctgtatatacagataaagattacttcttagaaagtaatgctttttctttaaatgatgaacaatataaaaaagcattaaagatgtattttgatttaaaatatatttatcatgatgagcacaaagctattaatgcattaagtgatattttatatcaaagatgctttttttacatacaagcaaacgcagagttagatgttaatagagatagtctttttgatgtatatactgattgttttttagagcaaggaataatcaagagtatatatgattttatatgtaataacgatactgatgaacaatatgctgcacttacttttatttattctgatttgttcaataaatacggaggtgaaatattatga

SEQ ID NO: 269677 - DNA, 177 bp, Klebsiella pneumoniae
atgatgcttgtatctgtgggaatgatgcttctttgtattcttcttggtgcgtttatgatccgtagttgtattggtaagacaaacacatcaagcgaagcaaagcaagcaatatcagatgtcagaaaaataatagataaaaaagcactgattaaatacaaaaggaataatagaacatga

SEQ ID NO: 269678 - DNA, 1491 bp, Klebsiella pneumoniae
atgaaagggaatgtagctaaaacagggagatcatttaaaaataggattaagtatatattaaaagatgaccatgattttatttgtagcaatatgtcagcagataaaaataatgttagcgatcttactgatgagtttaaaactgtaagcggttttagacctgatataaaaaaaccaacatttcatgcatttttatctcttccaaaaaatgagaaactcacaaatgaacaatggcaagagatagcaaaagactatttgaaagaaatgaatatcgatatagacaaacatcaatatatttgtgtgcgtcataaagatactgataaagaccatatccatatagttgcaaacaggattggccttgatggctcggtatggcttgggaagcactcagcatttaacacaatagcagcttgtgaacgtttagaggtaaagcacggcttaaccattaccaaaggcttacaggggcaaaaatcagaggtatcagcaccaaccaagaacgagatcgagcaagccctccgcacaggtgaaaaaccagctcgtatcgtgctacagaacgcattacagtcggctatggtaggcaaaccagaccttgagacattcatagacagactgcaggctataggcatcgagctggcctttaacgttgcaagtactggcaacgtcgccggggtgtcgtttggtatcaaaaataatgaaaaaaatatttattttaaaggctcacagttaggtaaaaaatacagttggaatactattaaaggcagggttaaatatgacaaaaatagagatgatgaactcgttagaagcttctcagcaagaaaagatgatgaaccagatagtattggacgatcacctattgaaccaaatatcaatgacagtagagccgttgacggaatcaatgatgatactgtcggagtcagtcagcacagcattaaatcagacacaacagacactaacaagagtgaacaactcattagaagcaacaacaacaactttaaactcagcgaaaaatataatagaccaacaaacaaaaagattggaagagcaacacataaagctgcacaaatactcaacagagttaaaaaacaatacaataaagaaccaatcaaaacttataatcaaggtagcttcaatagtaggagttctaaacttagcagcggttctattagtaggatacttgatcatgcagaaacagctaacgcagccaccaataaatttagactcaaaggccgtagcagtttcaatagtagagcaactaagaacgaagaaataagagaacgtttaggtattaaaaaatcagttattcagcctaagaataaagaaactctggtcaaagaagaaataaagaaaaagcccttagggttgagtatgggtgaaaatagatttaaatcgaagctaaaagaagctctaaaaaaagaaaatcccaaaaatgaaacaacaccacttcagcaggaagatgatcagcatttaaaaccaagaggctttaaaccgagataa

SEQ ID NO: 269679 - DNA, 1443 bp, Klebsiella pneumoniae
atgagcacagttaagaaaattgataccatttcttcttactttaaaatttccccttcaatacttgatcaattagatgttgttgatgttctgttagaatcagacacattgctttttattgacccaatgctgctccctgaaagtaaacattcagaaatgaaagatgatgctgatcaaaaatacatcgacactttcacaaaaataataaagctgcttagtgcatgcaaaatagctaatgacagtgatattgcatggagaactgcaaaaaaattattttcattttccgaaataggatggacatgtctgggttatggttcatcagccaaaggatcaggatttggacctcagcttgttaataacactatgaaaactgctcatcaaattgtaagtatggatattgatgatcctgatttattcatggttatgtcattatttgaagaaggtattggtgctgaccgaatcagtgatatgaccaccaatataatatttgattccttagtcaagttttctgaaagagtaaatacaacacttaaaatcccaacaaaagaattcacttttaaagggaataaatacaacgccccccataatccattaacaaataagccactaatattagttcctaaagatattgtccgagacttaccaatttctacagattggagtggtgcagtccacacaatgaaggagaatactgacttaagagacaggatcaatacaaatattggtaatctcctcgtatctatgaccaaaaaacaaaaggaggaagccaaacgtagagctttagagaaaaaagaatactttgaggatttgctaacattaataaaagaagtagaaaaagagccctacgattttaaagcggatagaaacggtgaattattctggttaagattggcatcatctatagacaagaaatatccttttaatctctcaggatataataaaaaactaaccttagatgatgttgaacatcttgtaagcgacattttaaatcaattcaaggatcttattgaaaacaaagggttatggaaagaaatgtgggctgatgataaaaagccacgtaaagaaaaagctgctcaacgtttgctatttgctgttgcatattcatattgtaaagcaaacaatttagatataagccctgaagccgattcaggaaatggtcccgttgactttaagctttcacaaggctttgagcaaaaagtattagttgaagtaaaactctcgtctaatcctaaattattacacggatatgaaaagcagcttgaaatttataaaaaaggggatgacactgaacgtgcatttttcgtaatagttgatattggccacatcggagataaatatcaaaaagttcagcaagcaagaattgccacagaaaaagaaggcaagaaagtttcaaaaataattcatattgatgctcaacaaaaggactctgcaagtaaacggatttaa

SEQ ID NO: 269680 - DNA, 636 bp, Klebsiella pneumoniae
atggctgagtattttccggcagagtttagagcacaggcatttaactgcccacattgcggtgtttattctaggcaacactggcggcgtatgggagggagtagtacccagcttcattacaaagaaactgatttctatatgtcaacatgttctcattgcaatgatgatgcttattggcataaaggtattatgctcgtacctgcgtctggtaatgttgagttacccaatcccgatatgccagaaggctgcaaggctgactacatggaagctagaagtatagtcaatctgtctcctaaaggtgccgctgcgctactccgcttgtgcttacagaaactcatgcgccatctcggagaaccgggagagaacataaacaaagacattaagtctctcgttgagaaagggctgcctccacgtatccaacaagccgctgacatttgccgtattgttggcaatcaggccgtccatcccggagagattagccttgatgatgacccgcagttaacgcatagtctatttaagctattgaatattattgtggacgatcgtatcacaagacctaaagagattgagatgatgttccagagcatgccagttaacgcattgaaaggcattgaaggaagagacaaaactccgggataa

SEQ ID NO: 269681 - DNA, 1041 bp, Klebsiella pneumoniae
atgaaagtaataaacattgtaagcggaaagggtggaactggtaagaccttgctgactgcagttctagctgaaacgttaggcaacgcaggttccaatgttttagttatagacttggatgtatttgtccgaggactcacctcgcttctttattatcataaaaatgaaaaaataaaactgtgtgaaaattgggaaatgtccgtcgcagagttttttataaataaaggaattccttctttattcgaacgtcgtccaaaaaagtttgcaattgcccgatatagatcttttgatgtaattccatcagtgagcagagtagatgagcttttacagttttctgatttgatgccagacacaaaaaaagaagcactagattacattcaaggattattgcgagcaataaaaaatgaaaaaacatatgactttattttctttgatagtcgtgcaggctacgatgaactaatatctgcctcacaccaatgcagtgatattacgatttgcgtggaagaagaagataacatctcaagaataacaactgataatctaatcaatcagatgcagaatgacacgaacaatccaatatttagattaattaacaagaccacatcagacaaagaatatacggccagttctgtaacacatattggaaatatcccttttgatatggacatcatgcgtacatttggtcaaaacaacttctgggatgatttgaaatcaacaatataccttgatgcaattataaaatcctggaacaacctttcaaacaagatggatttatcctgtagtattgaatctaaaagacaatcacctttcaggaaccggtccatcgagaagaaactccagttttattctctgaaagatagagtaatgatactttatggcattttaattggtttcatgggcgtactttatcctttattccagaacggtttatttagtgaactcttaaataatagagagttgctgctgagaattatgtctagttttgttgggatttttgggttcgcattaacatttttgattatactgaaaaatagaaaaaaatag

SEQ ID NO: 269682 - DNA, 231 bp, Klebsiella pneumoniae; identical to SEQ ID NO: 185380

SEQ ID NO: 269683 - DNA, 141 bp, Klebsiella pneumoniae
atgcagaacagcaacattatggcgctagcgctcgcgatgtgcaacgccggaacaaatagccgggtgacaatcccccgtttaaccgggagagaattacgagaattgctggaatggctgtcagtgctgagagcaacactataa

SEQ ID NO: 269684 - DNA, 225 bp, Klebsiella pneumoniae
atgcaccaacaaacaacacaaacaaaacgattcgaaaacctattaaactggtgccaggggcaggtaagggatatggattttattttagaagatgcctatctgagcgaagatgaaaaaatagcagcgcttgaggaaatcttggataaatcgctaacgctgcaatcgcctctcatcgtattgggcaataaaatcaaaacagcaattaaacaattaaaggatcaataa

SEQ ID NO: 269685 - DNA, 2109 bp, Klebsiella pneumoniae
atgtttcctgatgcagacgcagtaatagcactatcggagttcatagatagtacagagaaagataagccaaatatagatctaagcctagatatgttgtatcgaaaatacattgagctaggtaggccactttttctggctgagcagttaataaataacttacaggtgaatacaagcgaagatgctgataagtttatagatgttgcaaccacgattaccaaacatcacgaacttagtgaatatgataattttcattatgccaactcactaataactaaatgtgattacgaaagagcattagtgataataaacaaatccttgcaaaaggagcatattgatcctaattggcatttgcttaaggcgttagctcttcataacaatggagagcccggcctagccatagactgcattggtaaagtgttgcaaaacacacagttgtctcatgatactcttaaaatgtacatccagctttgtatacagtttggaatggcaaatgaagttgaaaaaacaatcattgaggtgatatctaagtgtaatgatgcctctataaaagttaagtttttgattcaattatttaatatttatagtaaggatgaagagaacaaagataaaagattgccggttctacgtcaaataggaaaacatgtaaatcaagatgattgtgatgaagagggtagttttttaatgctaatgttaacatcccaacggactgacgatgaactacagttcgctgaatggcaacaacgcttgattaattatacaaaaaaattccccgattcagctcgattaaaacgagctgaaataaatcctgatgcaccagcagaagaacttcttgaaactttgaataaattagtaggagttacccctgaaaaaattcagtggtgggaaaacaacaaactgcagattcgtaatggttcattaagagtaccattcgccatgcgtggatatttcttgaaggatacgcgtgatatctttactacatggtcgttatctaagttcacatcagaggaaagtcttgagttcaaaattcgccatgccggttttagtccgcaacctgattttgacactcttgttgatgatgcttctactttcatatttgaagaaacaaccttgttgattttgtctgaattgaatattttagaccatttttttagtaagttgaaacgatttgctcttctaagtacttctttcaaaaatattagtacacatgctcacagctatattaagtcagatgcttcaaatgttgctgaaaaaataatgtcagcaattaataatcatcgaaataaacttaagttattagattgtcatggtaagaatatcattgatgattatacaagtgcagtaatagacaaaggctatgttttattgtcagatgatattgatatgcaaagttttgttcttgctgctacaactaaaaaaatatctgcaaatagtgttaatgtgatattgtttcttatgaagtgtgatattttaacacaaggtgatgcttacgatctcatagctaaattatgtgatttaggtatttctcaaccaaatatgagcattcagctattatcagatatctattattactattttttacaatgtggtggtggtaatattttcagcacgaattttactaaagtatacgataggatattctcgtcattgcacactacaaccaatgcagcatctgttcttattcacatgctagttaatgcttctgcttttgaaaaaccattgccaacccctaatgttttgcaaattttgttacgcacgcttatagagcgtaatccattcacatcactagacaggttcgtaactatttggttcattcaacaatgtacttttagtttgagtgaaaatgctgaagatatcagcgtgcactcaagtgaattgagtgttaaaatatttggattgtataaagaagtcatgtgtgacattgatccggcttatgacgatgaagataaaataatatcatcaattattgattcactaaaaagtgtcgataaagaaaaacgctctcaaatcttcactgcggtacaaagatgttttaagcctcttacgcactctgctcttacactacaaagcaaataccaatctatgaaatttaatgatcaatatttcttttga

SEQ ID NO: 269686 - DNA, 1791 bp, Klebsiella pneumoniae
atgactacgcaaccgcttgattttttgaaagaaaagactagctctcttctgcagaaatatcaaacctgcaaaatcatggctaaaaatcatgcaagtggcattaaggttgacaaggaacgattgatttatgctcgctcttactgttcatgtattgtggcagcatattggaatgctctaagcaagaagcataaaagttcaatccgacttaggtcagttcctgtctcagtagagttcattttactttcagatgaaactaaagagttagcatcagcaacaggtgtactgatttctcgatttccttcagaagatgcaggctatctgattggatcaatttacacagtgatgctgccggttacatatagatcagatatgggtgcttattatacacctccaccgttggtgtcaaggttacttgatctctcagaacaagccggggttgatttctcaaaagccagcgtaattgatcctgcgtgtggaggtggagcgtttctcgctccagtggctctaaggatgctcagtaaagaaaaaggaagttctcctgaatggatatttaggcgcttggttaaaagattgaaaggaatcgaaattgatcctttcgcggcttggatgagtgcggtattacttgagtctgtgttaattaaactttgtattgaaactaagcgtagattaccagcagatataataatcgttggagatgcattgacgcaggaaaatataggggaatttgatctggtaattggcaaccctccttatggaagagtgactctttctcctgaaatgcgaagcaaattttctcgttcgttgtttggacatgcgaatctctatggtttgtttactgatttagcagcaagattcgttcggcctgacactggcgttgtagcttttctcacgccaacgtcatttttaggggggcagtattttactgcgctaagaaaactactaaccgaaacaatgtcacctctggcattcgactttgtaactgatagagacggagtatttgatgatgtcctgcaggaaacaatgctaacagtattcaaagcagggcaacataaacaacaaactaatgtgtcgctactcattcctaaagggttgaacaaagctcgagtagagaaggtaggtaatgtttatattgaaaaaggtggaaaaacatggttattaccacgcggtaaacaagatatcaatttccttaacagattaagacatatgcccactcgattgactgaccttggttattcagtttctactggacagttggtctggaatagatttaaagatcagctacgaaaaagtaaaaatgctatttcttaccccttgatatgggctgaatcaatcactcctgttggctttagttttagtgctgctcgtaaaaaccatgtcccatacgttgaagtccgacagaaacaggaatatcttttaacctcgaaagaatgtgtcttagtacaaaggacaacttcgaaggagcaagataagcgaattttagctgctctcttacctcagaatttcattgatatatcaggtggtgttgtggttgaaaaccacataaatattgtatatccgaatggtatcttaaatcacatcagtccagaagtaatttctgcattacttaattctcgggtcgttgacagagcctttagatgcattagcggtagtgttgcggtttctgcctttgagcttaactcaataccgttgccagctctggagcagcttagtgaactgcaaatgctactgaattccacttcagaaaaagaacttatcgaagaaaagatcgctagtttctatggagtagtttga

SEQ ID NO: 269687 - DNA, 1086 bp, Klebsiella pneumoniae
atgagtctacctacagttcctgacttgacaattattcatgaaagattgcctaaaattttcccagaaggtaccgaaaatcgtaattatctcattagagagatggctggtaagacaatttttgttatgttttatgctggggcaattgaggggcaagaaagatggatcaggcctaatcaagtagtgaatatgggagattcacaagcagtacttactggagaagaagaaaggcttcaatgggttgctaattctcttaagagaaaaagaatccagccttcggatgcgtggtatgccgaaaatactcgtgaaccgattagggatgagactatcaaaaatggtcttatcccatgtcgtgcagttttattacgagaaggtatcgcgacaacttcgtctgctcctcgatattgtttaaataaggtatttgcagatctttttgatgctgatttatcagcaaatgatttagagatagcgatagataattggcaaaaaaattatttaaacaaagccgctttgtctagaattagattgcttaagtctggtgctaagattgctgccgatgcagtcgcagttacttttcctaatggcgaaattagaatgcttgctccagggccgtcaagtgttatagcaaaggctgttattgaaaaatttgctgtggactttttaaaaacaccagcagtactttggttatcagagtcgggtaataaagttgtagctagggatgaggctttagcaactgatttaggcttagctatagatccctccaaagcactacccgatatcattcttatagatttgggggaggatgaatctggcgatgatatgctcgttgtatttgttgaagttgttgccactgatgggccaattaatagagagcgaaaaattatattaaccaaaatagctctcgaggctggattcagtgaaaataacttggccttcctcacggctttttcagatagagggtcacctcaatttagaaaagcaatttcggagattgcttgggggtcttctgcttggtttgcgtcagaacctgaacatctgattgtactgcgtgacaacaatccaatgaagttatccactaaaaaattatag

SEQ ID NO: 269688 - DNA, 444 bp, Klebsiella pneumoniae
atggcagataatgaacagccgaaagtttttcagttgggtattaatacagtaactgagtattcagacgggaaaaaagttattgaacaaaatgggcataaagtgacttattatccagacgggagtatggtggctgagatgaatgggggccatagagccgccattagcaatagtggaaccgtgctcaccatcaactattcgtcaatcaaatatgcttatccaaaaaatttagcaaacgtggtttctgtaaatacaattaccaatgtgtccggtgtgactaaggaagtgttgtttactaacggtggaacggcaacttgcgtatatgggcctttaggtgatttagtgtccgttaagacaaataatgttgattctttcagtttcaataaagatggggatgagttttcattcgacatctctgataatccatcaaagcttacggtgcactaa

SEQ ID NO: 269689 - DNA, 807 bp, Klebsiella pneumoniae
gtgggtcgctatctggaacggcaaggcctgctggaacgggatgtcgaaaacagctatctggcctcggatgcggtggatgacgacccgatgacacccctgctggggcactcgatcacttaccgtatcgctgtcggttcacaggcggggcgaaaggtgttcactttgcaaactctgccgaccagtggtgatccgttcggtgacgggattggcaaggtagccgggtccagcctgcacgccggcgtggcggccagggccgatgaacgcaagaagctcgaacggctgtgccggtacatcagccgcccggcggtatccgagaagcggctgtcgttaacacgaggcggcaacgtgcgctaccagctcaagacgccgtaccgggacggcaccacgcacgtcattttcgaaccattggatttcattgcaaggctggccgccctggtaccgaagcccagagtcaacctaacccgcttccacggggtgttcgcacccaacagtcggcaccgggcgttggtcacgccggcaaaacggggcaggggcaacaaggtcagggtggctgatgaaccggcaacaccagcacaacggcgagcgtcgatgacatgggcgcaacggctcaagcgtgttttcaatatcgacatcgagacctgcagcggctgcggcggcgccatgaaagtcatcgcctgcattgaagaccctatagtgatcaagcagatccttgatcacctgaagcacaaagccgaaaccagcgggaccagggcgttacccgaaagccgggcgccaccggctgagctgctcctgggtctgtttgactga

SEQ ID NO: 269690 - DNA, 555 bp, Klebsiella pneumoniae
atgaataaagaaattcaattttcaatgattgtagcgcgtggtgtaaacggtgagattggtcaggacggcgacttgccttggcatgtcgaaggagttcggttgaaagaagacctcaaacgcttcaaagcgatcactatgggtaagacactcgtcatgggcagaaagacctttgagagcatccccaatggcctgcccggacgcaacgtcatcgtgctcacactcgagccttacgataaagcggatataaccgaacgtggagacggcacctttgtagcgtgggggaatagctgccatctgtttgaagtggccgaacacctgggcgttactgagatcatcgtggcgggcggtgctgaaatctataatctgcacaaagacgtcattacgaaggtttttgaaacgaaggtgttgagggcgtatcctgcagcggatactcacgtagacgtattctgggaaagtcccggatacgacactgaaggccgacaatggcgcgtaacgtccagaggccacattatcgaaaacggcagtttcactatcgcgacgacgtatgagcgatag

SEQ ID NO: 269691 - DNA, 546 bp, Klebsiella pneumoniae
atggacaaagaacgaagcaaaccgtctatactagcgccacttgcgcgacgcctaagtgttatgcgccgcataacgacaacaagaccgactgaaaagctgcgtatggtgttcaacatctatttgcagtcattgctgtgttttttcttccgctatcgactccacagtcagcgctggtatagcgctaatgcatcaaagccgtatatcgttagcagcgcaatgcgtttgaatggccccttttatttcggaaagcactatcttccgtactatgtaattcccagtgctagacactgggacatcatgtcgcatcattcatcagccatgtttaaggcggcacttgtgggcggtaaggtgcgtacgaccaaccgcaagttcatcaatctacgcatggcgtttgcctgcgctgaacaagggtttgtggaccaacacgggcgcttctacagtcgcaagcgcgctatgagggtgatgaaactcacaggccagtggaaaacgcggcggggatatttggacgactacggcgaagccgcttattctgaacacctctactga

SEQ ID NO: 269692 - DNA, 270 bp, Klebsiella pneumoniae
atgaatgatattaaaataattacgctctttcataaaaatgagcatataccatttatgacctgtatggttaaagatgttgaagagcatgagaaaggtgtaaatcttacccttgaaaacggtaatagcatctatgttaaagattgcgattcttttttcctgtctgaatcagcggatgagtgcgataaggaaagaatggttaatgtatataggagattaatttctgaactcagccaagtaagcgaagaaacagtaagatcgctgataccttaa

SEQ ID NO: 269693 - DNA, 288 bp, Klebsiella pneumoniae
atgcgtaaatttatgttagtggcaggtcttgccgtcctgctagcagggtgcggtgatgatggcatctatggcaactacactaatcaacagtatggcgtcaggcttgatattcagaaagacgtcatcaagttcaggaatggcgtttttactgttaaaagctgggatgaaagccagaagccaatatatatcgctaaaacgcaaaacaaagatctcgactcttggacttttaaaatagaaaaagtaaaaggcggtatcgtctatcaaggcgcgatttttaaaaaggaatag

SEQ ID NO: 269694 - DNA, 534 bp, Klebsiella pneumoniae
  misc_feature (495)..(504): n is a, c, g, or t
atgaaagagagtacttgggaagagatatcaaaagtaaatgaaagattttataaggttaaagcagaagcgagcaataaaatatttaatgctgatacaggaatcgataatgaagccttaagaagggttcaacaagctgttttaaaacaggggaatagaggtcttgcagaagagttgcataaagcaatctttgagaatagcgctgtaatgagagttaaacatgcggagcgagtttcaagttcattgaacgaatggtttaatgtaagtgcttttagcgataaaataaaatcagaaggtgatgtaaaagaaagagaggtagtggcttctaaatccgaagcattcaaagacgcaccttacttttctgttggtatgtatcaacataatatagatcagccagatgtaaaggatgcttatataaaaagggtagaacgattaaccaaagatatggaatatcaggttagttttgcggttagtagagaaaaccatatgaacaatacnnnnnnnnnnataccattgaggccgctaaacagcttttag

SEQ ID NO: 269695 - DNA, 234 bp, Klebsiella pneumoniae
atgcgcctgactgtacttgatgatgttcccgaagagcgcatagttctgggacgtgaacgcatcacagtttaccttgatggtaatgaggtaaagcacgtattctcggctgatgatgataaaggagaagtgattgccgccgtgcttgatagccggggttaccccactgccgagaaagaagaggttaagcggcagacgctgttaagtcaggtgaggatagagcaatgcccgcgttaa

SEQ ID NO: 269696 - DNA, 678 bp, Klebsiella pneumoniae
atgaaaataagtcaaacgattgctaaatccacagtgagaatagagtgtgatgttgctaatggtgtttctgtcggtaccggatttttttttggttttcagattgatgagaaactacaagtacccttattggtcacgaacaagcatgtgatcaaaggagctacaagtatccgcatgcggtttaacattaataattccaacaatccgcagatgaaggttttagaagttcaagttaaaagcgagagtgactttatccaccaccctgacccaaatattgatatatgtgcaattgcattaggtcattttttgacaaatcttctttctcaggggattgaagttgatagatttaccttcactgataaaaactttactgatggtaactttataacttcggctgaagatgtattcatgacaggctatcctaatggcttatgggatatggtaaacaatcgacctatcacacgaaaaggaattgctgcatcctctcctctagaggactggcaagggagaccagaattcatgattgatatggcatgctatggtgggtcaagcggttctccagtttatatcatgaacgagggggggattttctgtcgatggtggatttgcagttggtcatcgtctaattctactgggtattttatatgctgggccaactatagatgttggcggaagtattag

SEQ ID NO: 269697 - DNA, 474 bp, Klebsiella pneumoniae
atggctgctttaaaaccggaagtaaaagccttcatcattcaatcgcttgcgtgctttgatactccttctcaagttgtcgaatccgtcaagaaagagtttgggttaactatttctcgccagcaagccgaagcacacgacccaaccaaggctagtagcaaaggtttagccaagaagtggatcgagatgttccacgcgacacgcgaacgattcctgaccgaaaccagtgacattccgatagcgaacaaatcctatcggctccgcgtgcttgaccgcatggcaaccaaaaccgaggggatgaaaaacttctccctgacggcgcagctgattgaacaggccgcgaaagaggttggagacgcttacaccaataagctgaaggttgaaagcactggcaaggatggcggcccgatcaagaccgagacgaccagcctcaccgcagatcaggccgcagagatttaccgcaagatgatggggtga

SEQ ID NO: 269698 - DNA, 390 bp, Klebsiella pneumoniae
atggcgaaagaaaagctggttaccatccatgttcacactccgtttacgctgacgctcggcgatcagtcaaaacaggagtttggccgggggcggcataacgtaccggaagaggtcgcgtctcactggttcacccaggcgcactctgagctttccgaaagcgtgattagcgacaccgatgatctgcaacccattatcgacagcctgcaagcgcagattgccgacaaagataagcagattgtcgataaagatcagctgattgccgatctgaaagaagcgctgctcaagctgcaagagcagaacgacagcctgcaagcgcagattgctgccgcccagactggcggtaatggggcgaaagatgccaaagaatcaaagcctgccaacagtaagtga

SEQ ID NO: 269699 - DNA, 501 bp, Klebsiella pneumoniae
atggcggtcagtacagggaaaaaaattattttggtcgctatcttggctgcagggtattttattggcaatggagccaatgaaaataaacgatacgaagagctaaaggcaaaacaaccctcagacctaacccaagatgataagtctttcatcaaaaagatcgaagacgggaggtctaaggccgaagaagaacgcaagcaatatcagttggaacaaaagaaaaaagatgaagcggacagacctcgccgagaatttatggaattgcagttagcggttagaatggcctgccatgatactgcatcctctttactcaaatacccagactcctttaaagacgaacaacatgaagatgggattgataagcaggaaggaaaagatatttactactttactcttcattattctggggtaaatgccttccatgttcgaagtacacacaccattgagtgttacggaactataggtgatccatcacatagcgtaacctacagaacattcaactaa

SEQ ID NO: 269700 - DNA, 222 bp, Klebsiella pneumoniae
atgcgtgcaatgagtgaactcggcgagctggcaagcggtgcggcctctgatgagcgcctgacctctgcccgtaagcacaacatgattgaaagcgttaactcaggtattcgaatgttgtctttgtcggcattggcgctgcatgcgcgcttacagactaatccagctatgtcgagcgtggtcgataccatgagcggtattggcgcatcattcgggttgatttga

SEQ ID NO: 269701 - DNA, 645 bp, Klebsiella pneumoniae
atgaatttattaaaatactatcaacaatatcgcgacaagtggtgggctttaccgctcgttctgcctgcgctgttattaccggtcgccagatgggcgaatacctacaccatgctcaatggtcatatggtatttttgtattatcttcccctggcgctggtgctcagcctgatgatgttttttggttgggcggcgatccctggcattattattggcctgctgttaactctggcccacggcatgatgtttgagcagtccatcggtgtactgttccatttccttatcccctgcgtgctctgctggggcggctaccgcatttttgtcccccagcgtcagcaggtctcacacggcaacgtccgactgatgccgcatcgtctgttctggcaaatgctgctcccctcggtcatttttctgattttgtcacagattgccgaatatcttggactccatccgcgcacaacggaaatgaccggcgttacgccatttagtttacgttcattaatcacctttcaggcgctaatggtagggtgcctgaccggcatgccgctgtgttattttgtgttacgggtcattcgtaatccttttcatttacgcggctttatttctcaggttcgcttacaaattgatccaaaaataaaaaaaaattga

SEQ ID NO: 269702 - DNA, 1137 bp, Klebsiella pneumoniae
atgccctctccggaaagtcctttagataatctgtttgtttcggtttatcgcgcgtttattattgcccagtgccatctttgtcagggcgatctgggaaaagccgggtggtatgcagagaaaacgttgcgccaggctgaatgttataccggtacccagtcgaccagtggcgcgacgctggcgccgctgctggcggagatagcctatgaatgtcagaggggtgactcgcccgagcatctgttagccgaccggctcgaattcatcgaccgattcagtccacccgacgcgctgagtcgttgctatacctatctcgcgcgtcaggccttagataacgatatgccgtatgaggccgagcgattgctggagcatgcgcagcgtcttgcggtgtctcgcggctggcaacggctccaggccatgttgttagccgagcaggtgagggtgcgactgcagcgcggcaatttcaccggcgcagagcaactgcagcgacagcttgaacaaatggccgccagcttcagaatggatgccgaacatccctgccaacgcgccatcgttatgtctgcatcccttagccgcagccggcttcttctcgccagaggccaggcaccgcaagcctgcgttttactggctgagatggtctccgatcaggaaagccggggggacaggttaaccgcagcgcgtctacgtacgctctggtcattggccttgtggaacagtggcaaaactgccgctgcgcgcacgacatttcagccagtcgtgcagctggctgaacaacagcatctcacgggcctctttcttgaagctggcgataccttgcaacctttgcttatcggtatgaatgaatcctcttcggcttggactgagaaaaggggagtgcagggatcctgggcagacaagcgcgggcctgtagacggaacaccgtttaatagtggaagccccgatattcctggcgagctcagcgagcgtgagtttcagatattacagctgattgctgaaggtcagatgaacaaagaaatcgctcgctccctcgctatttctgccgagacggtcaaatggcacatcaaaaacatcaacgcgaagcttaaagtgaatagccgcactcaagcgatgagccgggcgctggagatgaaattactggattaa

SEQ ID NO: 269703 - DNA, 342 bp, Klebsiella pneumoniae; identical to SEQ ID NO: 242404

SEQ ID NO: 269704 - DNA, 606 bp, Klebsiella pneumoniae
atgcaggatgttacatccgaaaaactagggccttcattgtggcatatgcaccccttaaaatttttagcctctctaattcagactaatgtaaatattagaatacttcgtttacgtgcatttctacgaatgatccgcattggtgaggggaccattcaggaagacggatacagaacgatgtttactggtgcaaaatttacagattttagtaaacaccccaataccagacatgaagctaatggtgttgtttcgactgctgctggagcttatcaatttttatacgggacatggagaaatctgcaacgtagatattctttctcagatttcagtcagagtaatcaagacctcggttgtatagcgctcattgcaggtcgaaaagcattagacgcagtaatgcaggacaagattagcgaagcaatacatttatgtcgtattgagtgggccagtttacctggttcaccacatggtcaaccaactgcaaataaaaaaatgatcatggaaaaatatgaagtctacttagctgaagaaaagctaggtaaaacaagtttacacgccacttcagaagaaatgacgaaatttattgaagataattatccggagtatttatga

SEQ ID NO: 269705 - DNA, 339 bp, Klebsiella pneumoniae
atgaaccccagaattattatttcaggtgttatctcatgttttctgcctgcgaccttatgccatgcggccaatctaagcgacgacggcagcttccagttaaatggatatggcatggtggctggagattttcagagcgaactaaaccgtcccaaaaacatgtcgttgcataccgatcccaccgggcctaatcaggatcctcgtggcaaaatgggcgatttgggaaacagtttctggcacgattactggacatcgctggctattactaaaaaatggcaggggctggcttctcccgagcaatgggctgattacacctatgaaatggtgggttacggcgattaa

SEQ ID NO: 269706 - DNA, 141 bp, Klebsiella pneumoniae; identical to SEQ ID NO: 26214

SEQ ID NO: 269707 - DNA, 759 bp, Klebsiella pneumoniae
atgaaaaaagaaaaattcaaaataactgaatgggtcgcagcaataacattgacaataggcttgtactgctatttatataattatatttattggagatattttggaataaatgcttatgactatttttcgtatatagatagtcttcagcgttctgttccgctgctgacttttgcacttagcgctgtttacgccgtttttatcgtaatttttgttgtattactgttaataaagaagagggcactgcgcttctttcggttctttaaaagcctatataaagaggtttgctcatatcattattttgttttatcggtaattgctttaatagttttttatctttcaagtctgttagtgatgccgattcttaaaatggaaagtttgtcatatgaacaaaagaatctagccataggtgcgctctatgttatttttgttgctttcttctcatctgcgatttcattatatgcttttgttaggaacattgagagaaaaagaaaattaaaaaacggactctatttgttttttatttcaccaataccattccaaataatcatgtcgatattctacatgccaataacaagtgcatatagagatgaaaatacaattcaggctcaggttgtaacaaagaacgggaatacctattcatcacataaaatgttagccttaacaaaggactttgtctttattgttgataataaaaatgtaatagtaagaaaaaccagtgatattgaatatatatattatagagtggacaaagttaagtag

SEQ ID NO: 269708 - DNA, 156 bp, Klebsiella pneumoniae
atgtctcaaaaaattacagcaatcaaagagccggtggttgagtacaaggacaaaactcttcattatcgtattgcaaaagtcatcggcgagaatgtggatcaaaccttacaagtgatgattgcggtggctttgttgaataaatcgaacttttgctga

SEQ ID NO: 269709 - DNA, 228 bp, Klebsiella pneumoniae; identical to SEQ ID NO: 195746

SEQ ID NO: 269710 - DNA, 231 bp, Klebsiella pneumoniae
atgatcgtttctattttttcaccttccgcaggcgctgtaaagccccgtcgtcactcgcgcattctgcgcgcagatatcaccgcacctgagattgatcccgctctcagagctttcgggcgtcatatcgccagaagtcaccgcaaagggcgcggtgtccacatccccgcgatgaaaaataccgccctcgggcaggtactccgcacgctggaactgaaacgcgcatttaactga

SEQ ID NO: 269711 - DNA, 141 bp, Klebsiella pneumoniae; identical to SEQ ID NO: 36145

SEQ ID NO: 269712 - DNA, 141 bp, Klebsiella pneumoniae; identical to SEQ ID NO: 36145

SEQ ID NO: 269713 - DNA, 435 bp, Klebsiella pneumoniae
atgtctggatttgacgtcccgggctccccagaagattatttttacatcacaactaactcagatggctccactaaatacacatcaaaccgcgtggcaatccgagcgtacgcgcaagccagcgtcgataggctctccgatttatcaaaacagggcgaaaatgtttacgctgcttcactggacgatacggacaaacttacaagcttcctccaagatatacctgaggaagcaaaaatagccatttacaacactctttcgcaagaacttgaagcaattacgagtgctaagaatgatgagatcgcaaagatcaatgccgaaaccgaaaggctgaatgcaactgccgctcaaaaagaaatggaccttgcaaatattggctctgtcataggtgccatagtcgtcgttttggtcttgtttgttttgttcatcaacttgaaatag

SEQ ID NO: 269714 - DNA, 948 bp, Klebsiella pneumoniae
atgacaagtttagcaattgcagatcgtacaatcaacgtgcctttctatggcaattctctttttgtggtggaacacaacggcgagccgtacaccccgatgaagcctatcatcgatggcatggggatggattgggcttcgcagttcactaagttaaaacaacgctttaaaacctccattgtgaaaatcacaatgcagcttccaggagacaatcagcgccgagatattatttgcttggcactccgcaagcttgcgggttggctacagaccatcagcgccaacaaggttcgcccggaaatccgcgagaaggtaattcagtaccaggaagaatgcgacgacgtactttacgaatactggacgaaaggcgaggtcaaaaacccacgcaaaaagaccacggtcgatgaaagaacgccgcttcgggatgccgttaacatgctggtaagcaaaaggcacatgatgtatccggaagcttacgcgatgatccatcagcgctttaatgttgacagcattgaagatctggagccttcgcagattcctactgccattgagtacgttcaccgcgtagctttggaaggggagttcttgggcaaacaggaaacgcttccagcgccgaagtttgacgttaacattccacttcaatggtggatcgataacaacccgttggttcgcattggcaacttgtcatttggaaagtctctaacagccccgtcatttgacgtgacgatggagatgctttgtggcgacaactctacatctgcggcaattcggctgattaacgttctggaagaggccggctttgatgtttcggcaccgaaggctgaaattgtggcgatgcgcaaacatctgggtaatgtcgagtacggcatgaaggctatcgcagatgcttgccgccgggcggggaataaaactatctcgttccgtggcggaaaggctgaatacgtaattggttag

SEQ ID NO: 269715 - DNA, 543 bp, Klebsiella pneumoniae
atgcataagagcattattgccctccccatcaaggggcaacgaaaacatattgagaaagtgaaagtggacattgctaacctgaatgcacatgcgcttatgaatactgccgagagcttaattgtaatgctgcgtaagaataagaaaacaactattagcaaggttgtaacagagtggaacgcttgcgtagagcaatcaggttatacaaccacttttgacctcccggctgaagactggacacgtaaagcacaggtagttacagatttagaacgctgtactgctcagcttgaagaattggtttttgccactgaaacattaactgtgagggcttctaacaatgatgctcaaacacctaatgttttaactaaacctgaaggggggggtaatatgtatttttctgaactattcgtaagtgagcaatttcgtgatttgtcagatggcaaaatccacaccaaaacagcacgggaaacaggtgttattaacgccattggatctaatggcaatacagctactttctttgctgaagatgaagttgagcgagtataa

SEQ ID NO: 269716 - DNA, 195 bp, Klebsiella pneumoniae
atgggtactaaaaaatttattgaactggaggtgggggacgttatcgtccctgttccgggaatggaaataacagtgacgtctgcgcccgtcctgaccaaaacagatgatggtgaaaattacaccctgaaagggaggcggaatggtaaggaagttggtctggccgggttttccagttcggctattgaagtcaaataa

SEQ ID NO: 269717 - DNA, 360 bp, Klebsiella pneumoniae
atgtccgaaaccaaaaacactacgccgtttagccagcagttggcgtacatcaacaaaggcaccctcgatgccgaactgaccgaagcgctggcagaggtagtcaaggcagtacgagaaacgcgtaaaaaaggcgcggtaacgttgactctgaattgttcaatgctgaacggacgggatgaaaacgtgatgaaggtgacccctaaagtgacaaggtcaattcctgagctggaacgcgccgatactattatgttctcaactcacgatggctctttgttacgcgatgatccagaccaacatcagcttgatttaaaagttatcgaccaggccccacaaactgcgcctattaagctggcccagtaa

SEQ ID NO: 269718 - DNA, 423 bp, Klebsiella pneumoniae
atgctcgatgaaattcgttttaaagggtttgatttagaaggttcttccttatctatacatgatgatgacaactctgagggtggaaaatatagtcttaaattctctgagcatcgtgttgttcctcagaaagatgaagatggtaactgggttttcattgaggttaaaccatcaattacagggtacccacgcgacaaagaagaggttgacgacggggagggtaccctctttcgggctgaagctacaatcactcttacatttgaatgtaatttgccagatgaattaagtgaagaattttataacgagaattcttggtttttcgaaaactatgtctacatctgcacaaagatcgtttttgaaaacatgtttaaaaatacaatactcgatacaataaacttaccatggtcccctaaatcttcggattga

SEQ ID NO: 269719 - DNA, 459 bp, Klebsiella pneumoniae
atgaataacctgatgaaatacaaaggttactacgggagttccagcatctctatcgaggatggggttatgcatggaaagcttgagtgcataaacgatcttgtcacatatgaaggttcaaccgtcgctgaactccgagcagcctttgaagaagctgtagatgactatcttttgacatgtgaagagattggcaaatctccggacaagaccatgagtggatcattcaatgtgcgcattggtgaatatttgcacaaaaaggcatatctggctgctaaatcacgtggcatgactctgaatgattatgtcaagcaggctgtagaagatgctataaatggtagaaaagaagtgcattaccatttcgaaaagccgcgcgacataaggggagtttctttcatctcctcgcggaaacggactgaagaaacatactgggaagtaactgttgacaatggagtgcagcattaa

SEQ ID NO: 269720 - DNA, 243 bp, Klebsiella pneumoniae
atggaaactttaagagaatacctaaacgccttatcgcttgataagcaaagagaattttcaaaaaaatgcgatacatctcttgaatatctgcgtaaggcaattagcaaaaagcaaaaattaggagccgcgctatctgtttctattgaaaagaattcaggtggcttcgttagcaggaaaaaccttcacccggatgactgggagaagatttggcctgagttagatcataaaaaatctgcggcctga

SEQ ID NO: 269721 - DNA, 1065 bp, Klebsiella pneumoniae
atgatgagcgaacctactaaatcggaattattgaacgcaaaaataaaaatcgaaagagataagagaataagaaatacagcaattgtagttccggcaatcttaggattgatcttcgttctatatggctattatttcacaaccaataattcctcagacattattttaatatcaaagctcttgggccccctgttaataataatatcagccttctttatacttacatattatctgcaaactggttttaaaaaccaaaccattgaggatgagatatataagaataagaaacaaatagaaaccagctcaaccacaaatacaacaaacctcatcattaacaatcaagaagatatatcaaacattaaggattccattaagctcattgaggataaaataaacgcaattgaatcttttgatgaattattaccacccaatcaaaccgaagaaatcgtaaacaccttaaaaaccagaatagttagtgaatccattagtgaagcttcaaaagacatcttgaataacatcaatgaaaatcttaaaaagaactttaatatttttgaagtagatagggtcttaacacaaacaattaaacgtcttgatttagaaattgacaccttatctagaagagggaatataaacctaagttgtggagtagtaacaacagttatagggttaggtgtcctcgcttactttgtatatgaaataggcacaccgccattaaatgataatttctcatatattgcaaatttcatcccaagactttcggtagtaatactgattgaggtttttgcttttttctttttgaaactttacaaatcaactctttctgagatgaaatattttcagaacgaaataaccaacaccgaagctaagttggctgcaataaaatgttccatcgtaacatctgataaagatgggatttccacagtaataaatgaactaataaaaacagaaaggaatgcaatcattgaaaaaggtcaaaccactgttgaaattgaaaaaaaccgtattgaacaacaaaatacaacattaatacttgataagttaacaaaaattttagcagttaaaaaatag

SEQ ID NO: 269722 - DNA, 129 bp, Klebsiella pneumoniae
atgattaagctgtgtgtcgaagtgaccattcttatcacgttacacaaaaaaatgcggaccgcgctagtgctttttttatattttttttgtaaattattactattatacaatgcatcaaatgagacataa

SEQ ID NO: 269723 - DNA, 1296 bp, Klebsiella pneumoniae
atgggaatacaaccgccaaaaggtgacgattacaaactggggaaaggggaatcaaatcagaaggtaactacaaaaagcaacccaactgaaaatgcttttaaaagccgccttcttgatttacaaaaacaagctgctctcattgaaactactggcaaaaaaactgcagaagttacagagtttgaaaaattaaattttgatataacaagtggtaacctaaagaaattatcagaagcgcaaaaaaaccaacttcgagatgcggctaagttcctagactccaagaaggaagagttacgccttaatcaggaaaacgcgaaagtagctgagtacgtatcaggccttgaaagacagaataaattaattaagcagggatatgatagtgaatttattgggcgttattctggcgatcgagagcgtagccggatgcaagagcgcaacagtattcagcaggagtatgaggggagtcgcgatgatttattaaagcaataccaatccggagatatttctaaaagtctttatgacgctgaaactgaagctttgcaggatgcactgaataagaggctagaaattcaaaatgattattataaacaacaggatgaattacagaatgattacagtgctgggttaatttctggttttgctacacaggctactgctgcgatggatttgtactccacaatgcagcaggttggggcgcaaacattcagcagcatgaccgacatgattatagcttgggcagaaactggaaagttgaacgctcaagattttgcagcgacctttatacagtctgtaggtgcggcaatgctgcaatatgccgctgctcaggtagcaatggcggcacttaatgccttcacgcaatggataggtgttccttacgttggcccggcggtggctccggctcaagcaattgcagcagctgcagcagctggcgtgttcatgactgctatcggatcggcacttcatggacaggctcacgacggtatcgactctgtgcccgaaacaggaacctggctcctgcagaaaggtgagcgcgttacgactgctaaaaccagcgcaaaacttgatgccactctggatcgagtagcaaaccagtcaacagggggggcaacctatgcgccgagtatgagtttctatgtcaacggcgatccctctgatgctcaaatcgccatgatgaagaaagctgcatccgatggggctcagatggggtatcaaaaagcggttcagtctattgctaccggacagggtgatttacatagagctctgatggggaaaactacctcggggaggaaaattagctga

SEQ ID NO: 269724 - DNA, 780 bp, Klebsiella pneumoniae
atggatattgagctttttaaatttgctttttttcctgactttgaaaataggataaaagaactggccgagaatctagctgataaagaaaactgggacttctcaacaggcggtagaaaaaattcaattttgaagaattatatctttcatacctttagcaaaataaaagaagagaataaaatcgtcttttctgctgggaatgcacatgcgtgtttcaataccgggcttgttacaagcaactgggaagagatagtcgctttctttgagaagacaaaaaatacaaagtcaaggcagccttatttctttaaaggttttttcaaaataagccacagaaatataactgataaatttaataatacaccacaggttgccgattattttaagaactcaggtgattttatatttaaccctcatcttgagataaaggcggatatagctcacattatatctgataatatagacaggtttcctgctaatttcaaaacaatgcctgaaatgcaggttaggactatattggatggcgcaataaaaactacagtgaataggcttaagacaaattatactattgctgttccgcagtactatggcggtagcattcagctacttatccctttgcatctgacttactcgggggcaaaccctgatttggctcttgtcgtgaaccggtcagaggggcagcaattttacacatccagaacatgcttaacattagagatggcatataacaatgctaggttgatagtgaaaccacttagcagttggttgtctgccgataagatataa

SEQ ID NO: 269725 - DNA, 585 bp, Klebsiella pneumoniae
atggggaacggacaactgataatcccccactctgctcgccaccatcagaccggatgcagaaccatcctgatagcggatcagcgcacgggggttttcgaaagaccagtccagcggctccgtaacggtgaaggttgtcacgccaccagccgttgtcatcgcctccaccagacaggaaatcgtgttgttccccggaatatcatccgtgagcacgatgcgatcgcctgtgttgtagcacagcgcatccagctcggtagtggtctggaacgtcacccgctgctgcaggtatttcatcaggcggcgcatgccgatctggtaggcgtgatcctgagaaagtaccccatcgagtttgtagttctcgattttcaccggtgtgggattatcgggtgtccgacatttaacagtctcctccgcccaggtgacgccgttgatgtacgtcacgtcgacaccatcaaaatcatcgtcggacggtacggtaaatccgctctgcagctcctccaccatctcatgcggagtgatcacgccggtccagggcttaatcccctcacggttgaccgtcgccaggccatcactcagcagaaaacgtga

SEQ ID NO: 269726 - DNA, 3873 bp, Klebsiella pneumoniae
atgagcacatataaaacaaatcatccgttggggtctgcggctgtcaaagatctttatgacaatgctgaaaatttagatgttgctataaacagtattacagaggctatctggacagaccgtctcggaaaagaaagaaaaacctggtttggcatggagtccgagtttaactccgatcaattgaacaggtctgaaacatttcaggttatgatttcttcgcaggaaattgcatttgactaccagctccatcagcaggcgcaaatgttcactacagccatgcttgaacagaaaaatgcatgggatgaccagatggaggaccagaaagatgaatttatcgatctgctcacttcttccggatattcgtggctcaatgattacattgatggcccagtgacattctttaatcgtagtcaggtaacagtctataatggcgtggcatatcgtcttgctgcttccactcctgttggcttcacgaccacaggaaccagcgcggaatcctggaccaatgacaaggataatctggtcccgatcggcgacaatgatatacgccagcaggtacagtatcagctcggtaaatggcttccttctgcagccgcactgatgctcagcgaagaggatgcctcagcgatttatgttcgcgggttctatggcgtgaatgacgggggtgcgggtacctggctggcgacagggacgaccatcgtcggtaacgcaggtaagcacattccttcaactgcaaaaatatacaataaaaacggtgttgaatattcgttagatatctccagcggggttatcaatgtgctggctaacggattaaaaccctatacttatgcacagtgtaaggatgaatcaactgacaattatgtatgcgcagcggaagcccataacgggataatttctctgcttcctccagcagtgtacacatccaataatgaagaaagttataccgggggaagaagacttaaaataaacttcccatctgtaaggacacgttttgggaaaacatatttcaagaaagcatctggtgtctgcgtaaatgggaataatgtaaggctaattctttgcgccggaccatcaactaagttttccacaactggtataagaatcgacggatttagccacgggtataatgaaataaaagataaatgggatgccgtaaacaccaacctatactgggggtcgctcagcctgcaggattataagatgcaggatatcattctaatcggcgatcatgatataacgaaaacggccagcgcgtgcacgggtggcgtaggtaacatgactctcaaccctgaaggcgaaatcgtttcaggggtaaaagttaaagattttaactgggatcgtgttgcgatgcccagtcagattgaagcgacttacttcaatcagcagggtcacgcgtttgataataatgcattagattataaatatataacagatttcatggtgaactcatctggtgtccccacacgagccggaaattttaaccgtgtcaaagaagacaattgtaagtatgagtccgggaggcgcggcgtttaccgcaacgcctgcgactggacaaccttaaccaactgcgaaatcatcaaccgcagggcatggcggcagtccggaaacgttgatggaactatcccggaatacatagcggtatgtaccggaactgctatgcacgttgccggggggtactggggccccgcagcagcaaaagattataacggtcgcctcggaacggtctatgggactgcacaaaaccacgtattcagtggtgtgtacactgaatggacttacaacttctacactgtttcacgctggggctttaacggcaaggcaagccgactctttagtctgcatcttgattgcataagcacgtataaagatgacgccagaaattactgtatgctccggtttgaaggcggttgcttcccgacaacggatgatggtggtaactcactatacccggacggcttctatcattacgatacgccaaacggtctgtcgggactgtcatttaatagtccgttacgcgactggggtgcatttcatcacgggggttatgataataaattcgggccgtataactggtttgttggtgcaggtactgactgggattcatggcgtgaccggccttatgcaaaggaaatgtttaacccatacggatttgcgataaatgctggtccggcgatggccctatgggccaacccatctataaaatcagagatagggatttggattaaagacccgagcggaaactttgatccccaaagagtttacgcctggataacagcggcagggcaggaaagcacaggcaatacggatacagctctttacaaagcccaggcagaactatgggttgattttaataacgggtataagttattaaaaataacaaacaaacgccttacagcctgggatggactgtttagttatcagcggaactgcggtatttactttgacgttccagctgatggaagcacgccgatcgttgttaaggccatcgaggcttacacgggtggcatacctgtattccctaacggctgcggaaattacgttcctgaatcagccgcaaatagcgttctcagcacagccaccaatatagtaggagcgggattctctattggtggtgggattttttcacctggtgatattgttggcccatgggttcatgcgagacggacgaagtctgattacatcatctccccgacgctgaccagtggttacacgctggatcaaaaaatggtgacaggtggttgcacgctggaagccgcatttaaagtggcattcagcgcgaccgttgaaacggtaaatagtaatgccacaacaataatcagcatacctgccgcttatttgccttacgttgctgtgggaataccgctgtatatcaccggcggctcatcaaccggcgtgaccggtcaagttcggctgattaagcgtctgctgaacagtgacggaacatcgtctaaccgttacctcgtacaaggaaacaccggggcggtgggtgatactctgaccatcgaccaggcgcaaattccgccgtacacgttctataatgaccgcaacttcaatgctgttaccgcgacttcagtgactgtcaacggggtgtcggtagcaaacgcacacaggtctacatactcttcagccattggctatggtggcgcgtcaggagctaaagccctggagttctacgtcaatggtggaaccacctacacgcaaaggattgttgccacgtctacgacggtaatgagcctggaaaccggcgggaacttgtcagtaaacgggaatacctacccgaatgctgacggcacctattcgcttggcaccccatccggtcgctggtcgcaggtttttgcatcgaatagcgttatcgggacgtcagacgagacgcacaaaacccgcccacgggcagacacgccggcggaaaccgacgcctattatgaaatcgggcagctccccggcgtctggcagtggctggaaaaatatatggtcgaaggggatgacgcccgcctgcactccgggccgaccgtgcaggcggcgattgccgtgatggataagtacggtcttgactggcgggaatattccgcattctgctatgacgagtgggacgcacaggatgcgattatcgagacctgggatgacgagtgggaggtgatacccggcaccccggctgaactggacgaggagggtaacgtagttgttgaggcggtaccggaaacgcgcaccctcatcagatcggccgggagcaatgttatccaggaggcgcgagaagccgggagtgtctacgcatttcgtaaggaggaactgctcttctggataagcagggcaaccattgcaaaacagcaggatattgaaaaacgcctggcagcaattgaagccagcatgtcatcgtaa

SEQ ID NO: 269727 - DNA, 519 bp, Klebsiella pneumoniae
gtggtaatcttcggttttgttgaagaatgctggctcaaccatccggtgacagcagttgagccaaacgaaacgggcaatcaggaaaaatatgctcgttacttgtgcccgatcaagctactgctgggtcaaaaactctgtggcatattcaacagtgtcgagagaggcacatcccgacatgccaaaataccggcgatcatcgacaccgttgatcctgaaagggacaagggttcctgtatagcctatctggacgctcagttcttcaatcactatgtcccgacgctccagctgtggcttagcgaaaatgcgctctctgttcacgagtatgtcctgaatgacggcatcggttgcctgacccgctgtaaccctgggacaggccttgatatctgctctgagcgatgctttcgactcaaaataatacagcgcgataagtccgcacagcagcaacacaatgcccgccatacccagaccaacacccttcaggaacctggacatataacatcaccaatagcatatggatga

SEQ ID NO: 269728 - DNA, 534 bp, Klebsiella pneumoniae
atgtattcaaacaatcagagaaggactttttgtttgaataccttcgctgtagcgatctgtttgcagcgatgcttaacagttgaatattgcttgattttcaccagagactcaaatggagtgggtatggttcagtttacaaattttatttattctattgttaatactgtcgcaccttttatgacaagtactgttttaatatatatatttgtgtttgctatggtgattttaatatgcgacatgttatttgggggtggttctttttttgaatggttttgctacattatgataggtctggcactggcaggagtatttgtctatattctggcattgtttttatcaccaatttacgaaaaggaacaggactggcgtaactgggctaaagaacactgtaaagttatcgaaaaaagagaaggtgctaccacgacgggagtgggtgtttcattaaaaggtcaggcgggtgtatttcttggaggggaacctgatcagacagggtatctctgtgacgatggtgtaacgtactggaagaatgaataa

SEQ ID NO: 269729 - DNA, 423 bp, Klebsiella pneumoniae
atggcaatcccgaggctctgtctttttttcattattattgtactgttggcttggggagctacgggattgaacgccaaagagtcgatcgcgtttactatttttggcttagaggttccagtcatagtatgttcatccataggtatcgtggttgttagggcagtttgttgttttgtattcgaagagccaagggctttttttacaaaaatgccaggggcttatcgtaagattgctgccgggttaatttcggttactttgtggaaccttatatttaccgtaatgttgcagtatggtaaaccactcaccatactcggctttcaattttactattttccggcgatttgtatttacattctcacattagttttgggtttaagtgcggtggggtggatatttttcgccgtgagcaaaaaatcgtataattga

SEQ ID NO: 269730 - DNA, 303 bp, Klebsiella pneumoniae
atgaaaaactactactcgatctacaaatctggtgataattggattatcaaaacttccaataatatcagccaacttaacaaaaatcagttcagaacacaaaaagaagccataagtgcagccaagaatttaatcaagaatggtggtgttattgctgttcacactccaaatggagaagtaagggatgttatatctcaacccagtaattcatggggaattaaaaaagcaaacaccacctctagtagggttaacaaacaatctgtattcaggacgttagctagtcatattgaaaaagacaaggtttaa

SEQ ID NO: 269731 - DNA, 621 bp, Klebsiella pneumoniae
atggcatatgataccagtgtttttataaattgcccttttgataacgcttacgatcaattttttgacgcagctttgtttgctatctatagatgtaaatttaaaccccgctgcgcgctagaaataaatgatgcaggagacctgcgcattgacaaaattaacaaaataatcaaagagtgcaaagttggcattcatgacatatcaagaacagagttagatgaagatagtggtctgcctcgatttaatatgccccttgaattgggcttattcctgggggcgaaaaaattcagctctacgcaaaaacagaaaaataaacataccattattgttgatcgtgaaaggcatcgatatcaaagatatatttcagatatagcaggccaagatatcatggctcacaacaacacaacagacgacttaatcagaatcattcgcaacgctctaaactcctatgggatagtagatgccttaccatcagcacaaattatcattcaggattacaataagtttcttgatttaaaacctgagatttgcgctggatctcagctggacattaatgacctaacatatagcgacaaaaccaggataattgagctgtaccttgaattcaacgcttctgttaattga

SEQ ID NO: 269732 - DNA, 450 bp, Klebsiella pneumoniae; identical to SEQ ID NO: 100764

SEQ ID NO: 269733 - DNA, 1938 bp, Klebsiella pneumoniae; identical to SEQ ID NO: 100763

SEQ ID NO: 269734 - DNA, 1800 bp, Klebsiella pneumoniae; identical to SEQ ID NO: 100762

SEQ ID NO: 269735 - DNA, 1194 bp, Klebsiella pneumoniae; identical to SEQ ID NO: 100761

SEQ ID NO: 269736 - DNA, 1260 bp, Klebsiella pneumoniae; identical to SEQ ID NO: 100759

SEQ ID NO: 269737 - DNA, 642 bp, Klebsiella pneumoniae
atgagtaagtacgagcgcccgtttgtatatactagatataatagcatgttttttttggttgtggttatgatttcatctatcgcaacattaattccgtctgttatgctgtatcatgtcagcttggacatggctttttcatttatgtttacttcagagtttttaattgcgtttttgatttatttgttttatttaagggagcttccagagtgtagaatacgaataaaaacagatgtagcgacagccaagacctcagctctttcattccttacaatcatttttattcagcttgtagtttactgttatagggactatttgtatcattttgagccatcgcagataaactggatagcggttttggtagcaactctggtcgtaccctactatgaagagatcgtttacagagtctgtgctttcggttttctgtgctcaatctttagaaaaaacctactcatacctagtttgattacatctgtgtttttttgtgttatgcattcgcagtattataacattctggaccaagcgattctttttgttgtgtctatgttgctgttaaaggtaagaataaagagtaaaggcattttctatcctatggtaatacatgccggtatgaatttttttgttctaatgttaaatattctatga

SEQ ID NO: 269738 - DNA, 879 bp, Klebsiella pneumoniae
atgaaacggggcgtaatatctttaccaaagaaattgctgtcaatcaatgatggcaaaagattaagaacaggggaatcactctcaattgtagaccttaactattttgctctttattgggatgaactagtagtgccggcgagtagactcttatatctggcattacctgaggaaaagtcattcattgattctggttttttaaaaaggcctgacattccaatgctaggaggatactttaatagttcagatgtggtttcaatgcatgcaaactcacttgattattttttgaatgtaaaaagaaaaaaagagaaagattctcactggtcccttaatatcataggaaacgaattttataatggtgattgtgaaagtgaaataaaggattcattcaggcttgagttgtcaaaggctattcctgttcctgatgcatctgtgaatgttaatgatattttagagtttaagatgaaaaggcagcctgaattagcggcattgcatcagtatcttgatgagttatatttagaggttgtctcttctggtgattttaacctttccagggccaaggcgttccataaattatctaatacgttaagtgacttggataagttaaataatgaagggtggcgtagtcccataaaatttgacacatctgcactctttgaggctaataatggagacttgatgagtggtgcctctgcgctctactctatatgggaggcgaatcagggtaacctgactggggcaattactgcgggtgtggctgctgtgattggtcagggttttgcaaggttaaaaccgagcatacagagtgtcagaagaaagccgggtaatactattgcatatttatcttctgcacataaggaatcaatattgaaaaaatcatga

SEQ ID NO: 269739 - DNA, 294 bp, Klebsiella pneumoniae; identical to SEQ ID NO: 237375

SEQ ID NO: 269740 - DNA, 657 bp, Klebsiella pneumoniae
atgttattcttttttagcgttaatccaacagtatcatcctcgtacaaattatctaaaacaatgatcattattaatgattatttgaaaggaatttcaagtgattatagtaatatttttatgacatcattggtaaatactgctgaaaatatcaattttggtgataatgacaatggattatttatagatgattttatatccattgaaaaggtcaatttaattttggcagcaacgttttttggggataaccacctggtaagtgaatctttttttgatgggattttgcacaaaaagaaattagattactttacaatcatatccttattattctatttcaggaatagaaattcatttcaggcacttaagagtatagttgaaagaaaaattatagaattactatgtccagatatggatttgttacagtcttcggagaaggcacatttatttttggatgtaatgtcttgtccatttgtatcaataaaaacaagaagatttatatatataagatatctaaagtgttttgagccaaaaaatctaagaacccactctgagattgagaatgatttgcaatcaatgctccaatgctactggtttgtcaagtgggatgagttagatcttttaaagatgatagagaaaaaagaattgaaggaaacttattga

SEQ ID NO: 269741 - DNA, 1776 bp, Klebsiella pneumoniae
atgaaatattctcaacttacggatagttccttctggttagctctacaacaaaggaaggatttggaaaagtatggcaatctaaattgcgctttatatgcaatagaattacataacaatatagatagtattgatttgatagcgcctgatatcataactgaaggtggagatgacgaaaatattgacatattaatgacggatagggaaagtaagcaaatttatctaatacaatcttatcagtctgccatatttcgacctcaaggagccaagccctcaaaagctcaagaaacatcttatgctgagacagcattactttcggctgatattgataatatcccactaagaatcagggaacaggttagtgatgcaagagaagctttgagaaataaggaagttgataaaataaatgtatggtttattcataattgtccagaaaccgaagaatgtgagagacctttacattcgatcggtcgtgctattatggataaaataaaagcgatctatcagattgaaaatttgagagttagttctaagcaaatgggattgaattctcttgatgagctttataattcccagcatagcccgattttgatatctgataagatatcgttaacagatattcatgggttttatcagagttcagatacacactgggcatccttttccacatttgtaactggtaagtttatcaaagatctctatagtagttatggtgaggatcgtttatttagtgcaaatgttagatcttatttgggtagcaataaaaaagacctatcaattaataaggagattcagaatacggctaagtctcaccctcaaaacttttttgtttttaataatggcattacggcattagtacacgactttgaactggatttatatgctgactcaccaatcttagggcaattaaaaagtgtgacgggcatatctattgttaatggcgctcaaacaactggaagtatttctaatattgatacagaacctgatgatgatttaaaaattgctattagattcattaaggtggaaaatcctgagttaattaacgaaatcaccctggccaataactcacaaaataaagtgttgcgttcagattttcgctctagtgatccaattcaaaaaagattaaggcgagattttagtcaaaacaaagagtctttatatactggtgggcttcgccaagttttaacgccagcgcagaaaagaattctccttcccacggatacagtagctcaaatattgatagcatttcacgaacatcctactagtgcatatcataggaaaaaagatatttgggatgatgaagaactgtatcaaaaagcttttgacgataccataaccatgggtcatataatttttgtttattctctaaatgaagcaattagtcaaaccaaatcggagtttaatgagcagtacaggcataatcaactccctgaagtagatgctattaaacataagttattaactcagccaggtgtgtcattattaatgatacacgccatcgccagtataatggaaattatacttggttcagcaattcccaataaatatattttatccttcaaggaaggcgtaaaaagagaccaggcaaaagagctctggttgccggtaataaaaagagtgttaacgagatctgcattacttgagccagcaacagcaggtagactttctaagcgaaaagacatatcggagataataactcgcttccaaagtgatatggatatgtatcgagatgactttaaagttcttctgccggagtttatttcaaaaatttattattaa

SEQ ID NO: 269742 - DNA, 723 bp, Klebsiella pneumoniae
atgaaaatgtgtagagtgaccaaaaagacaatgtccgatggttggactattaaagaaatcgattatcacaattatgaaggacaccatcactactattatttaggtaagagagctccggttgtaaaggtcggagaggaaaagttcgttaaacagtatgctggttatacgctgatcgagaaggatttacgcagcatacttgtatggttgaatgagatagagaatataaatccaggaccttttgctcgatacgaaaacccactgcaaatggatttagtaaaaggttattttgttgcggctttgactttctacggtaaatgcttcactgcaagcaaaggaagaggacttaagtatgatagagttaacgtacctgaagaacatagagaaacacatgacaccattatggaaatgcgtcataatttcacagctcatagtggcattggatttgaaagtgtaaaggtaagcttagtgttgcatcctgacatatattccgatatggaacctcaactctacacggaattaaggcagcctgacctttccaaaaatttaattaaagaaatgataatcatagttaaaaaacttcaggagcaaacccttaaaaaaagaacagccgtaggcgataaatttctaactgagattgtccgaccacaaggtaaattattttggtatcaaagaggtacttatgatgaattttacatcccagagattccctctgatgattattag

SEQ ID NO: 269743 - DNA, 1428 bp, Klebsiella pneumoniae
atgttattttgttcattttctatactaccccggttatcgttgcgtggtacctctatgagtagtgctgcgcgtagttttaaaagatgttttacagtaaaaaatttaaagacaatttatttcgaaaaaattaaagggtcaggagctattggcattgatcgcgttagaccaaatggttttgagaaaaattatgctactgaattgtcattgattgcaaggaaagttactgatggaagctataaatttactgcatataaggaaaagttaatatcgaagggggcatattcatacccccgacagatatctattccaactgttcgagatcgaatcacgcttagagctctatgtgagtctctctcagaagtttttccgaatgcaaaactatccctaccacaaatagtaatagaatcacttaaggatgctattgaatctgggcaatataacgaatttgctaaaattgatcttaaaaacttttatccttcgattccccacgaattaattgaaagctcgataaaaaacaagatcagaaaagttgagtacagaacacttatcagcaatgctatttcaactccgacagtcaatgaatctaaaggaagtaaaggttcagtgagaaatggaattggagtgcctcaaggattatctatttcaaatgttctagcagaaattgcattgcaaaatattgacgaaaaaataaacctcattccaaatatttggtataaacgttatgtagatgacatccttatccttaccacgtctggaaaatccgctgaagtagctgatgcaattataaataagctggagcatataggtcttttcccacatcccattggtgcaactgattcaaaatcgaaagtgggagtattgagtgaggcttttaattttttaggctatgaggtaagcgaaaaagggattgcaatcaaaaaagatagtatattgcgctttgaatcatcacttgcaaaaatatttaccgcttatcgacacgcattaactaaagcaaaaaataataaagataaacaacgtgcagttgcttactgtcaatggaagcttaatttacgcattacaggatgtgtatttgatgggaagcgtatggggtgggtggcttacttctctcaaatatccagcacaactcaactccgagccgttaatcatactatagcaaagttgattaaacgatttgaagtacaagacattataaaaccgaaatcactgattaaaacattctacgagtggcatcgagggaataaaaactctcacaaatacatcccaaactttgatgatttatcagtcgagcaacaaagagcaatagtttctctatgggttggagcagaagaagctagtaagctaaacaatgcagcagtagtaagaatgtttaattataaaattgcctcatctgtcaaagagcttgagcaggacatcgccggtttttcatag

SEQ ID NO: 269744 - DNA, 540 bp, Klebsiella pneumoniae
atgctcgacaaggtatggtttacctataaggcgcggattcaggcacaccatcggttagaatggatggatacgcattctcaatttcttcttgtttggtacgctatcttaggtgctgcgttagctgttgttgcaattcgataccctacattactgggtaaaaacacagatatttttggcgcaattttatctattgcattacttggtgtatcgctgtctgttgcaaatcgagatttccgcggcagggcgctgaatatgcgaaaaaattatttggcattgcaacacctgtacaatgttataaacactagaaatgccattcaatcagaagatatcgctaaatatgatgagttaatgaatgatgtagaaaatcaccgagccatggacgataagacgttccgggtacgcaacgcatcacagttgacatctcggaagccaaggagaagggaatatttccaagtatatttttttacagtattcaaatatgttattttgttcattttctatactaccccggttatcgttgcgtggtacctctatgagtag

SEQ ID NO: 269745 - DNA, 249 bp, Klebsiella pneumoniae
atggatatacaggcgccttattatcggcaggttgctctgctaatgcaggttttaccctatgttgctgtcgaacgggaatttgcgctgaaaggtggcactgccatcaatcctttatccgcgatttccctcgattatcggtggatatcgacctcgcctgggtgcccctggaaagcagagccatcgctttacctcatatacgggatgcgcttgcacgtattgccgccaatctgcaacaacaggcaggtatga

SEQ ID NO: 269746 - DNA, 852 bp, Klebsiella pneumoniae
atgaaaaactggtcgcgagagcacaatcaggagatcagaacctggtttgatatcgataactaccgggcactggaaaattgtactctttatgcactttactacgaactttgggcgagggctctgctttacaagcctgggccgagtgatgaggagaagaagtggctgtggcagtatatggtcaaaattttcgatggaaggcctctccttttcgatgaaacgtcactggatttcgaggcggattatgactgcctctacaaccctcctcatgtgttcttgacggatatcaccagactggcgcagctcggcgtttctgcactgtcagcagagctctttacatgggatggcggagatgtttactgcgttaacttaccgcaccatcaggcctatgtgtctgaggtgatggcgccgttatgtgaaaataccgtaatgctagaaattgatctcgcgagtggcacagatgatgagataaccgcctccataaaatcggtactccctcaatggcgaaagattaagaatgtcacgatagatcaatccggtgtggttaggtttgggtatgggacaatcaaaaaaatcatcagctatcgcctggtggcaatgctggatatcttactttgggcaaaaagacacgaagtgagaatttcagatgatcgtctttcccgccttttgtataccgacgacgatgatgaatctgtcgttcgtcagcagaaccatataaaagactccgatcgaccccttgcgatgaaagcagccacaatcgactttatcaagcagttcaatctgttcattaaccgtaacgctcacattaaaaatatgagagtttcggacgtgatgaaactcgcggattctggctga

SEQ ID NO: 269747 - DNA, 309 bp, Klebsiella pneumoniae
atgaacataagtgattttgagcagtacgaaggctattgggaaattattgatgataacctttttgacgaaattttttatattgatcgtattgaaaaactggagccaactgaaaaggtcatggaggccattgagttgctgagtcgtttatttactgacgacagaatggaaatgttggaagaagtccgtcaaatgaatatgcttgctcaggctgatatatttgatttgtggtttgatataataaaatcacgggattacgtagaaggagtagcgaaagcagtgatctattatagtattggtatgcctgtgtga

SEQ ID NO: 269748 - DNA, 564 bp, Klebsiella pneumoniae
atgtcaaataccaatatcacgttaagcagacaacaaaaatccgttatagcaaaagcccttgacgtcagtcctgaagaattagaagaaataagtatcaaaaccagcatacacaaaaaaacgtcatttcgtgacgacttctcactggtattcaaaggtaacattgccactctcgcgagaatgaaactgacacccacgtcatttaaaatcgttatctatctgttttcgatcctggattacggtaacattcttattaatttttcacagtccaaaattgcaaaagaactcggactatgtaaatccaatgtttcacgtgcattcagagaattatttgagaagaaaatactgcttcgtgacaccgaacatgaccatgtttacctgaactcaaatctctgtgtaaaaggcattccgcgccgcttcaatgaagagcagatggataagtttaaaaaatccaggatagataccgaggattttgacgatgccttcaatctttaccattcgggcaggaaagtaaagccaaacagaaagcccgtaaccctgtttcctgcggacgacataccattttaa

SEQ ID NO: 269749 - DNA, 423 bp, Klebsiella pneumoniae
atgaaagatgatcatactcaggatcaggaagaaaaatttctatgggtgattgataaatacattaccagacattgtcatagcccaaagggcaatgacttttaccgaaaattctatgtgttgtttgtcggttaccatctgaagtatttttatgcgcaggcgaagtacagcaattcctgttttcacgtcgataatattatgcagatgttctctggcgttgcgtcctgtctcaacggcaatctgctcagccagttcacgaacggtaacacactgctgcagtcgctcagctcgctggttaactacatttcacaggatgttgccggggcggaacgcatctatgctgatttactggcacagtatgagaaaaagcgtatcgcgggttcaatgacatacactccgcgccctggtgccaggaaaaggttatga

SEQ ID NO: 269750 - DNA, 1188 bp, Klebsiella pneumoniae
atgaaaggaatgcagaaaataaagaggggtaaacagtttacaggtgttgttctctacagcctgaaatcaggctctcaccacaaaattacgccttatatcattggcggtaacatgaccggcagcaacgccgctgagctaatcagtgagtttgatagcgctaaaaaaatgcgccccgatgtcgccaaacctgtctggcacaattcgcttcgccttccagaaggagaaacgctgacggtcaggcaatggacagcatttgcggatgagtatatggcccggatgggttttactgacacacatttgcgttgctatatcctccacgacgatttttgtggccagcacatccacataatagctaatcgtatcaacatgaccagtggaaagctgtatctggggaaaaatgaaaatctcatcagcacccgcattatcagtgagctggagattgtgcatggactcacccaaaccacgcaagcaaacggcgttcgtcgtcagaataaaaggaaaccttaccgtaatgaactgaagatggcagaaagaacagcaacgccctgccctaagtcacagttgcagactctgatcgatgatgcattaacctgccgtcccgatttactgacctttgtccgcttactggaacaggaaggtgtggcctgcaaacctaacattgcgtcgacagggaaaatgaacggtttttcatttcagtaccagggcattgcatttaaagcctctcagctcggaaaacaatatggctggtctaccctgcaaacattgatcaatgttacaccagagcaccaggccttactgaaaaaagagcaacagcaggctgtaccagtgccgttatgcgagcctgaagaacaggttgcaaatcgggaaacgattctggagaaaatccttcagcttgaagaaaaaattcgtctggaaagacaacaggaaacagtgggtatcattcaactcagaagcaaactacacaatacaacccgtcagataccccgcaagcgttgtctccattcgtggcttgtattgctcagccatattgcggcacttctcaggcgcaggggtatgtctctgttacatgccacttcacatcctttccaccaaattctgcacctgcatcttctgacaccaggtcattccatggcaataaatcccattaaagaacaattagctacaaaaagccactatcatacgccataa

SEQ ID NO: 269751 - DNA, 693 bp, Klebsiella pneumoniae
gtgggagagattaaaccgctagaactgcttaatgtgctgcataaaattgaaaaacacggggcgttagagaagatgcgcaaagcgcgacagcgctgttcagaagtatttcgttatgccatagctacttggagagctgagtttaatcttgctgcagatctctctagcgccctcgaagtacatcaatctaatcattttccattcctaaaagttggtgagctaccagattttctacgagccttagacagttacgcaagcagtcggcttgtacaagttgctacgaaattacttatgattacgggtgtgagaaccattgaattacgtgcagcattatggcaagaatttgatctggattacgcaatttgggaaattcctactgaaaggatgaaaatgcgcaggtcacatcttgtgcaattgtcgtctcaagcgttagatttactccatgaactcaaagtcatgacagggaactatcgttatgtttttccagggcggaacgatccgaacaaacctatgagtgaagctagtgttaatcaattaatcaagcgaattggctatgttgggagagtgactgatcatggctttcggcatactttttctactatccttcacgatcatgatcttgatactgcttggattgagcttcagttgacccatgttgacaaaaatccaatcagaggtacttataaccatgcttaa

SEQ ID NO: 269752 - DNA, 258 bp, Klebsiella pneumoniae
atgaccacccttacgctacagcaggcctttgaagcctgtcagaagaacgaaaccgcctggctgaactgtaaagccgaactggcggccgcagagcaggaatatcaggaacaggtgctggccggggatgtgcgtataccgggcagaatgcagacactgcgcgatattatcgacgtcaaaaatgggagattaatcaggccgccggacgctatatccgctcccatgaagcggtacagcgcatcagtatccgcaaccggctga

SEQ ID NO: 269753 - DNA, 201 bp, Klebsiella pneumoniae
atgaaccgacaagaattacacgcactgaagaattttgattttctggcgcgcagttttgctcgtatgcacgccctgggtcagccgatagatgttgctgccgtaaccggcaatatgagtgatgaacagcaagcatggttccgggagcgatacgaccactaccgaaagcaggctgagtgggcgagggtgatagaactgcggtga

SEQ ID NO: 269754 - DNA, 933 bp, Klebsiella pneumoniae
atgcgtattcggctatttatttatcttccactatggctactgaccgtttttccctgtgccgccatcaccacgccggagatcgccgcttccgcgctgtcacctgactgcgtgcaataccgggtcgtcggcctgtgctactggctgtactgctcgccgtttggctgcacggtgcgcacctcggtgaaggtcagccatttccgcccggatctggtggtgtcggcttacagcgtcaccgggcaaaatccgtggatggagatgtcgccgctcagcccaccgcttcccggcattgccgaaggcggcggcgacaccaacccgcgctcggccagccagcacagcaaaattcgctttaaaaacgccgacgccattggctttccggctggcgatgaactggcaaaattcttcacccactttggctatatctgctcgccttcatcgcagccttttgaaccttattttctgagccaggtggatacgctggcgtggcgcagcggggggccggagatgacatacccggaagtactgacgccgggcctgcgagaagtcggtaagagcggcgatatgtggggtaatatttacccgcgtgccggggctattagccagacgcacgactataaagccgccgccgtcattgctcagcgcgtggccgatctggtcacccgtgtcgggcagccacacatctacacgccgctcacggccacctcccgcgccggatactggccaccgcccccggttatcgaaggtgacagcagtaaccaccagtggcagatgctcacaccgaaaaaatccgccgcctgttcagtgttcccggacggcagcgttaccgacacctacgccgacaagctggcggcggatggcgcgtacgcctggacgctgtggcggccttacaagtgctgtccgcgacgtggccaaacctttctcggcagcacgggctga

SEQ ID NO: 269755 - DNA, 1869 bp, Klebsiella pneumoniae
atgaaagaaaagaacgaaattaatgaaaaccgtcgcgatttattaaaaggtctggggattgccgctattaccagtctgttgccggaaacaggaagcgcggcacagacacactctgagccaaaagccgactgggatgttccctttactgggacgatcccgcaaacccttcccgaaggctataacatcctgctgataacctgcgatcaggagcgcttcttcgaccgttatccctttcctgtaccgggacgtgagcggctgatgaaaacgggaattacgttcaccaaccatcagaacaccgccaatgtctgcacgccgtcacgctcggtgatgtataccgggctgcatatgccgcagacccggatgttcgataacctcggcttcccgtggatgaattacgatcttgatcccaaattgcgcaccgtgggtcatatgatgcgcgaattaggctactactcggcttacaaagggaagtggcacttaacgcaggagattgaccatcctgtcgcggacaaaccggttgaagatgtcgatatcggggatattccgacaccccgcctgcatcagattatggagggatacggtttttctgactatcacggtattggcgatgtgatcggtaaaagcaagggcggctatttctttgattcagtcactgccggacagacgataagctggttacgtaataccgggcgaccgttgaatgacgataaaaaaccctggtttgctgctgtcaacctcgttaacccgcacgatgtgatgtttattgataccgataaacccggtgaaaaaattcaatggaaaggggtgatggatgataacaaccacacattgcatccaacacagccgccgcataaccgcatttaccaggcaagctggccagattatccattgcccgctaaccgccatcaacctctggacgaaccaggcagacctgcggcccatcaggagtaccagaacgcgcgggcagcaatggaggggcaatttccggacgaagaccgccgctggcgcaagttactggattattatttcaactgtattcgtgacaatgaccagcatcttgaggccattctcaacgaactggataacctgtcattaacagataagacgattattgtgtttacagctgaccacggggaattaggcggatcgcaccagatgcatggcaaaggttcctcgatttataaagaacaaatacatgtgcccatgattatccgtcatccggcttatccggggaatgtccgctgcaacagcgtcaccagccatctggatttagtgccgacactggttggcctgaccggcgttgataaagcaaaacgggataaggttctggcgggaagaaaaggtcgcgacatgagcatattgctggcccagccggaaaaagcgggcctgcacgaactccgttcaggatcgctctattgctacggcatgatcctgtatatggacgcaaactatacggcgagtttcagaaaactggtggcggaaaaactcccccatgaagaatttaaaaaagaaattgctaaaatgcatcctgattttgaatatcgttcagccatcagaatgattaatgacggacagtataaatttgcccgctatttttccctcaaacaacataacacaccgaaaacaatggccgagttactggaaaataacgatgtcgaattattcgatatcgtcaacgatcctgatgaaaaccataatctggcaaaagatccggaagaacatcgggaactgctgatgaaaatgaatgacaagctgaatcagctcatcgccgacgaaatcggtcacgatgacggcagctatatgcccccctttgatggcagtcgctgggatttaacggcagcagaaatacatcagtatatgcgggattaa

SEQ ID NO: 269756 - DNA, 1182 bp, Klebsiella pneumoniae
atgaataattttaataccgttgccaaacctggcggaaatctttgcaatctggcgtgtgactactgtttctaccttgaaaacgatgtggcgcgcccggcctgcccggtcatggacgatgcaacgcttgaagcgtatatccataacaccatcacatcgaccccctcgacggaggtggaattctgctggcagggcggcgagccgacattatgtggactgggcttttttgagaaagtgattgcgctacagcagcgctactgtgccaacaaaaccattcataacagcctgcaaaccaatggcatactgctcaatgataaatgggcccgttttcttaaaaagcatggatttctcgtgggcctgtccattgatggccccccttcactgcacgatacctggcgtaaaacgggtgcgggaaaaccgtcctggacaaaagtcgtccaggctattcgctgccttcagaagcatgatgtgccagtcaatgcgatggttgtcgtcagccgtcagtctgaaaccgaagggaaatccgtctggcactgcctgacccgggagctggacctttgccatatccagtttattcccctggtcgatccctccgccccctggtcagtcaccccggagggctggggaggatttctgcgcgatatctttgacgagtggctggcacaggatgtgggaaaggtattcgtccagttttttgacaatcttcttggcgtgtgggcgggccaacccgccacgctttgcaccatgcaacccacctgcggacaaagcctgctggtggagaaaaacggcgatgtctacagttgcgatcactttgtctccccggaatacaaactgggcaatctgacccgggacgcgatgactgagttagccgactcgccgttacagcggcagtttggccagcagaagtcccggctttccgcacgctgtatagcctgccactggcgttttgcctgccatggcggatgccccaaacaccggattcgctctccggacggcgaagcgcagaactatctgtgtgccggctatctggccttctttcgccatatcaccccttacatgaatgtaatgagaaaacttttaatcagtcaccagcctcccgcgcaggtgatggatgttgttccggaaatacgtaagcaggtcagaaaattaacggagagtggaaatgaaagaaaagaacgaaattaa

SEQ ID NO: 269757 - DNA, 591 bp, Klebsiella pneumoniae
atgcctgaaaaacgaaaacacctcacccgtcatgaggtggggctgatactacgcgcagcagaccggggcgttcatttcgaacgtgattacagccttatccagatgtgttttttacacggcctgcgggtcagcgagctgtgcgggatgcggctgtccgatatcgatttgtccggcggttcggtgtacgtccggcggctgaaaaacagcctctccacccagcatccgctgtttgatgaggaactgccgggcttaatgcgttggctgcatattcgtcgccgctggcgggacgccgattcagactggctgtttttgtcgcagaagggcgggccgctgtcgcgccatcaggtgcggctgctgctcaaacgctacggcgaaatggcggcggtgagcattccggcgcatccgcatatgcttcgccacggctgtggctatgcgctggcggatctgggcaaggatacgcggttaatccaggattatcttgggcaccgcaacatccagcacacggtgatttatacggcgacaaacacgctgaggtttgtggatatgtgggataatgtgagaaaaaaccacacaatttgtgccagaatgtaa

SEQ ID NO: 269758 - DNA, 522 bp, Klebsiella pneumoniae
atgaaaaaaacgatattaggcgcgttcctgatggtatcggctggggtggcaggcagcacgcaggcgtctgacggcaccatccattttaccggcagtatcaccgaccagacctgtaccgtggacagtggctcacaaaacctgaacgtggatctgggcaaggtggcgcagaccgcgctggacggcgcggctgggatgaaagccgccccgacgcgctttaccctcagcctgagcgactgcccggatactgtcaccggggcgaacgtgaagtttgacgggacgtcaaatggcgttaataagaatctgctggcgctggacagtgggaccggagtggcgactggcgttggtattgaaatcgccgataaaaacggcacagctattcccctgcataccgcttctactgactacgccctagctgaaggcagcaacacgctggactttgtcgcccgctatgtctccaccggcaccgccgtgaccacgggtacagccaacggtacctcgcagttcaccattatttacaaataa

SEQ ID NO: 269759 - DNA, 681 bp, Klebsiella pneumoniae
atgaacaggtatgcagacgtgatgctggcgctggtgctggctttcctgagcgtgcaggcacaggccgggatcgtgattggcgggacgcgcgtggtttatgacggggataaaaaagaggcttccgcggctatccgtaacccggagaaatcgggcgtgtatctggtgcaaagctgggtggacagcggcgggcagggcggtaaagccccgtttatcgtcacgccgccgctgtttcgtatcaaccccgatgaagagaatatactgcgcattgtgcgcaccggcggcagcctgccacaggaccgggagtcggtgttctggctgaacgtgaaatcgatcccggccaccgatgacagccagccgcgcaccaatgtgctacaggtggtggtcaagtcgcgcattaagctcttttaccgccccgccgggctggaaggccagcctgagagcgcgtatcacctgctgtctgttgcccgcagcggcaaccgccttaccgtcagcaatcccacgccctatttcgtcacgctgttcaccctgaaggccgacgggcaggaaattaaagaagcggacatggtgccgccgaaaggcagcgtcagcttcacgcttccatcggcgaatataacccatgttacctggcaggctatcagcgactacggcggcgtcagccagaccgaaagccgccgtctgtaa

SEQ ID NO: 269760 - DNA, 2508 bp, Klebsiella pneumoniae
atgaataatccgactccccgcctgatggcatttctgctggcgctgctgctgatcatggttctggtactgggctatctgcgcaatgccgaagcccgcgagaccttcaatgcccacgcgctggaaatcgataaccccggccagccggtggcggatttatccgcctttgccgaatccgacggccagcttcccggcacctaccgggtggccgtctacgtcaacggcgaaaggcagggcgaggcgcaggatatcgccttcgtcgccgggccggataaaaagctcaccgcacagctgacacccgcgatgctgaaagcctggggcgtgaaaactgacgtcttcccggcggtggcggctctgccgccggatcaaccgctggacgatattggtcgctatatcccgatggccgccaccgacctgcgtttcagcaaactccagctaaacgtcagcatcccgcaggcggcgatgaacgccagcgcccgcggctgggtggatccgtccgagtgggacgaaggcgtgcccgccgcgctgctgaactacaacctcagcggcagcaacacctggcgcgacggggagaacggttcggacgacaactactacgccaacctgcaaagcgggttgaaccttggcgcgtggcggctgcgcaactactcgacctggaactacgacgaggacaacggcagccactgggattcggtgaacacgtaccttcagcgggatatccagcgcctgaaggggcaactgacgctcggcgacagctacacgccgtcggacatctttgacagcgtgcagtttcgcggcgcgcaattggcctcggacgacaacatgctgccggacagcctgcgcgggttcgctccggtgatccgcggcattgcgcaatcgaacgcccaggtgaccatcaaacagaacggctacatcatataccagagctacgtggcgccgggcgcgttcaccatcagcgacctctacccgacttcgggcagtggtgacctggaagtgaccatcaaagaggccgacggcagcgagcgcaccttcgtccagccgttctcggcggtgccgatcatgcagcgcgaaggccgcctgaaatacgctctcaccgccgggaaatatcgcagcggcaacgaggacagcgacgaaccggagttcggccaggtcacggcgatttacggcctgccgcatgccattactgtctacggcggcacgctctattcggaggattaccagtccggcgcggcggggcttggttttggcctcggggagttcggatcgctgtccgccgatatcaccgctgcccacaccacgctcaataatgatgacagccacaacgggcagtcgtaccgggtgcagtattcgaaggattttcaggccaccgacaccagcttcacgctggcagcgtaccgctactccaccgccgggttttacaccttccaggaatcgaacgacctgcgtgtggacagcgatgacggctggcggatgacgtacaacaaacgccagcgcctccagctcgatctcagccagagtatcggccgctacggctcgttctttatctccggctaccagcaggattactggcaggaggacggctatgaacgcaccctgagcaccggctggaacggcaacatcgacggcataagctacagcatcacctacagctacagcgactacccggagagcacccagcccgccgaccagcagctggcgttcaatatccaggtgccgctcagccgctttatgccgaatgcctgggcgagctacagcgtcaacaccgcgaaacacggcgacacccgccagcaggttgggctcaacggtactttgctcaccgacaacaatctgagctacagcctccagcagagctacaccaaccacggcgtgggcggctccggcaacattaacgccgactataaaggcgggcagggagaaatcaccggcggctacaactacgacgatgacacgcagcaggtcaactacggactgaagggcggcatcgtggtgcatccgcacggccttacgctttcgcagccactcggggaatcactggctgttgtcagcgcgcccggcgcggatgatgccaaagtgcagaacaacaccggcgtctataccgacgggcgtggctacgcggtggtgccgtacgtcaacccgtacaagaaaaaccgtatcgcgctcgacaccagtacgctcggcgacgaggtagatatcgacaccgccgtacagaccgtgacgccaacgcagggcgcggtggtgatggcggacttcaacactcacgtcgggcggcgcgtgctgatgacgctgctttaccgcgggctgccggtgccgtttggcgcgcaggcgaagctgaaagacggcggcagcgggattgtcggcgacgacgggcaggtgtacctgacgggcgtaccggatgaaggggatatcaccgtgaactggaacggcgcgcagcagtgcgcggtgcattaccgcctgccggagaatgccggaaacgcgccggtaatggaaacagaacaggagtgccgggaatga

SEQ ID NO: 269761 - DNA, 960 bp, Klebsiella pneumoniae
atgaagatttttttcaggttagtttgcctgttagcgctgtgggttgtgtcctcatacgtacaggccggatgcggttatggcaacggtgtaacggcagaagtaccgggttatgtcagttttggcaatgtggtggttcagcgtgatacgccggtcggtagtgtgattgcgactgcgatcaccggagcctataacaacgggaaagcactggccggatgttcgactaactggacactgcgctgggagctttccaaatggggaacgctcagttcggctggagataaagtttataacactaatatttccggcgtggggatacggctgacggcggttaccaatggacggatgcttccctatgaagtcagcgtgaaaggaggaacctatgacacgatacccggtgacgggattaaagcggaactgataaaaacgggagatattaacggaggtacgctggatacgggaatactggctcgcgcctcagtggcgaatcagttttatttcgccaacgtcacgctcaacggcacgaacaccatcagcgcggcagcctgctcggttacgactccccggatggacgttccgctgggcaggcacgataaaaatgagttcagcggccccggcagcaccaccgactggaagacgttcagtattggccttgactgtgatgcgaaggcgcgaattaatgtgcgtatcgatccggcctcgggggcggtagcgggcatgacggacgtgatgaatctcgacaacgggagcggtggggccactgccagcggtatcggcgtccagctctggtttcgtcccaacggcggcagtgcggtgaagttcggccaggagacgtattactggacctcgggctatggcggcagggagactgttcagcttcaggcgcgctattaccagacggcgcagataatcacgcctggcgaggccaacgccacggcgacgtttacgctgagttataaataa

SEQ ID NO: 269762 - DNA, 591 bp, Klebsiella pneumoniae
atgtctgaaaaacgaaaacacctcactcgccatgaggtggagttgatactgcgtgcagcggaccagggcattcatttcgaacgcgattactgcatgatacagatgtgtttcctgcacggtctgcgggtcagcgagctgtgcgggatgcggctgtccgatatcgatttgcccggcggttcggtgtacgtccggcggctgaaaaacagcctctccacccagcatccgctgtttggcgaggaactgccgggcttaatgcgttggctgcatattcgtcaccgctggcgggacgctgactcggactggctgtttttgtcgcagaagggcgggccgctgtcgcgccaccaggtgcggctgctgctcaaacgctacggcgaaatggcggcggtgagcattccggcgcacccgcatatgctgcgtcacggctgcggctacgcgctggcggatctgggcaaggatacgcggttaatccaggattatctcgggcaccgcaacatccagcacacggtgatttatacggcgacaaatacgctgaggtttgtggatatgtggggaaagatgagagaaaaccacacaattcataccagaatgtga

SEQ ID NO: 269763 - DNA, 549 bp, Klebsiella pneumoniae
atgaaaaaaacgatgttaggcgcgttcttgatggtatcagcgggggtggcaggcagcgcgcaggcggtggacggcacgatcaactttaccggcaccgtgacggcggatacctgtacggttgcgatcaacgatcaaaccaatccgaccctcaacctggggaccgtcaacgtcaccgatctggccgcccagggcgataccgggcctgccaccgactttacgctgagcctgagttcttgtccgagcaccgtgacggcagcaagcgttatgttcagcggcgaccaggacaccgggctggatacggcgtttaaaaatgaaacgagcgcgctcgacggcggggcgggcaacgtgggcgtacagctctatgacggttcgcagaaacaaatctcccccgatcaatctgttgatgtgagcagctatctggtggcgaatacggacggcacaagttcatcggcgcagatccccttctccgttcgcatgatcgccgtcggtgataccgcaaccgcggggtcgctggtttcccacgcggattacaccattaactaccagtaa

SEQ ID NO: 269764 - DNA, 708 bp, Klebsiella pneumoniae
atgagaaagtcagcgatatattgcctgctggcggctggcctgctggttgccgcatccgcgcgcgccggcgtgatcatcagcggcacccgtcttatctaccacggagaaaataaagaggcttccgtccaggtgatgagcggcgcggaggataaatatccctaccttatccagagttttgttgatggcaatggcccggtgggagacgccccgcagacggcgggtaaactgccgtttaccgtcacgccgccgttgtttcgcctggagccgggcgctgaaaataccatccgggtggtcagaaccggcggcgactttcctgccgatcgcgaaaccgtctactggctggatgtgaaagccattccggcccgcaaacccgaggatgagggtaaaaacatcctgcgcttctcgctgaagaaccggattaaactgttctaccgcccggtagggctggccgatcccacggcggacgattttaaagccatcacctttcgccgtagcggacacagcctggtggtgaccaatccgaccgcctggtatctgaccttctttaacctgacggtgggcggccatccggtggacacccgcttcaccatggttgcgccgcatggcgttcatgagtacccgctcccggcaggcgcggcagggaatatcacctggcagtacattaatgattatggcgctgcgtctcccgtcctgacagggagggaataa

SEQ ID NO: 269765 - DNA, 2574 bp, Klebsiella pneumoniae
atgcgccagctatcccataccccatttccccggacgaagaaaaccgttctggcctgccttacgctgatggcgttacagggggcgcagtacgccagggccggtgacgaatttgatatggccgcgcttgaaaccagcggaccgaaaatcaacgtggatctgagccagttcgcgaatcctggctcccagcttccgggcgattatcacgttgacgtgtatgttaaccatgtgcaggtggacacccggacgctgcattttgtccaggataagcaggggcaactgacgccggaggtgacgccggaactgctacggcagtggggcgtgaaagtggatgacattaagggactgcgtgacgccggaaaaattaatgacattccgcgctatatcccccaggggagcgcgacgctgaactacagccagatgcgccttgacctctccattccccaggcagatgtggacagcctcgcgcagggggccgtcagcccggcgctgtgggatgaaggcgtcccggcgttgctgctcggctatgactttaatggttcgaacacctggcgcgatgatgacgacagcgacgggcatgaagacagttattttctgaacctgcacagcggtctcaacctgggcgcgtggcggctgcgcaactacagcacctggacatacagcaaatcgccggatcgcaatgacggtgaaaaccagaccaacaacagtgaaaatcactgggactccatcaataccttcttgcagcgcgacgtccggcccgtgaacgggctgctgacgatgggcgaggcgacgacgccctcggatgtttatgacggattcacgtttcgcggcgcgcagttagcgtcggatgacaacatgctgcccgacagcctgcgcaatttcgcgccgacggtgcgcggtattgccgccagcaacgccacggtgacgattcgccagaataataccgtgatttaccagaaacaggtgccgccgggggcgtttgagattaacgatctctaccctaactccaccaacggcgacctggcggtgacgataaaagagtcggacggccacgaacgcacctttatccagcctttctccagcgtggcgatcatgcagcgcgagggacacctgaaatatgacgtgaccggcggggaataccgcagcaacagcgacggcgacgaaccgaagttcgcccagttgacgctgatttacggcctgccgcacgatacgacggtatatggcggtacgcaactttcggacgattaccagaacggactgctggggctggggttcaccctgggcgatattggatcgctgtcgctggataccgcgcactcttccgccgatctcagctccggggagcataaagaggggcagtcctggcgcgcccagtattccaaaagcgtgctgagcactggctcgaccgtgacgctggccgcttaccgttactccacgaaaggctattacagttttcaggatgcggcggatctgcgggtggatgacgacgatgatgatgataacgacgcgtttgatttaacccacaacaaacgttcccgctggcaggtctccctgagccaggacttaccggaagggtggggatcgctgtacaccaacggctaccagcaggactactgggatgaggacggctacgaacgcagcctttccgtgggctacaacaatacctggggcgggatcacctggagcctgagctacagcttctccagtatgccgggcgaagaaaacgaccaccagggcgcgctgaatatcagcgttccgttggataagtggctgccgcaggcgtatgccggttacagtgtcaacaccaaccgccacggcgataccacccagcaggtcagcctttacgggacggcgctgaaaaataacaacctcagctacagcgtgatggaaggctaccgcaaccatgaggactccggcagcaacggtaccgcgacgctggattacaccgggcgcgcgggcgaggccaacgtgggctacaactacgacccggacagccaccaggtgaactacggactacagggcggcgtggtggtgcatccccacggcgtcaccttctcccagccgctgaaccaggatatccagtccatcgcgctggtacgcgcgccgggtgtgagccatgcggaggtggaaaacggcaccggcgtcagcaccgactggcgcggttacgcggtggtgccttacctgacgccataccgccgcaccaccgtacggctggataccagcacgctggaagataatgcggaagtggatgccaccaccgcgcaggtggtgccaacggaaggcgcggtggtgatcgccgggtttaaaacccatatcggcgcgcgcgtgctgctgcatttgcagcgtcagaataaggcaattcccttcggcgcgacggcaaatctggtacaggacgacagcgtaagcagcatcgtcggcgatgatggcgaggtttacctgaccgggatgccgccgcagggggacgtgctggcgcagtgggggaaaggcgcggattcacagtgccgcgcgcactatcagctaccggaaaatgataatccggcaggcggcgtcattaatatcgatgcgacgtgcctgtaa

SEQ ID NO: 269766 - DNA, 675 bp, Klebsiella pneumoniae
atgaaatatgagttgatgaattctggcgttaacacgcatggccggtggcgtcaggtttatttcatcctggcgctctggggggcgataagtctgtggcccctggctgccggggcggcggatatatgctcgtcaatacaggacagcactaatgtggatgtcggcgcgattacggtaccgccgggtgtcgctgtcggggcgtcaataacgggagataaaacgtttagccgggtcgattttgctacttgctggggagacggaggcgatattggcggcgtgttatatggggtgggaaaatatgtcggcgattataacggacgcgcgacgttccagacgaatatatcggggatcggcgtgcagtttggcgctgatttgtcggcgacctccaattttggacgcagcattccgacggccagcggctgggccgggcaggggcaaacccagataatggacttgatctctatttccggggagatgctgacctttggcgtggcgccgaagctgaatttaattaaaattgcctcgactgttggcagcggtacgctctccggcaaagcgggcgaagctcaggtcgctaccagtgcgagggcgcaaatatcggtctacctgggggggagccgtcaccagcagcggctgttccgtcaccggcggccagacgctgaatattacgctcaatga

SEQ ID NO: 269767 - DNA, 507 bp, Klebsiella pneumoniae
atgatcaggcgtccgttattttccatactgctgcttggcgcaaccatgacgcttgcccatgcggataccaacaccggctccgtcacggtcagcggcaatttgctggcgtcagcctgtaccctgaccagcggcagcgagttagattttaatctggagcaggtctcccgaagcgatctcccggatgttggctccaccttcggacggctggagcaggatatagaacttagctgcgacgagggaacccttgtctatatgacggttaatggcgatacggaaagcgatgataataccatcattaaaaatgccggggatgcaggcggcgtggggctgcaactgctggatgtgacggataataatacgccagtcgaaatcgggacccgctggatgctggtcaatggcgcgaaagcgacggaaaccattcctctggctgcgcagtatatccgcaccggtgaattgagtagcgggaccgtggaggcgagtgcgacctatacgctggattatgaatag

SEQ ID NO: 269768 - DNA, 792 bp, Klebsiella pneumoniae
atgaaaaaagtcatgctcaatgaactgactggccgggaaatccgcgaactgttgcagtccggcagggaactcaccgccatcgtcagcttcggtagctgtgagaaccacgccgatcacctgccgctcggccccgatatgtttgtcccggaggttgttgcctgccgggtggcgcagcgggtggataatacccttgtgctgccctgcacgccgttcggcacttccgttcactacaacgcccatccgctggccatcaccctgcgctatgaaaccaatattgccctggcggaagatatcttcaccagcctgctgcaccatggcattcgccggatgctggtgattaacggtcacgacggcaatatcccggcgattgaaatcgccgcccgtaacgtaaaggcacaacacccgcaggcagcaattgtggtggttccggcatggtgggatctggtggggcatcatctcgggaagggattttttgactcatgggataacaccgggctcggacacggcggcgagggggaaacgtccgtgatgatggcgctgctcccggaactggtggaactgaaatatgcgcagaaacagatcccggcggaggtgttcgccgattatggcgtgaaccggatctgggatatcggggaaatcagcaccaccggcgcgaccggcgatccgcgctgcgcctcggcggaaaaaggcgagcggatcctcgcctgtctggtggatgtgctttgcgcgttgctgagtaagctggatgcgacgggctggacgtacaacctggagaaagaggccagcaagtaa

SEQ ID NO: 269769 - DNA, 1359 bp, Klebsiella pneumoniae
atggaactcaacagaagcctgaaagcccgccacctgacgatgatttcagtaggcggcgtgattggtgccggatttttcctcggcgctggcgcggccatcgcccgcaccggcccgtcggtggtgctggcctacctgatcggcggcgtcatcaccctgtttattatgctgctgctcgccgaaatggcggtctccagacccgtctccggctcctttgaaacttatgcccgcaccgcctttggcccctggtgtggctttatcaccggctggacctactggctggccttcctgattggcccggcgtcggaagccattgctgcgggcaccttcctgaatatgtggtttcccggcgtccccgtctggctgttctgcctggtgatcgcctcgtcgctaaccgccatcaacatggtcggcgtccatttcttcggtgaagtggaattctggctgagcctggtaaaagtggtggcgctgctggcctttatcgtcgcgggctgctacagcctaggactggatgacgcctcacccgccagcgccggtaatctgaccgacagcggcagcttttttgcgggcggactgcccggttttctcggcgcaatgctgatggtgattttctccttcggcggcacggaagcgatcggcaccgccgcaggcgaaagtgagaacccgcagcgcgatattccccgcacgctgcgcggcaccgtggtgcggatcctgctgctgtacgtcggctcgctgaccgtcctgctgctcgttctcccctggcagcaggcaggcgtcagcagcagtccgtacgtggaggcgtccggcattctcgggggcgacatgccgcggcacatcatgaattttgtggtgttgaccgccgcactctcctgcattgatacgggcgtttacgccacctcgcggatgctgcacgccatggcgtctgacggctatttccctagctggtttgcccgcctgcacccggcgcacaaaacgccggataacgccattcttgccagcagcctggtgctgtttaccggcgtcatcatcgccatcctctcgccggatgcatatgtcatcctcgcggggatttccgggtttggcttcctgttcacctggctgatgattgccttaagccagccgaccctgcaccggattgcgctgcacgacggaacgctgaaatacaaggctccggccgcccgctacatccagccgctcaccgtggggctgattgcgctaatcatggccgggcaattctttaccgacggcggcggcattaccctcgtcaccgtcctggtctggctggccctcgccagcgcgtactacgtttttgtcgttcgaaaaaacaggagactgtccgatgaaaaaagtcatgctcaatga

SEQ ID NO: 269770 - DNA, 309 bp, Klebsiella pneumoniae
atgcgacatagccaattatttctgttactgactttgcctatgtggtcgctggccttggcctccccggaatccactcagctcaccctcgcgctgaaacaactcgacagcgtaaaaacctcgctggagcgcgctcggaccagcgccagtgcaaatgtacagtcgcgctacttcttcgattacttacaggcgcagcaggacatctctgccgttgaacagggcatccgccgctaccttagcccggcgagggcacagccacgtgccgtccagcccctgagcgccagctaccagcgggagaaccccgatgactga

SEQ ID NO: 269771 - DNA, 1074 bp, Klebsiella pneumoniae
atgacagtcagaagttataaggatttaaatctggtcagggctaacatcgaaactgagtgcaggcagttcattcaaaccagaacgtatgcaattcagtcaattggcccgatgccggggcaaaggcccggactcagggtgacattcgcgaaaacaggagagaacttcgctaccgttaacattttctataacggcgatggctcgtctacagttcagtatcttacgggggctaatcattctctgggcaaggagcttgctgattacctttttgaaaccattaaccctgcagaatttgaacatgtaaatatggtcgtggaagggtttgtagagaacacaattttacctgtgcttgagttatcagcagaagaaacgcatattgagttcagggaacaccttcgtaacactcactccatcgtgtggaaaatcacctctactacctaccaagatgaattgacggttaccctgtacaccactacaggcaagcttcagattcaaggacgcccgctatcctgctatcgggttttcaccttcaatctggcagaactgcttaatttgcaaggtctggaaaaagtgttgatccgccaagatgatggcaaagcgaacattgttcaacaggaagtagcccgcgctaacctggagtctataatgggtgatgcttatcctcacttgcactccactgctgaaaaattgctcatttcaggtctgtgtgttaagcttgccgcccctaaattgccagactactgcatgttgctctacccggaacttcgctccgttgagggtgtcttaaagaataagatgtacacatttggtatgtctgtacagcaacctttagggtttgggccttttttcgataaggttggtttaaatttcactttgaaaccacaatatgcggctcctctcaggccagagcaagctaatgccatcaatgatgcctatactttctggaatgcggaacgtcatgctgtgtttcacatggaaacggtggttgattccagccgcatgatttctgatatggcccgactaatgaccaaagccactaaagcgtggcaaataatcaaggatttgtatcttgtttga

SEQ ID NO: 269772 - DNA, 381 bp, Klebsiella pneumoniae
ttgtttgaaattaccggagttaacgtttcaggatctcttaaagctgtcgttatggcgaccggctacgagaacccgttatcttcagtcaacgaaattgagacgaaactcactgacctgctgggccagaatgaaaatggtaaaatccttttcgacctcctatgcgctaacggtcttgagtggaaccggtttgttacgcttgaaatgaaatatggccgcatcatgctggattcggccaaaattattgatgtgcaggaaataccagcacagatcctgagtaaactaacctttactttactgaatcaccctgagtacctagaagcgtccgtattgactcccgatgacgtacgccaagtcctttcaatggatatgcaaggggcttga

SEQ ID NO: 269773 - DNA, 633 bp, Klebsiella pneumoniae
gtgagtgagcagcgaacgcctccgtcacgcccgccacagggaccggttggctggctattgtcgctggccggaaggtttatcgggctggtcatcggcgcactggtgctgcgggtagtactggaactggcggggctgtatttctggtggccgcaggaggggagcagacatgtttttcaggtgatgaagcgggaacaggctgaactggttattgcgttgcagccgcaccctctggggaatgaaattctggcgttgctggataaaggggcaactcgtgtatttacggccaacaggcttctgcagaaaccgttcactgccctgacttacacgctggtgagttttatgcagcgcctgatatggcttgccgccatgctccccctgctctgcctgtgcgcggtaaccgggctgacagagggactggtgcagcgggatctgaggcggtttggttccgggctggaatcggtttttctccaccgctatgtcatcaggtctggcagttcagtcgccaccacgctgtgggtggtttatctgacacagccgctgtttctgcctacaatgttgatattactgactatcaacttatggttcgggataacggtatggatggtggctggtagctttaagcgctggttataa

SEQ ID NO: 269774 - DNA, 660 bp, Klebsiella pneumoniae
atgaaacaactactagcaatcctgatactgctaattttcaacggcgtgaccgccgcctcccctgccacgccagaagtcgtccgctacgaccgctacctgctggccagcacgtcaccgcaacagccgccgctggaacagctcacaaccctgtctatcccgcccggttttcacccgacgataggggaagcgctgcagtacctgctgcgcgacagcggctggtctttgtgcctcgccgatgcgcgccgggcgcaattttatgggctcccgttaccgctgagccagtaccgtaccggcccgcagcgcctgaaggccgcccttcaactgctggcaggcccggcgtggcggatgaccaccgacgaacaccgccgtgagatctgttttaccagcgaccattccctctccccgacggtggcttaccgtcaccccgtgtccctccgccctttggggccgctcacggccccgttttttctcgccgggaccctacagcgcggtgatatctgcctggcagtgattgtgccgccggaggccgtttacctccatcaggtggtgtggctgcgcaggggagaacagtggcgtagctggcggctggagcagtttgatgagcgccgggcggtatttcgccacggcaaacgccagctgacgctgaagatgccggagtaa

SEQ ID NO: 269775 - DNA, 921 bp, Klebsiella pneumoniae
atgaataaaaagccatcgttctatgggatgctatactttataaatataatattattttcgattatttatttttttgtattcgatgattcgtttaataatacgttaagttatcctgcgtctttatattttagtgtggtgacagcgacgacgcttggttttggcgatataattccatccttagaaaaggattctttactattaacaatatcttttgaagtggttttaggtgttattataatcggtttgtttttgaattctatttcacaaaaattaagtgatcaaaaggatcagcaagcaaaaatagaaagcgaacaggagaaagacaaatggatgtcacaagcaatgggtatgttacgtcctgtaattgaaattgagcttcgcactttgtcacagtattataaatttacaagtatagaagaaaaaataagatacaagcagattcccgaagtgcaatttactgatgaatactataagcaaatagtggatataaactattttgcgagatttgaatattctaacggtagtgaattcatgtttttatattttaatagggagaacgataaatttaaagaaagattggaaaaatttctctacaaatatgcacatgctatacctatggaaacgctggtacgtttaaataaaattcaggagcataaattccttgaatttcccaacatggctaaaatgacacatgtaatggttagcgaaaagaaaagagttccggtgtggccacaagattatcctatggatagcgaaggtatgacagagttcaaaatttcgacttgcaaagattttcatattttattgttggaagcgataaaagaaataaatttttatttcgtcgggaacccgattttgataaacatagaacttagcaataatattttgccaagagttggatgtgcaaggcaaaagtcataa

SEQ ID NO: 269776 - DNA, 918 bp, Klebsiella pneumoniae
atggataaaacctccccctactaccgccaggtcgccctgctggtgcgtgccttgccctatgtcgctaacgagacctgttttgcgctgaaaggcggaacagcgatcaatttattcattcgcgattttccccgattgtccgttgatatcgatctggcctacatcccgctggaaagcagagaggtcgcgttgcccaacgtgcgggaagcgctcacccgcatcgcaacagaactggaaacacaagccgggatcagcgcagtactgcaaaccaataaccctgatgagatgcgcatcatagccaccacggacgacgcgcaaattaaaatagaagtctcgccagttgctcgaggaacattgtatcctcctcaagaacgcgacgtcgtcgaagccgtggaggaagaatttggttttgccgctatcccggttgtctcactgcctgacttatacggcggcaaactatgtgctgcgttagatcgccagcatcccagagatttctacgacgttaaaatgctccttgatacacaaggaatcgaccgcgcaatattcaatggctttatcgcttatttgcttagccataatcgcccagtgtccgaagtgcttagcccacgctggaaggatattaccgaaccctttcaaaatgaattcagcggcatgacctttgaggaggtctcactggaagcgctgagagaggtcccggaaagaatgctcagagcgttgaaagcgcatttcactcaacaggatttcgacttcctgatgtcatttaaacgcggggagcctgactggaatttagcaccagaaccccacattcagaatttgccagccgttcaatggaagctgcgcaatattggacggatgtcggaagaaaagcgcgcgcagtcgctggaaaaactggaacaggtcctgacagactggctgagctag

SEQ ID NO: 269777 - DNA, 774 bp, Klebsiella pneumoniae
atgtcatcaaaaataaactggctgttgcaaaacacctctccgggaagtctggttttacaatcctggctaacccggaacaacatatcgccttctctggcctttaaatacgcgcaaaatggctggttagtaaaactgcgggctggcgtttatgtgcgcgcaggacgagaaccagactggagtgatgcgctatggtgtctgcaaagccagcttgaagcacctgtgtatctggctggactgagtagtctctcctggcagggccgttcccattacctgcagcttaaacagggtcaatgctggcttagcgttgaaaacaaaacgatattgcccaaatggtttaaagaatttcccggcgttgagtggctaatggtatcagcactgaagcttcctcaactggatgagaagtatcgaaccgagcttgaggttaaaggaaaaaaaatatccgccagcgtaccagaactggcagcctatgagctgttaagcgcagtccctcaggaaatttcatttgagcacgctgccgagctttttcagggactggttaatctcaacccacgtaaagtggaaaagctgcttacgctcagccagtccgtacacaccaagcgcctgtatctgtttttcgccagtttctatgaacatgcatggttcaaacgcgtggataccagcaaaatcgacctgggagcgggcaaccgacaagtcgttgttaatggcaagctggacacgaaataccagatcactgtgcccgaaaatttcacgaagaagggaatacgctatggataa

SEQ ID NO: 269778 - DNA, 1593 bp, Klebsiella pneumoniae
atggcgcaaggcaatggtacggctctcgaaaaggctttagctcatctttccattcaagttagagatgtcatacaaggcaatacagaacagcttgagttgataaaacaaagagcactcacagctttgtcttttgaactatccgtaggaaaagcttctcggagacctttccattggccgttagaatttccggaggtatttagtcttgatggtggttttgattgtattgtcggaaatccaccattcctgggcgggcaaaaaattacaggtgccatgggcgattgttatcgcgaatatttggtaaatacaatcgcatgtggtaagcgaggttctgctgacttagttgcgtacttttttattaaagccaatgctttactttgctctagtggtttctttggattgatagcggttaatacgatatcagaagggaacactagagaaattggacttgattcgatacttcgttgtggttcggtgatatatagggcaaacccaaacctagtatggcctggaaaagcaaatgtagtcacaagtagtgtttttgtttctaaatcaaattggaatgctcctttttatatctcaggtcaacaagttcctgtaattagttccgcgctaacacaacgggaaaactggcaacccgttaagttaaaagacagttgtggtcttgtatttcaaggggttattacgcttggtgatggatttttgatagataacgatacctatgaaaaatgggtggacgaaaatgatgaatcctgcaaagtagtattcgattatttgattggtaaagaagtcaatcagtcaccaaggcacctgcccgcacggaaagtgatcaatttttttgactggagtatggatactagctctaaattcacaagtgcttttaactatgtaatagatcatgttaaagaaaatagagaaaatgataaagataaaggagcaagggaggcttggtggcgatttcttcggccgcggcctgaactttttcatcttcttggacgaggaggttcttttgaaaaacatccgaaagaatacccctgcttcacgttagtcccaaacacttatatttatgcacattctctatgtgtaattgccagtgacagctattcattattttcgtgtttatcatcagatatccatggaatatgggcgttcgagcatggttcacggttgcatgaacgtcttagatatacccatggagatatctttgaaacattccctttgccaggtgagaaaaatcatgaaatattatcaaatcttggggcagagtttttcgaagaaagggcggaatatatggtgaataaaaatgttggtatgaccaagttttacaacgaattccataatccggcgataaattcaccatcactcagcaaattacgtgaattgcaggtgagtataaaccatgctgtgctgcgtgcgtatggttttgatgatatagatttaaatcatgattttcatgaggttgcataccttcctgaaggaaagaatattcgttacacgatttgtgagtctgcacgggaaaaattactctatcggttggcctcattgaataaaattcgttatgaagaagggcagaaaggtgggattaacgatctctag

SEQ ID NO: 269779 - DNA, 894 bp, Klebsiella pneumoniae
atgcagattccgacagcgactccgattctgacagcgactctgactccgacagcgattcggattctgacagcgactctgactcggacagcgattcggactctgacagtgactccgattctgacagtgattcggactctgacagtgattccgactctgacagcgattcggattctgacagcgactctgactcggacagcgattcggactctgacagtgactccgattccgacagcgactctgactccgactccgattccgattccgacagcgactcggactccgacagcgactcggactctgacagcgactcggattcggacagcgactcggactccgacagcgactcggactccgacagcgactctgactcggacagcgattccgactctgacagcgactcggattctgacagtgactcggactcagacagcgattcggattccgacagcgattcggactctgacagcgactctgactctgacagcgattcggattctgacagtgactcggactcggacagcgactcagactctgactccgacagcgattcggattctgacagcgactccgattctgacagcgattcggactctgacagcgactcggactctgacagcgactcggactctgacagcgactcggactctgactccgattccgattccgacagcgactcggattctgacagcgactccgactctgacagcgactcggattctgacagcgattcggattctgacagcgattcggattctgacagcgactccgattccgacagtgattccgactcggacagcgattcggattccgacagcgactctgactccgactccgattcggataccgaaccgcaggcaaataatgatacccatacggcggctatcgataccgtag

SEQ ID NO: 269780 - DNA, 336 bp, Klebsiella pneumoniae
atggaactgaacgtagcagcgacgatgctgaaagagcttgggcacgcgacaagactttgtatttacaaaagcctgatcaaagcagggcctcaaggcatacccgtaggtgaacttcagaaacaacttgtgatccctgcatccacactgagccatcatctttcatctctgatttctgtatcactggttcgtcaggaacgtcaggggagaacgctgtactgccacgcctgttatgagaatcttgaaaagctgattgttttcctgacagaagaatgctgttcaggtacagacggacagctcgataacaataacaacctaggaaaatacaatgacctctga

SEQ ID NO: 269781 - DNA, 1761 bp, Klebsiella pneumoniae
atgagcatgcaaccaacaattatacaactgagcggagaggatctcctccaaacagcaagatgtgaggatttgttatacgaccaaatcaagatggtatctgtattaggtgattttgaacgacgcatcattgattcgttaaaagggagtggagctaatctgcttgaaggtgcccgaggtgttggaaaatccatgttgcttcgcatggcagaaattgagttagacaaagaattttctgtaaataaaaaacttggagtctatgtaaatttcaaaaccagcactttgcttgaaggtgtcaaggctgatgaacgggatgcttttcagatttgggtcaatataaagattttagaggccttgcatgaaaaaatgcttgcattaaatctaattgcaaaaactggagtagctgacccttatcagcgagtttttggagtatcttcagtactcgaaacaaaagcaatgcttgaagagaaaatccatttacttcaaaagttggcttttagtaaaaattcacatgccgaaattcttgatcaaataggtgaagattttctagcaaaagcccaagataccagcttcttagtaaacataataaaagatgtagcgaatttattttcacttaataaaataatcttcttttttgacgaagctgcacacactttcatacctacccaacaaaatattttcttcgaaatattcaaactgttacatggaggcctggttgcctgcaaagcagcagtttatccaacagtaactaattacggacgcaattttgaagttggtcaagatgcgatagttttaccagtagtgagattcgatccaggtgaatctgggcgtcgtgagaatagattgcattttcgctcaattcttgaaaaacgattgccgaaaacaagcagcttgagaaagaagatattcacaaggggtgcggaacttgatctttgtatcgatctttcaaatggtaaccctagagcactactgcatatattgaacagtgcgctttctagtaatagttcactatcagaacgctctgtaggattggcagtccagaactatgttgatcaggcattaattccgtatcatcaaagcctttctaaaagacttcctaagtattcatcacatattagagttggactagaattgctaagaggttatattattccagaagtaagaacaaaaaatcacaggaagacaaagagtgaatatcagtcggtattttttacactacaacgcgatatgtcacctaatttgaagcttgctttagatattctaagctattcaggcatggtttctcagcttgggactgttaaaatagctaacggaacaggacctagatatatgatcaatctagctataatggctactgaaaaaggatttgacactccaaaaacttcagatgctatagctcgattaagccttactgactaccgtgaattttcatcgtcagattcacagataaaaacctatctgaattcactcttattgccgacagaaacctgttcacaatgcaattccccactacaacaaaatgcaaagttttgtagtgaatgtggtaacaaaatcgtggaagtctccatagttagtactctgcttgaagagtccattagcggattatcaataagcgaacggttgaaagaaagaatccggccaaggtttcctaccgttgggtcggtggttcaagcaaaaagagatgaacttatggcaattgcttatattaaggacgttcgctctaggatcataaagaatgcagcagatgaattcatttcaggctag

SEQ ID NO: 269782 - DNA, 714 bp, Klebsiella pneumoniae
ttggcagaagatatccacgcttcccggcaacctataccagatctcctcagcgcgttacatgataagtttggtcacaacttagcagaggctgttaatgcttcaactgcaccacttttagatacgatagaccttaattctagaataattagtgcttttaaagctgtacttataaaagaatacaaagaagatgctcacaaaactggttgtgctgagatacttgatgaggttttcagtgactttgcgattgcaatgtaccttaattcaataggccttattgttccggcacgaatgtccaccaggagagcgttcgagcttggactttctgtcgtatacatgtgggatatgccacaggaatattggggatggaaaaaatgtgatcaggatttaagcttctctgctatggttacacacttgaattcttcaggctatcacgagtatatgaaacaattaaggggagagtcggaaaattcatgcttttgcgatcaagtaagttttcacagactttatagaatcctaagtaatactgttcatggaaaaattgcagatctccctgcattggcaccggaaagattttcaacaatttcaaacggactatcagaacatctacagttaattgtcgatactcagaactctgttatatgcctactgtttggacgtttctcagagcttgagcaaacgatttgcactttatttcctcaaatcaaaagggcttaa

SEQ ID NO: 269783 - DNA, 1161 bp, Klebsiella pneumoniae
atgtttaaaaaacaaaattatgacaaggaagtgagaaaaataacagagcggagtaatgggaaatgcatcataaaaaattgcactaaaaaaaacatatattcacacattatttccaaatcaatatccattgataagattgccaagaacaatcatttaactgttttttctcctggccggcatggggatgataaaataccaagattcattcctgctggtgttaatgacaacccagcatttaatggtttttgtaaagatcatgacaatatgtttgagttaattgataattcagaaatagagagttttttgggggtgtatttacaaatttacagaacaataagtagtgaggtttattatttaaggttagggggtatattgcatccggatattgatattgatgcagcctctgatttaattttaaaaagcacaagagatgagttgaaaaaaacgcaaagtcaaatagatgaaaaaaggctcataaaaataatagaagataacaagcaggaacttattaaggcaaaaaaactagaaaattccaaattaaataaaaaaatattacaggtggtggaaattaaagaattgaattatcaaatttttgtttacttaacagactttcaaatacctatcgcaatcagcacattacatacatttccttgcgatggagatagtgaagataattcttattcgttttacattgtagtgccatacgaaaattcaaatgttattattggtgtaataggaggaacagctcaccctcaatttttcaacaaaataattgaagtggtcaattcatcttttagcgattctttttctgtattgaatttcgttgaaagcctagtgatatcatcacctgatgatagttttttctctccaacagtcatcgaggaaatgagcagtgaaaagcttctagtgttcacagatgattgtatgtgccttaatgaattccagaacagttctaagtatctatcagagtatgatatgtccatctttgataatgtaaggcgccaacttattgataaagtatctactaatacagatagcgaaaccctcaagcttgccaggatcccaacaagggatgattacgataaaagaattataaaaacgaaagagaaaatattccatgaaaatatcatattaaaaaaattaattccctctaaaggataa

SEQ ID NO: 269784 - DNA, 243 bp, Klebsiella pneumoniae
atggcacagggcgcggtgaagaaaagcggcaaacgttcacaagcggtcagcgccaaaaaggaggccatcctggccgccgcgctggaggcattttcgcaatttggtattcacggtacgcggctggagcaggtggctgagcgcgcggggtatcgaaaaccaatctgctctattactacccttcgaaagaggcgctgtatgtggctgtcctgcagcagatcctcgccatctggctggcgccgctga

SEQ ID NO: 269785 - DNA, 999 bp, Klebsiella pneumoniae
ttggctacaatggttgacatgaaaaaaagttcaaccattaccgtctgggaaggatgtgatccaaccattgcagacgccatcgagcaatttgagaatcgctgggagtcctactccgagtcagccaagcgttaccccatcgggcggctgattgaagaattcattgaccccgccgtagccgcatattcggcaatgcttccctcgcgctatcttgggcacatacctggagccggaacaggcgtccgttttagcgagatcatgcaattggtgggaactgatgcgatggttcggttacagcgccagttgatacgagcgtttgttctgacggaggacaaacagaccgaaagagaccaacaatttatcgcaacgctcgaaacgatgatggagttggtatgggcaagtaagcgcaaacaaccaaaaaaaagagacgtgcgcggactgaatagtcaacgcgtacagggattctgccgattttgcggcgagcttgcggagctggcttcattcgcgggtgggaacggacagcgcggtccagatgatcaactgcgattgagcaacctgtactgtgctgcccatcgacccaaattgccggatggcgcgtggaaccccgcatacagacaagcgaaacgatccgtggcgcagttcgatctcgaactaagcaggcttagccttcaatccgcgaatctccgaacgcctttggcaacttccggcgacccactcatagacagctacgtctatcactatgtccgcaaatacggtcttcaaccagctgacgaaccagaattgcgccatcacgcaaggcggatggcggacatgaaattcacagatcagaaaaagagaatcgtgatgcttcagcggtatggcgtgagtcagtccgagatttctaggatgctgcggatcagtcgccaagccgtatccaaggctcttacctcgacccccgcgccgttccgcgaacttccgacattaagcggctttccatcctatctcctgcgtcaactagaatga

SEQ ID NO: 269786 - DNA, 210 bp, Klebsiella pneumoniae
atgcacccaaaaaacacaacgctaatcgacaagaaagcattgctggaaatgattccgctggcagagcgggcgatcgacagacttgaaaaagaaggcgaattccctcgccgcatggcgcttaccaactacaaggttgcttgggatttggccgaggtcgaggcgtggattgaatcgcgcagaggcagcaaagctcatcggccgggggcctga

SEQ ID NO: 269787 - DNA, 894 bp, Klebsiella pneumoniae
atggaacggtcgaaagagcgagacaaagccttatcgcttgtccgcaagcccccaaaaggcgacgaacaggccgattttcttgtgccgagcctttatgatgtgggcggccgtgacaatcgctgcgtcatggatgtggccgtgttccgtctgtccaagagggataagcgagccggagaactgatccgccacgacctgaaggatggatatgtagaggtttccgcaggggcgcacgggatggcctcagtgtgggactacgatattgttctaatgatggtgtctcacttaaacgaagctatgaaccgctatcgagaaggaaagggcgacaagccggggagagtgttccgaccgcatgtcagtgacattctcaaattcacccggcgcggtgacggaagtcgtcaggttgaagaggtggagcatgcgttagaccggctgcgaggtacgaccatcaagaccgtgcgtgagcacggcaaatttcgcactaccgaagcagagggccttattgcgcgttatcgtgttctgtctcgcacggacaccaagaagatagcaaccgtcgaaatcgaggctccggagtggatttatcgggaagtggtagaggggaagcagccggacgtgctgactgtccacccggattacttcctgatcgagccgggaatcggtcgcttcctataccggcttgcacgtcgtgctgcgggcaagaacacggccaaatgggcgttcaagaccatttacgagcgcagcggcagcggagggactctcaagaaattctcgcaaaacctgcggcgcatcatcgaagccaacgacctgcctgagtaccacttgcgagaggaaattggccaaagtggaccgcagctcatcatgacgctccgccccgatctgccgtcaggcggtacctaa

SEQ ID NO: 269788 - DNA, 309 bp, Klebsiella pneumoniae
atgattgaatatctgattttctgcgtggtggccttcgctgtcaccttcggcatgtacttcctgcgcgaatatctacgctcgcggggttatgggccgcaactcgatgctgttgcgcggtggctggaaccacgggaacgacgcatgaaccgttatcgccttaaggctgctaacggcctgcttggggcggcgcagtccatgaaccgcctgccgctgtacggaagcaagcaccacgtggtgatgatcgaacaactgcgcatggccatcatgtcagagcaagcctttagggaacggcaacagcgccgcaaatga

SEQ ID NO: 269789 - DNA, 240 bp, Klebsiella pneumoniae
atgaaagacagatcgcacgacacggcgatggctgagcgcttccgcgctgatccgccctatgcagcagaactgctgaccgaggtccgccgcgagggcaacccggccgagctagccattctgttgcgacagatggccacggcttcggtagatgttgcgggactggatgacgccgaaacgggccgggcgactagggcaaattttgaggaagctatgagggccctacgtcaagcatgtggctga

SEQ ID NO: 269790 - DNA, 579 bp, Klebsiella pneumoniae
atgaatcaacgcataggatacgcccgcctatcgaccgacgatcagcatctagacctgcagcgtgacgcgctccagcaggttgggtgtggcgtgatctacgaagaagcaaccagcggtaagaacacagcacgaccggagcttgagcagtgccgtaaggcgctacgagcaggagacaccctggtggtgtggcggctggatcgactcggccgcagcctacctgacctggtgcagatcgttactgatcttgagcagcgtggcgtcgggtttgaaagtttgacagaaaaaatcgaaaccagcagcgcggcgggcaagctgactttccatgtgtttgcagcgctggccgaattcgagcgtagtttgatccgtgagcggacgcaagctgggttggcagcagcccgcgcccgtggtcgatcgggtggtcgtaagccgaagctgggggagaaggatatacgagaaatcaaagcactcctgaaatcaccagaaatcaaagtggctgatgtggcgcgacgctatggcgtttctcggacaacgctctataagcacgtgggtgtagtcacgccgaataagcgaggcgaatga

SEQ ID NO: 269791 - DNA, 2928 bp, Klebsiella pneumoniae
atgtattcagcctaccacgccaagtactacgcccacgagctgacacggcgacacgccgccgatggcgtagatcgcctctcccaatcgctgttcgatgccagcgtagatctgaacccgcatcagatcgaggcggcgctgttcgcacttcggaacccgttgcaggaaggcgtgctgctggctgacgaggtgggtctgggcaaaaccatcgaagccgcgctggtggtttgccagtactgggctgagcgccgccgtcggctcctggtcatctgcccggcaagcctgcgcaagcaatgggcgcaggagctgcacgacaagttcgccgtgcccaccaccgtggtggatgccgtttctctgcgcaagcagtccgctggcgacatgctcgccaccctgcaacggctggttggcaaggcggtcgtgatcatgtcctaccagttcgccgccaagctggaagccgagctgcgtgccgtgccctgggacgtagtggtcatcgacgaagcgcacaagctgcgcaacgcgcaccgcgccagcaatcgcaccgggcagacgctcaagcgcgcactgcaaggccgtaagaagctgctgcttaccgccacgccgctgcagaactcgctgatggagctgtacggcctgtccacgctgatcgacgagcacctgttcggcgacgagacggccttccgcaagcagttcatgaacagcgggacgggcctggacgaactccgtgagcgtcttgccagcttcgccaaacgcacactgcgccgtgacgtgctggagtacatcaagtacaccgagcgcaaggcgctcacccagccgttcaaccccaccgacgatgagcaggcactgtacgagctcatctcggcctttcttcaaaaggaggactcctacgccctgcctaaacgccagcgccacctcacatcgctcatcctacgcaagctgctggcctccagttcgcacgccgttgctgccacgctggtcaccatccgcgaacgcctgcaaggcttgctcacggcagacaaaacggaagacgactgtagccaactggtcgaacagctcatcgccgaggacgacctggaacaggactatctggaggacgaagccagcgaggccgaagaagactccgaactccccacggctgcatcggctgaagacggcaagacgggtgctggaaaagatgcccatgccgtccgcgctgccatcaccgcggaaatcgcggagctaaccgcgtttgtcgatgccgcccaagccctgcaaaccgacaccaaggcgcaggcgctattgaaggcgctcaacctgggcttcggcaagatggccgagctgcgcgcaccacgtaaggccatcatcttcacggaatccaagcgcacgcaggagtacctgcaccgcttcctctcagccaacggccacgcgggcaagttggtgttgttcagcggtaccaacaaccatgaagactcgacagccatctaccagcgctggctggaagaatacaaaggcacggatcgcgttaccggctcgccgcaggtggatcgtcgcactgcgctgatcgaccacttccgcaaggacgacggtaccggcgcggaaatcatgatcgccaccgaagcggctgccgaaggcgtcaacctgcagttctgcgcgctgatcatcaactacgacctgccgtggaacccgcagcgcgtcgagcagcgcattggccgttgccaccgctacggtcagcgtttcgatgtggtggtcattaacttcctcaacacccggaaccaggccgaccagcgcgtgctggaactgctcaccgagaaattcaacctgttctcgggcgtgtttggcgcaagcgatgaagtgctgggccgcatcgagggtggcctcgattttgagaaacgcatcctccagatctacgacacctgtcgtcaacccgagcagatcgaagccgccttcaatgctctccaaacggagctggacgaagtcattgccgaccgaatcaaagacactcagtcacagctgctggaaaattttgacgaggatgtccacgaccggctcaagctgcgtcttcaggacgccgaagcacgtctcgacaagctgggacgctggttctggggtgtcactcgctatgcgctcaatgaccgtgctcgcttcgacgagcagtcctacgcgttctcattgagcacgccgccaactggtatagccactggccgctaccagctcattcgtggtgcggcgcagccggacatgctggcgcacgcctaccgcctcagccacccgctgggggagtggagcattgataccagcctgcatgcggtaacgcccgtcgccaccttgaagctcgactacagcaaacacggcgcacgggtctccgtcatcgagagactgcgcggtatgtccggctggctgacgctggcccggctggaagtcaccgccttcgagactaccgaggcgctgctattttccggtctcactgacgatggtcaggtgttggatcaggaagcctgcgaaaagctgatggccattccagccgtaggcaaacccactcctttgagcaccaccgtgcccgaggaactgctggccaacagccagcgcgcggtcgccgccaccattgcccaggtgctggaagccaaccagcgcctcttcaatgaagaacgggacaagctggaacgctgggctgacgacaagctgctggccgcagaggaagccctgaagaacaccaaggcgcgcatcgcccagttgaagcgcgacgcccgcaaggctgtgaccttgcaggagcaagacggcatccagcgcgaactgtctgagctggagcgaaagcaacggcgtctgcggcaggaaattttcgccgtcgaggacgagatcatcgccaagcgtgacgaactgattgcctcgctccagcaacgcctgcaagaaaaaacaagcaacgagacattgttcagcatccgctggaaggtcacgtaa

SEQ ID NO: 269792 - DNA, 3102 bp, Klebsiella pneumoniae
atgaccaacaaacagaatcccaaattccaggagctcgtcgccaagttgcgcgagatcttccagatcgaccgcccggaactggacttcggcatctaccgcatcctcaacgcccgcgcgggggagattaacgattacctgcaaaaccggctggctgagaaggtgcaggccgccctgtccgcgggcagcgccgccagcgcccagcaattgcagaccaatctggacgaagcgatcaagcaggcacaggcgctgggcgcgaaccccgacgacctgcccaacgtcaaggatttacgcgcccggctgaaggatgcgaccgcaggcagcagcgaacacgagaacgccgtgttctcgcacctgctggccttcttctcccgctactacgagcaaggcgacttcatcagccagcgccgctacaagggcgacacctacgccatcccctacgcgggcgaagaggtgatgctgcactgggccaacaaggaccagtactacaccaaaagcggcgaaaacttcagcaactacagcttcaagctggaagacggtcgtacggtgcatttccgcctcgccgccgccgacaccgccaaagacaaccgcaaggacaacgacaaggaacgtcgatttgccctggtagcggccaagaccgttacccgcatggatgaaaacggcgacgaggttgaagaagaactggtgccagtggaggaagcttcgggcagtgacggcaataatgagctgatcatccgctttgagtatgccgcccagcccaaaggcaccaagcaggaggcgctggtcaccaaggccgtagaggccgtgctggtggacgcagccgtcaaggcccgctggcaggccctgggccagcgcgcgccgaccgaaaagaacccgcagcgcaccctgctggaaaagcacctcaccgcttacaccaccaagaacacggcggactacttcatccacaaagacttgggcggctttttacgccgtgagctggacttctacatcaagaacgaagtcatgcacctggacgatgtgcagaacgcgggcacgttcgcggacatcgaaaagaacctgcggatgatccagtgcttgcgtagcattgcgctggagctgatcactttcttggcccagttggaagacttccagaagaagctgtggctgaaaaagaagttcgttgtctccagtcactactgcatcacgttggatcgggtaccggaagcgctgtggccggaagtggtggcgaacgagcagcagtgggcgcggtggaagcagctgggcgtgtgggatggcgatgcgccagggacgatgacggacttgaaggctagtccttatcgaatggtggatacgagcctgtttactgcagagtttaaggccaaactactgcaacaagtttcgtctcttgacggcggcattaatggcctgctgattcatagtgacaatttccaagcactaaatatccttcagtcgagataccgggagcaggtcaagtacatctatatcgaccctccctacaatacaaactcaacgcctattctctacaagaacgagtacaagcattcgtcttggatgagtctgatgcaagatcgcctacttaaaggaatgaacttgctcaagttcgacggagtaaagactgttgctatcgacgactctgaaatggtcaatttatgcaaagtcatggaatctgtggctcctgagcacacgctttctaaagtcaccgtggtgcataacccgaagggatcgatcactaaaaacttcaatcgcacccacgaatacgcactgtttctaactcgcgacgggctatccagtgtcgccagaacgctggaagaaaatgaaactcctcgcaagatgcgccgatggggcgaaaattcccgccggatcgaccgtcggctgtcgttttatccgatctatgtcactaacggtcaggttgtcgatattggcacagtgccggacgaagattttcatccttcgggcaagaacgtccatttacctgatggacgcactgaagtctggccgattgaccaagatggagtcgaacgacgctggaatttcggtcttgattcaatccgccagaaccttgatcgcatcgctgcactcaaggttggagacgactgggatctcttcgttactcatgaacagaccgtacccaagaccgtctggagcggcggggagttcgatgctggaaactacggcaacagccttctgatcaacatgctcggcgagaaacgctttgattttccgaaatcaatcaacttggtaaagaaatgcatttccttggcgactaaagcggaggaagaggaggtggtgctggactacttcggtggcagcggtactacggctcatgcagtgatcgaaatgcgacgcgaggcacaagccgcaggtgctagcccgaagctcgggttcatccttgtcgaacaaggagagtatttcgagaccgtaaccaagccgagagtaattaaggctgtctattccgctcagtggagggatggcaagccaaacgcatccgagaccggcatctctcactgctttaaagtcatcaagctcgaaagctacgaagacacactgaacaacctgcagctgcgccgcaccaccgcgcagggggatctgctgaacacgctaccgcagcaggccaaggacgactacttgctcaactacctgctggacgtggaaagccgtggctcgctgctgtcggtggaagacttcaggaagcccttcgactacaccctcaacgtggccgtggattcggcgggcgcgttcgagccgcgcaagatcgatctggtcgagaccttcaattacctgatcggcctgcgcgtgaagcatatcgacgcgcagccgcaacgcggctttgtcaccgttaccggcacgctgcccagcggtgaaagctgcctggtgctgtggcgcgactgcgatgtgctggattacgaaggtgtaaccaagctctgcgacaggctggccatcaacccggcggacaacgagttcgacgtggtctacatcaacggcgaccacaacattcccaccgtgctgacgcagacggccgaagaaggcggtgccacccgcgtgctcaagctgcgccagatcgaaccggagtttctggagcgcatgttttccgtggaggatgtgtaa

SEQ ID NO: 269793 - DNA, 3351 bp, Klebsiella pneumoniae
atggcgcgagctccaaaagcgaaaccgaaaaagcgcagcttccatcaggaactggtgctcaatcgctgggtgctgggtttctttcagggcggcacgctggcggcactcaagatgcgcctgggcgatgaccgcttcgagggcatcgacgaggacggccagaccaagttcttccacgaacttatccgaggcttgttcgatcccaacaaggtgcccgaggccgacctacggcgctacgacttgaacgtcgtcgcccactggcaggccatcaccgcccagcgcaacaagctggaaggccacgaactgcagatgaagtacttccagtacctctcgctgctgttcaccgagctgtatctggactggtacttcaaccaccgtcaggacttgctcgatggcctgaacgaggaaatgacgcgctaccgcgccgagaagggcgcagaaccgttccgcgatttcgaagcggacgacctgaacaagatcgccttctggaatgccaccggcagcggcaagaccctgctgctgcacgtcaacatccgccagtatctgcactacttccaggcggggcgcagcgatcactacccgagcaagatcatcctgctcacgcccaacgaagggttgagccgtcagcatcttgaggagctgcacctgtccggcttcgggttctcgcagttcttcaacaaggcccagtcacccgcgcgcggcaccatcgaaatcatcgacatcaacaagctgggcgatgagatgggtgacaagaccgtagccgtggatgccttcgagggcaacaacctcgtgctggtggacgaaggccaccgtggtacgggcacggcggcaggcgcgtggatggcgcggcgcgatgcgctggtgcgcggtggttttgcctttgagtactcggccaccttcgggcaggcagtagccaagggcatgaccgtggcggcggcggaagaaaacatccagaaaaagcgcgccaagatgctgttcaacactaccagcctgcgcagtttggacgacgggcagaaggcgcaattggcgctgacggcggatgacaagcgccgcgcgcgcatcaccgctacccgcgagatttacgccaagtgcatccttttcgactactcgtacaagttcttctatgaggacggctacggcaaggagtcgctgatcctcaacatgaatggcgatgcctacgagcaagcggacaacgctcgcaagtatttcaccgcctgtctgctcgcctactaccagcagctctggctgtggcgcacgcaccgcgacaagttgacggacttcaacatcgagaagccgctctgggtgttcgtgggcaacacggtgtcgggcgaggagtcggacattctggaagtagtgaacttcctggccgactttctgaacagcgacgcgcagatcaaggcctggctggccgatttgattgccgacaaggcgcagattctggacgccaagggcaacaacatcttcagtgggcgcttcacgcccttgatgggattcagcggtcgcgtggacgagctgtacgccgacatcttgctacgggtgttcaacgcttcggcccgtcagcgcttgaaactggtcaacatcaagagcagcaagggtgagctggcgttgcgcgtgggcgatgcagagcccttcggcctcatcaacatcggcgacgatgcgggcttcttcgggatggcggaggatgtggaggctttcgatagcgaacgcgacgacttcggcggtgcgctgtttggcactctgaacaacaaggacagccgactcaacgtgctgatcggctcgcgcaagttcaccgaaggctggagcagttggcgcgtgtccacgatgggtctgctgaacatgggccagggtgaaggctcgcagatcatccagttgtttggacgcggagtccgcctcaagggcaagggcttctcgctcaagcgtaccttgccgcaggaccggcccaagggcgtgcatctggacaagctggaggcgctgaacatcttcggcgtgcgcgccagctacatggccgcgttcaaagactacctgcgcgaggaaggcatcacgcccagtgacgaagtgctggagttggacttcccaacgcgtgccaacctgcccaaaggcaaactcaagaccttgacgctcaaggatggctacaaggacaaccagaaactcgggttcaagcgtacgcacttcccttggctgtacgaaattcctgcgcagttccagggcaagatcaagcccccccatgtggtactcgacctgtacccgcgtgtcgaagcgctgtccagcaaggacaagggcacaacccccacgacggaagcccgcaacaagggcaagctgaatcagacgctgttcccggctttcaattgggatcgcatctatctggcgttgcaggattacaagttgcagcgcagctggagcaacctgcggttggaacagcagaagctgattgacttctgtgcgggcacgcaggattggtacacgctgttcatcccggcggcggaactgaacgtgacgaccttcgccgacatccgcaagcaggaagacatcctgcttcgactgctgacggactacaccgaccgcttctacaaggccctgaagacgggctacgaaggccagttctacgacatcactcacatcgatgaagaacacgggtcgatgctcaagctttaccagttcgagatcgagaacaatgacgacggcttggagtatcagaagaagctggaagttctgaagaagctggttgcggacggcaagatcggcgaggccagcaaatggaacgcgccgcacatggtggccatcagctttgaccggcacttgtactacccgctcctagcattggaggacaaggatgctgtgccgctgaagctgcgtccgctggcttttgacgcgccgagcgaatgggagtttgtccgcgatttggaggcgttctacaactcaggcgagggcaaggaagcgattggcccgcgcagtctgtacctgctgcgcaatgcggatcgggaagagaaaggcctgggtttcgcgttggcgggcaacttctatccggacttcctgctgtggctggtggatgatgccaccggcaagcaatggctgacctttgtcgatccgaagggtttgcgcaatctcgacctgtcgcaccccaagctgggtctgtacaaggaagtgaaggcactggaagcaacgctggcggggcaggccaaggcgggcgaagcgccgctggtcttgaatgccttcgtcttgtcgccgacgaagtttgccgacctactcaacgtgggtgacccgacaaagaaggccgatctggaaagccgcaacgtgcttttcatggaagatggtgctagcacctacctgaaaaagcttttttcaactttaatttaa

SEQ ID NO: 269794 - DNA, 252 bp, Klebsiella pneumoniae
gtggtggcgcagaagccgggcaacatcacccactttgctgacctgatcacttttgtcaccgaccgtccgggacatgacctgcgctacgccattgatgccgcgaaaattcagcgcgatctgggctgggtgccacaggagacgttcgagagcgggattgaaaaaaccgtgcactggtatctgaacaaccagacctggtggcagcgcgtactggacggctcctatgccggtgagcgccttggcctcaataactga

SEQ ID NO: 269795 - DNA, 252 bp, Klebsiella pneumoniae
gtggtggcgcagaagccgggcaacatcacccactttgctgagctgatcacttttgtcaccgaccgtccgggacacgacctgcgttatgccattgatgccgcgaaaattcagcgcgatctgggctgggtgccgcaggagacgttcgagagcgggattgagaaaaccgtgcactggtacctgaacaatcagacctggtggcagcgcgtgctggacggctcctatgccggtgagcgtctgggtctgaataactaa

SEQ ID NO: 269796 - DNA, 765 bp, Klebsiella pneumoniae
atgttgattctcgattgctcctcacgaactcaggcgttgcatacattatctgccgggtttggctgtccccctgaaaagctgaaaaaagtgctgctttcgctcgatcttgaaagtatctacgagcttaatcctcgccagttggttgatgcacctcagtatctgagagaatacgtctgtgcggaactgggcgaaccgggaccattcacccgggctctgtggtttcatggcacccggactttcgccggtaatacttttccggcggggttactggcgctaaatcagtcagaatccctcgccatgaaaatgctgcttgacctggccccgaatgagatggtccgtacacacctgaaggaatgggatgttccggggggcgttccggatgagatgtttcagctcagaaccggcgataaaatccactgggggccttttggccatttagtccgggaattacattttaacgccagtgaaaatggactgcatgattacctctggctgccggagctggtagaggatgtctgtaaggcctaccagaagaaatacggccacgatcttaaaccgcattatctgagcgtgcttcatccctgtattgtctggttcgaggcggatattgtttatgaaaaaggggttcttgaaacggctctgtcatatgcctatacatcagtccgtgacctcccgccggacggaaacgcaactttcagcatagaatgtgacgggaaatcggtgtccaggtcgtcgattgctaaaatcgagtttctgccgccctag

SEQ ID NO: 269797 - DNA, 609 bp, Klebsiella pneumoniae
atgacgctgacagaaaaatcgggccatctggcatggtgcgctctggtggcgcttgcgttggccagacaggatggcggagctctctcaccggcacaggaaaatctctttctcacccgctggctggcgacagcactgaagcaacgacgtttttctcgcgatgtcacacccgatctcgagtggctgcttaagcaggggcgccagctgggcgtcagcgcgaagctggccagtaagctggattacctctggcgttcctgcaccggtgagttgtctgagcagaacgacctgttccggctgacgtatgcgctggaaacagcgaaggatatgcactggcaataccgtctgctgaacgatcgggaatggtccggccggaattctgtggcgctcagtgcaggcgtgaacggcatttatctctcacgggccaacctcgatgccgcttttaacgacaatggccgacagataaatccgctgatggcccgcctgacggggagcatagccgggatgatgaagctgtttaatcgctgtggctggcaggctgagcctgcaggggatgtctccctgccccaccagtttactctgatggccagacagggagtgtcagaaaaggattaa

SEQ ID NO: 269798 - DNA, 546 bp, Klebsiella pneumoniae
atggccggggaaagttatattttgatgggcgtttcgggtagcggtaaatctttaattggcagcaaaattgccgctgtattatcggctaaatttattgatggcgacgatctccatccggctaaaaatattgataaaatgtctgaaggtattccattaaccgatgaagatcgactgccgtggctagcgcgattaaatgacgcctcatacagtttatataaaaagaacgagaccgggtttattgtctgctcgtcattaaaaaaacagtaccgcgatatattgcgtcagggcagcccgaatgtgcattttctgtggctggacggcgactacgagaccattctggcgcgcatgcagcgtcgggcggggcattttatgccggtgggattactcaaaagccagttcgacgcgctggagtgcccgcaggacgatgagaaagatattgcccgcatcgacgtgaaccatgacattgagcatgtgacggaacagtgtcgccaagcggtgctcgcgtttcgtaacgtgcccctattaagttgtcaagcatgtttatga

SEQ ID NO: 269799 - DNA, 1044 bp, Klebsiella pneumoniae
atgcaagtcaaaacccaatcctgcgttgtcgcgggtaagaaaactgttgccattaccgaccaaaatatagaatggaataataaaggaacgctggtgaaaattacccgaggcggtatttgcggctccgatttacattattatcaggaaggcaaagtcggtaattttaccgttaaagcgccgatgattttaggccatgaagttattggtaaagtggtgcacagcgattcaaaagaattacatgaaggtcagtcggtggcgattaatccgtcgaagccctgcggccactgtaaatactgtctgcagcatgaggaaaaccagtgcacggaaatgcgtttttttggcagcgccatgtattttccccacgtcgacggcggctttactcagtttaaaaccgtcgatactacgcagtgcatcccctaccctcaacaggccgatgaaaaagtcatggcctttgccgaaccgttggcggtcgcgatccacgccgcgcatgaagcgggcgacctgcagggcaagcgcgtgtttatctccggcgttgggcctatcggctgtctgattgtcagcgcggtgaaaacgctcggcgcggcagagattgtctgtgcagatatcagttcacgttcgctctcgctggcgcaacagatgggtgccgatacgctgattaacccgcagctggactcactcgatgcgtggaaaaaagagaaaggctacttcgacgtcagcttcgaagtctccggccatccgtcctcaatcaccacctgtctggaagtgacccgcgcgaaaggcgtgatggtgcaggtcggcatgggcggcgcggtgccggacttcccgatgatgatgctgatcggcaaagagatcgcgctcaaaggctcgttccgctttaccaccgagttcaacaccgcggtgtcgtggctggcgaataacgttatcgatccgctgccgttactcagcgccgaatatccgtttaccgagcttgaacaggcgctgatcttcgccggagataaaacccgggcggcgaaggtccagctcgttttcgaagacataaaataa

SEQ ID NO: 269800 - DNA, 1260 bp, Klebsiella pneumoniae
atgagtatcagcctgggtatcattgcagacgattttacaggggcgacggatatcgccagctttattgcacgttcaggctggcgcgtgattcagttaaacggcatcacccactatgaggtggatattcacgatgccgatgcggtggtcatttccctgaagagccgttcctgcccggcagccgaagcgaaaaagctgagccagcaggcgttcgaatggctacaggcgcagggctgccagcgcatctatttcaaatactgttcgacattcgattccacgcctgcgggaaatatcggcccggtgaccgatttgctgcttgatctcacggacgccccgatggcggtgatgtgccctgcactgcccgtgaatggcagaaccgtcgtctatggccacttatttgtgcacggccagctactgaacgaatccgggatgcaggatcacccgctcacgcccatgagcgatgccaaccttttacgggtgatggcgcgtcaggtgtcaggctcctgtgggctggtgtcgctggagcaggtgcgcgcggggaaagaagccgtcgcccggcagctcgccgtgttgcgcgagcagaataaacgctataccgtgctggacgcgatgaccgacgacgatctgcgcgtcctcgccgaagcgctcccggacgatgtgctgctgaccggcggttccgggctggcgggcgctcttgccgccttaggcagcaggccgcaagagagtgaagcgattagcgtacccgacgcgcagggcaagtgcctggtgctggcgggaagcagttcgtccatgaccaatcgtcaggtggccttttatcgccagcacgcgccctcacaggctatcgatgtcgagcgtgccctgcacgacagagcggcctatcttgaagagctggtggcgtggtatctggcgcagcccacctcgcctgcaccgctcatttacgctactcgccccgccgatgaggtgaaagcggtgcagctgcgttacggcgtggaagtggccggcgctgccatcgaggcgctgatcgccgcgctggccagccggttaacgcagcatggtgtgaataaaattatcgtcgccggcggtgaaacctccagcctgctggtgcagcaactcggcgtgagcggtttcatcatcggcaaaactatcgctcccggcgttccgtgggtgaaggatgtttcacgcaatatgtggttagcactgaagtcaggcaattttggtgaagagcgcttttttatcaacgcccaggagctgtttcatgaatga

SEQ ID NO: 269801 - DNA, 648 bp, Klebsiella pneumoniae
atgaatgagttacaactgcgcgaacaaatggtcacgctggccagttcgatgtttatgcgaggatacagcagcggcggtgccggaaatctcagcacccgccttccggacggcggctttctggtgacgcccaccaactccagcttcggttctctcgacccggcgacgctcagcaaactggacgcacagggcgagtgggtgagcggggataagccctcgaaggagtcgctgatgcatctggctttctatcgccagcgcgctgatatcggtggtatcgtgcatcttcactcgccgtacctgaccgcgttgtcgtgcctgccaaatctgaacacgcaggactgtttgccgcccgtgacaccctatttcatcatgcgcaccggccagctgccgttgatcccgtatatgcgccctggccatccgggtctggcggatgaagtcgccagactggcctcggagcacaacgcaatgctgctggcgaatcatggccccatcatcggcggcgcgagcctgagcgaagcgaccttcaatgccgaggagctggaagatacggcgcgggtgtggttcaccatccgtccctatggcatgaatacgctgaccgatgagcaggttacggaactgaaaaccgtgtatcgcgtgaaaaaagcgccctga

SEQ ID NO: 269802 - DNA, 792 bp, Klebsiella pneumoniae
atgttgcccgacgaacgccgcgtttttatttacagccacctccaccgacacgcccacgtcgccgtcggcgaactggcaaaattgctcggcgtctcgcatatgaccatccgccgggatttaaaagagatggaagcggaaggcaaggtgaaatgtattagcggcggcgcgaggctgaatgaggtgcttattcaggaattaccgtatatcgaaaaagcgatgcttcgccattcgacaaaacgacagattggtattattgctgaaaaatttattgagtccggcagcgttatttatcttgatgccggaaccaccacctatgaaattgcccaggtgattgccagcaagctgaaaaaaatcacggtgatcaccaatgattttaccatcgccgattttttgatgaccacctcctgtattgagctttttcatacaggtggcagggtggatgtgcgtaaccgctcggcggtgggacacggctcggccgagtttatccgccagtacaatattgatattgcctttatcagtacaagctcgtgggattgtgaacacggtatttcgacgccggatgaaggaaaaatgctggtaaaacaggcggtcatcgcctcgtccagacgccgcgtgctggtatcggattgcagtaaatatggcaaatacggcatgttccatatttgtcatctggatcagatcgatgacattatttgtgatgaccagttgcccgttgaagttattaataaaatacaacaattaccgctgcgcttacaccaggcccattattcccctgccgacaaggagaaataa

SEQ ID NO: 269803 - DNA, 1356 bp, Klebsiella pneumoniae
atgcaatttgaaatcagcctttttatttcactcattgcgtccatcgcaattttagtcgtactgattacgaaatttaaattccatccgtttttagcattaattattgcggcgggttttttaggtatcgcggcagggctaacgccaacgcaaaccattaaacactttgaaaaaggttttggcggcgtgctcggctccaccggcctcgttgtggggcttggcaccatgctgggcggcgtcatgctggaatccggcgcggccgaccggattgccaataccttcatccgcctgggatcagtgcgtatgatcccgctgaccatctgcatcgcggcgttgatcatcggcttaccgcatctgtttgacgtcagcttcgtgatgctggtaccgctggtgtacgttatcgcccgccgcacccgcaatcagctgctgcgcattggtattccgctggcggcgggtctgtatgtcgcccacggtttgatgctgccgcatccctcgccgacgctggcgatgaccacctatggcgccgatgccggcacctgcatgttctacggattactgctggctatcccgatggttatcctttccggcccggtattcacgcactttgcgcttaaagtattccccgatctgcgccgccaggatttcagccaggtacagctggaggaaaacgcggcggacaccacgcgccacaatatgccgtctttcgccatgtcgatgctgaccatcctgctaccaccttttttgatgatgttcaaaacgctggcaaaagggttcgtcgagcctggtaccgccccggcagaactgctgaacaccattggcgatcccatcgtttccctgctgattgccgtactgttctccctgtgggggctgggcgtgcgcagcggattcagcatggctcagttgcaaaaaatcgtcggtaaaagtctcggcccctgcgctgccatcattctgatcctcggtgcgggcggcggctttaaagagatgctgctggccaccaacgttagcacctttatcgccagctccgctatgcactggaacatttcgcctctggtactggcctgggtggtcgcagcgctgatccgcatcgccatcggctccgccaccgtcgccgtcgtcaccacggcgggcatcgtcgccccgcttgccagccacagcggcgtgaatctcgaattactggtgctcgccaccagtaccggcgggttgatgctgtcgcacgttaatgactccggcttctggctgttcaaagaatatttccagctgacggtcgccgagacattcaaaagctggacgctgctggtgtcgttcctgtcggtcctcggcctcatttttgtcttattactcaatgccctcgttgggtaa

SEQ ID NO: 269804 - DNA, 1362 bp, Klebsiella pneumoniae
atgaattacacattgctgttcaatacgttaacgacccaacggatccgtattgcggtcaccggggcgtccggcggatttggccgctcgctgctggtacagtgccgggaaattccgtcgattgagatagcggccctctgcgacctgaatgttgacggcacgcaggcgctgttgcaggatctccgttaccgtgccgatgccgagatttgtgaagacacggagcaggtgaaagcggcgcagagcggcggtaaaacggccatcatccgcgactacgccctgctggatcatctcgacgtggatatggtgattgaagccactggcaaaccggaaatcagcatcgctatcgccatcaacgcgttgcagcgcggcgtgcatgtcggcatggtgagtaaagagacggattccgtggccgggccgtggctgaaccagctcgcgctgaagcataacgccgtgtacaccaccgtcgacggcgatcaaccctccaacctgattgggctgattacttgggcgcaggtgctggggctggagatcgtcgcggcagggaaatcgagcgaatatgattttgtctggtcaccggagaaaaacacggtgagctggtgcgatcgcaccgtggcagttgaggggcttgaggcgtgctggctatccggcgatgacctccacgctacgctggcgaaacggaaatccctgctgagcatgtttccgctcagtgccacgccggactactgcgaaatgaacgtggtggcgaactcggcggccctgatgccagcctgtgatgagttaagctacccgatgtgccacatcagcgagctggcggacatttttgtgcctcaggaagatggcggcatcctgacgcgaaatggcgtggtggacgtgttcaactgcctgcgccgcgaggacgaagccagctttggtggcggggtgtttatcgtcgtgcgctgcaaggatgaagccacttgggaaatgctcgccgggaaaggccacgtggtcagcaaaaaccgcaaatacgcctgcatctatttgccgtatcacatcatggggctggagtcgccgctctcaatcttctccgccgtgctgcatcatcgcgcatcgggtgccaccgaccagcagatccatgcggtgatggcgggctacgccgagcgtccgctgaaaaagggcgggctgctggagatgggcggccatcatcacactattccgaacgtcagcgcccggctgcttccgaaagccgatgcggcaggtattgcgccatattatctgctgtcgaataaagtgctgacccgcgatatcgatcagggcgagctgatcccgctggatgcgttgcagatggacgattcgctgttgtatgccgcctggcgggaatcgttctga

SEQ ID NO: 269805 - DNA, 675 bp, Klebsiella pneumoniae
gtgaaaaaagacagcttccggttctatggtttgaatggggtttttaatggcgggtcagattcctggggaacgccgatagaattatttgattcgctgaacgctgaatttaatttcacgattgacgcagcagcaaataaatttaatgcactctgcgatcgatattggacagaagacgatgacgcattaaaacaagattggaatggagaagtgatattctgtaatcctccatattctagaacgggggattttttggctaaagccaaagaagctgatatcgctgtttatgttgttggagtgagaacacaagcatcctactttttacacaatgtatttgcatctccattttgttatgagatccgtttcttgcatagaggagtcgcgtttattctccctgatggtggacgggataattcaatcagaagcgcgttgccgatctgcgtattggtttaccgtaatattccccgcactggtgatataaaaatcagtgtggcatgtgctgattctgggactcacctcttggatgttgccggacgctcaccggggcaaccgtctaaacacgattataaaatcagggatgctgtaatacaggcacaccggaagggcgctaaggtggctgatttggttgaacggttcggagtgagtagggcgactatctaccgttgggtgaagggatag

SEQ ID NO: 269806 - DNA, 324 bp, Klebsiella pneumoniae
atgagaagaatattgatagttgctttaggggctcttttactgacggcttgtgccgcaaaaaaacaaatgaccccgatggggggtagcaaagctgatgggacagtgagaatgggctacacagtagcaatgttcgaaagtccggtagttgatttgaatcaggctaaagatctcgcctcacaaaaatgtaagacttggggatatgatggagccgaagcgtttggtgggcaaacatccgtctgtgcccagatgggggcgtatggttgtaacatgactaacgtatcagttgagtatcaatgtactggtggtaaagcctctcagaactga

SEQ ID NO: 269807 - DNA, 438 bp, Klebsiella pneumoniae
gtgattcgccgtctgacgccagcgcatcagcatgacgcctcgtgcggctgcggccatcacggcgtggggcaggatctgcagggcgctgactggaagacgcgccttggcgtggtgctggctatcggcgttcggccctgtagcggggcgatcatgattttattattcgccaacgcgttggggattgttagctggggcatcgccgcggtgatgagcatggcgctgggcaccgcgctctcgatcctcggtctgtcgctactggttcactatgcgcgccatcggacggtcaaacgattggccacgaatcaccgcccgcggccctggctggttccgctgatgaagatcctcggcggtctggcgctgatcctctttgccgtgggattgtttttcagcgtggtgccgatcagcgccaacggcgactttatcgccgctggctgttag

SEQ ID NO: 269808 - DNA, 309 bp, Klebsiella pneumoniae
gtgattcactcagactttattcgggcgattacttcggaattggcagagaaaatcaagagctatgctggcgcgatgctggtagatgtagtgtataactatcaggggtctgaaatcgccgtagtttggtctaatgccaacacaggagttacggaaatttatggattccctattgtagatggtgaagcatataccgaaggcgttaacaacgggaatgattactcgttctataaaatcaactttatcgacaatgtataccgccaaatgatccaggttgaatccatccaaactggaaggcctcctgcgatttag

SEQ ID NO: 269809 - DNA, 462 bp, Klebsiella pneumoniae
atgagccgtttaaccgccattatcagcgcagtgattatctgcctgattgtcagccttgggtggttggctaatcattaccacaccaacgccaccgagttcaaaaggcagcgtgacgagaaggttaaagcgctaaaccttgcgaacgagaccatcaccgacatgcagaaccggcagcgtgacgttgcagcgctggatgccaaatacactggagaactggcagatgctaaagccactatcgatcagcttgagcgtgatgttgcttctggcaagcgtcggctgcagctcaacgcaaaatgcccctcagacggagcgaccggcgccagcggcgtgggcgatgcttacggcccccgacttactgactccgctgagcgggattattggcgtctccgagccggaatcgccaccatcaccgggcaagtgaactacctgcagcaatacatcagggagcaatgcaaaaagtga

SEQ ID NO: 269810 - DNA, 729 bp, Klebsiella pneumoniae
atgaacaaaaaacacttcaccagagaagccttgctcaaaatcattgaaactgatcaagctaaatgcggtgagacttctgctttggcctgtattgtcctggctgcaatagacaatggaataagcttaaccagaaacatcgtgccggaggaaatgaacattggcacggcaatgaagttctggggaggcggtcgcggttctattgagagttttgttgcgggttttaatttctgccgcgctgccattatccgcgctcaatcagcgccggagcgcgaacagattcgccaagagcatgccgagtggtcccaatcaacattcggtaattttggcccgattggcccgctgaagcaccttagcaaagaagcactggaagccgctgaacagcctagcgacctgtcggaatgggctgatatgcagttcctgctgtgggacgcccagcgccgtgccggtattacagatgagcagattacccatgcaatgatcgaaaagctggcagtgaacaaaaatcgcgaatggcctgagccgaaagacggtgagcctcgcctgcacatcaaaaaacaatcagcactggtactccctgaagaaataacacttgaaaaagtggctgaaatgactgctgcgagaggagcggaatactctatacgagatggcatcattgctgcaaagtggtggaacgcctgccgtgccgccatgctctcagcagcccaacaggaggcgccagatggaaaatga

SEQ ID NO: 269811 - DNA, 330 bp, Klebsiella pneumoniae
atggttaagcttaaagaagtggtgcgcagtatcatctccggagctaacaaacagcttccagaccactcgacaacccaatctactgcacctactaacctgtcaactgagatttacaccaaaatctcttgtataggtcccagaacgttaggtattggtggagataagcaatctgattttgccaatcaagcagctgaattagtgaccgatgaaaaatttcttgacgagcttcaagataaaattggcaaccctcaaatcaatgagaatgaagacgaatttactcatagagccaaaacagagatgcgcaacttgttgaaatcgaaattaaagtag

SEQ ID NO: 269812 - DNA, 906 bp, Klebsiella pneumoniae
atgactaattttgatagcagcggatccctacaccaaatgcagttattcccggtggtggaagttgtgtcggatgatattccgatgggagtccttaatgatggaacgccatacctaacgctttatgggctagcgaagctatgcggcattgatgacactccattgagggtcttcacatctaattgggacacagaaaaaaataaaccccgtggacagaaagtagcatcgtatttggctgagaagggtttccataatttagaccggttatatacaagggtaatgaacagttcaaacgtggaaactcatgcctaccctgattatgtatgtatggctgttcttcgctactatgctctcgatgcgacaaacttcgacagatcggtggcaataggcaactttgttcgcctggctgaatacacacttaagcggatgatctatgagaaatcaaactacaacccaaatacctctatagatatctcgttcgaaaactatcgagcaagaattaagttgaatgatcagatacctaccactcattttgctgtgttcagagaaatagcggatatcgcaatgaacttgataggtgggggatttcctatggatgatacgacttccttagatggaagcgttggaagccattggggaaagtattggacagccaatcgactcgcggaacaatttggagaaagggtacaacatccacatttgtaccctgataactataggcaatctgctgctaataagtatataaatgcttggatttaccctattgaggcgctgggtgtattcagaaaatggcttcacgacaattacgcaatggaaaaattgcctaactatcttgggaacaagaagctgagcaacgcctcagagctattagaatcgataaaaaaaccagcacttcccaatagacactga

SEQ ID NO: 269813 - DNA, 2151 bp, Klebsiella pneumoniae
atgaaaaaaatcacgagcgtgtgcccctactgcggggcgggttgcaaacttaaactggttgtcgacaacaataaaatcattcgcgcggaagccgccgacggcgtcaccaaccagaaccagctgtgcctgaaaggctattacggctgggattttctgaacgacacgcagctcctgacgccccgtcttaaacaaccaatgatccgctaccagaaaggcggcgcctttacgccggtcagctggcaggaggcgattcgctataccgccagcaagctcagggagatcaaagagaagcatggcccgcgcgccatcatgaccaccggctcctcgcgcggcaccggcaacgaaaccaactatgtgatgcaaaagttcgctcgcgcggtgctgaacaccaataacgtcgactgctgcgcccgcgtctgccacggcccttccgtcgccgggctacagcaggcgctgggcaacggggcgatgagcaactcgataagcgacatcgaaaactcgaagtgcctgctggtctttggctacaactgcgccgactcccatcccatcgtcgcccgccgggtgatcaaagcccgggaaaacggcgctaagatcatcgtctgcgatccgcgacgcattgaaaccgcacgcatagccgaccgtcatctgcagctcaacaacggcagcaatatggcgctggtgaacgccttcggctatgtgctgctggaggaggagctgtacaacaaagcctatgtcgaacgctacaccgaagggctggacgcctaccgcgaggcggtgaaggattacgccccggaagcagtggaagagattgtcggggtcagcgcgcaggcaattcgcgaggcgatgcgcatgtttgccgccgccccttccgccaccattatgtggggcatgggggtcacccagtttggccaggcggtggacgtggtgcgcggcctggcaagcctggcgctgctcaccggcaacctggggcgggcgaacgtcggtgtgggcccggttcgtgggcaaaataatgtgcagggcgcctgcgatatgggcgtgctgccgaacctgttccccggctatcaggaggtcaccgaccccgccgtgcgggccaaattcgccgccgcctgggggatcgacccggcgcagatggatgaccaggtcggcacccgcatcaccgaagtgccgcataaagcgctgaccggcgagatcaaagcctactacatcatgggcgaagatccgctgcagaccgaagccgacctcggcctggtgcgcaaaggcatcgaggcgctggacttcgtggtggtgcaggatatcttcatgaccaaaacggcggagattgccgatgtcctgctgccggccacctcctggggcgagcacggtggcgtcttcacctgcgccgaccgcgggtttcagcggtttgaacaggcaatccctccggcggggaatgtaaagcgcgactgggagatcatcagtctgctggccagcgaaatgggctatccgatgcactatgagaacaaccagcagatctgggacgagatgcgcgagctctgcccgcttttctacggcgtgacctgggagaaaatgggcgatatgggccatgttcagtggccgtgcccgaccctcgaccaccccggcacgccgtggctgtataaagacaaccgcttcgacaccccatcgggtaaagggcagctgttcgccaccgcctggcgcgcgccggcggagcgtccggatgatgaatggccgctggtgctctgcacggtgcgggaggtggggcactactcctgccgctcgatgaccggcaactgcgccgcgctgcagtcgctggccgacgagccgggacgggtgcagatgaatccggtggatgcgcaacggctggggatcgctgacaaacagctggtgtgggttagctcccgacgcgggaaagtcatcacccgcgccgacctcagcgatcgcatcaacccgggcgcggtctatatgacctatcagtggtgggtgggcgcctgcaatgagctgacccaggataacctcgatccgatctccaaaacgccggaaaccaaatactgtgcggtgaaagtggaagcgatagccgaccagcagtgggcggagcgctatgcctggacggcctacagcgacatgaaggcgcgactgaaagccgccgccgacgtctga

SEQ ID NO: 269814 - DNA, 1080 bp, Klebsiella pneumoniae
gtgccaacaggacaccgctttctggcgacggatctgcatcagtttgtcgtctcactgtttacccatctcggcagccgctcagaagaagcgacgctggtcgccgaccacctgatcgccgccaacctggccgggcatgactcccatggcgtcgggatgatcccaagctatgtgaaatcccatgccggcggttttctgcagctcaaccgccacgccacggtcaccaaagatgccggcgccgtggtcaccctcgacggcaacgccggcttcggccaggtagtcgcccacgaagcgatgcagttaggtatcgaaaaggcgaagcagcacggcatggcggctatcgccctgcgcaatgcgcatcacgtcgggcgcatcggctactgggccgagcagtgcgccgccgccggactgatctccattcacttcgtcagcgtaatcggcgacccgatggtcgctccgttccgcggaaaagacagtcgcttcggcaccaaccccctgtgcgtggtgtttccgcgagagggccatccgccgctgctgctggactacgccaccagcgccatcgcctttggaaaaacccgcgtcgcctggcacaaaggggaagccgtggcccccggctgcctgatcgacgccgaggggttgcccaccaccgatccggcggtgatgcaaacctcgccgctgggcgccctgctcaccttcgcccagcacaaaggctatgccctggcgacgctgtgtgaagtgctcggcggcgcgctctccggggggcaaaccacccatcaggaaagcctgcagaccagcgtcgacgccatctttaactgcatgaccaccgtgatcctgcgcccggacgcgttcgatgccccggacagccaggcgcagacggaggcctttatcgcatggtgtaaacagtcgccgcacgatcccgatgccccggtgctggcccccggcgaatgggaagccgccaaccgcgaagcgcgcctggccgaggggatcccgctggatgcgggcagctggcaggcaatctgcgccgccgcacgcgacgtcggcctgagcgagtcgcatatcacccgctgccgccctctcgcgtag

SEQ ID NO: 269815 - DNA, 1089 bp, Klebsiella pneumoniae
atgtataagaaaataagtggtttagtggtttcactgacggccgttttcgcctgtgccgcctgggcggaggtgcctgcgggctatccggcggattatcaaaaaacggttgatgccgccgtcaaagagggcaaggtggtgatctattccacaaccgataccaaagccgccgggccgttaattaaaggattcgaagcgcaatatccgggcgtcaaagtcgaatataacgacatgaacagcaccgagctgtataaccgctatatcagcgagcaggccgccgggggcggcagcggggacgtggtgtggagctcatcgatggatacggcgctgaaattagccaccgaatacgcggaacaatatgcctcgccggaggtgaagcaattgcccgactgggcggtgtggcagcagaaagcctatggcaccacctacgagccggtggtatttatctataacaaacggctgatcccgcagaatgaggttccggattcgcataccgcgctggcaaaattgatcgccagccaggccgataaatttaaaggcaaagtcaccacctacgatatcgaaaaatcgggcctcggctttatgctggcggtgcaggacagccaggccgacgcgaactattttaccgacctggcgaatatcgccaaaggcggcctgacggtgcagtcttccaccggcacgatgatggagcgcgtctcctctggcgaaaacctgatcggctataacatccttggctcctatgcggaagcgcgggcgaaaaacgatccctctttaggcattgcctatccgaaagattacgtgctggtgctctcccgcgtctcgtttattagccaggagagcgaacatcccaatgcggcaaaattgtggctggactatgtcctgtcggaaaaaggccagcagatcctcgccagtcaggcggatattccctctattcgtcgcgatattgaaggcaaaaatgatatcgacggcatgaccgcgctgctgggcaaagcgttaaaaccgatcccggtcaacgaaacgctgctggattatttacagccgcaaaaacgtctgcagtttattaaacaatggcgcagcgccgccgcgaaataa

SEQ ID NO: 269816 - DNA, 1770 bp, Klebsiella pneumoniae
atgaatgtattacgcagaaagtggcaggggctgccgcgcggcgtggtggtgtgcatcacggcgctggtgatttatgtcccgctgttatttattgtggtgcagagttttctctccgcgccgttcttttcccgctccaaatcctggagcctggaagccttcgcctttatttttaccgacccggatttttatctggcgttaaggtcaggctttattctggcctttggcctggtgattatcgccattccactgggcggtattttggcctttctgatggtacgcaccgatttacccggccggcgtttcattgagccgctgatcctggtgccgatcttcgtctcgccgatggtgctgggctttggctacgtggtggccgccgggccggtaggcttcttttcccagtgggcacagcagctgatcggctttgtgccgtggaatatctactcgatgttcagcattgtggtcatcgccggcttaacccacgtgccgcacgcctatctttatatctcttcggcgctgcgcagcgtcggttccgacgtggaagaggcggcgcgcaccgtcggcgccacgccgctgcaggtgatgacctcggtgagtctgccgatggtgcggccgtccattctttacgcctgcgtgctgctcttcttcctcggtctggaggttttcggtctgatgctggtgctgggcgaccccgagggcaacatggtgctggcgacctatctctacaagctgaccaacaagctcggcaccccctcctaccatctgatggcggcggtggcggtggtgctgatctgcatcaccatcccgctggtgatgctccagaggcggctgatgcgcaccgccaaccgctttgtcaccatgaagggcaaggcgtcgcaggcgcgggcgctgccgctgggtaaatggcgttgggtggccggggcggtggtggtggcctggctgacggtgaccatcggcgtgccgctgctcggcgtggcgctgcgggcctttatctccaactggggcgtcggcgtgtcgctgtgggatgagctgtcgctgacgacgttccacaatatctggcagcagcccaacctgctgcgggcaatcgtcaactcgatggctatcggcatcgtcggcggcgcgctggcggtgatctgctatctgtttgtcggtatcgccatgcaccgcaaagcggacaacgtcacccgctttcttgattacagcgtactggtcccgcgcgcggtgccggggctgctggccggtctggccttcctgtgggtgttcctgtttgtgccgatgtggctcgatcagtcgctgaagcacggctggctctcggcgctgccggtggccgactggctgcgggagcaccttatcgtgcagctgcgcgcgctgcgcaacaccatcttcagcgtctggctggcctacaccgtggtatggatggcttatggcctgcggctcatctcttcgacgctgctgcaggtgggcccggagctggaggaggcggcgcgcagcaccggcgcctcgcgggggcagatcacccgccacgtcaccgtcccgctgtcgcgctatgggctgattggctcctggctgctgatgttcctgatctttgagcgcgaatattccaccggcgtctatctgctgtcgccgggtaccgaaaccatcggctcgatgctggtgtcgctgtgggcggcgggggccatcgatatcgtcgcggcgctctcctttatcaatattctgctggtggtgattggccttggcatcgccctgcgctttggagtgaaattacatgattga

SEQ ID NO: 269817 - DNA, 1071 bp, Klebsiella pneumoniae
atgattgagttatcggtagaaaatctgcatctcacctatggcgacaacccggtgctgaaaggggtgtcgatgacgctcggccggggagaggtggtgtcgttgctggggccgtcgggaagcggcaaaaccacgctactgcgggcggtggccgggctggaaaaaccgacgagcggacggatcgccatcggcaaccgcacggtgtacgacggcacgccgcgcagcgagatcccggccgaagagcgtaacctcgggctggtgttccagtcctatgccctgtggccgcacaaaacggtgttcgacaacgtggcctatccgctgaagctgcgtaaagtggccgccggggagataaaagagcgggtgcagcgcgtgctggatcagctggggctcgggcaccttggcaaccgccatccgcaccagctctccggcggccagcagcagcgggtggccatcggccgggcgctggtctacaacccgccggtgatcctgctggatgagccgctctccaaccttgacgccaagctgcgcgaagaggcgcgggtgtttctgcgcgagctgatcgtcaagctgggcctgtcggcgctgatggtcacccacgatcagaatgaggcgatggccatctcggatcgtattctgctgctgaacaatggcgtcatcgagcagcaggggacgccgcaggagatgtacggcagcccggcgacgctgttcgccgccgagtttatgggcagcaataaccgcctgcacggcaaggtaatggcgctggagaacggcagggcgcggatcgaaggcgccagctggagcctgtgggggcgagcgggcgagggggttagcgtcggcgagccggcgacggcggtgatccgcgtggagcgcctgcgtctggacggcgcggcgcaggataacagtctccagctaccgctgctgaccagcatgtacctcggcgaccgctgggagtacctgttccgcaccgagggcgacgatttcccgctgcgcgcctacggaacggcgctgcgcgatgccgaacactgtcatctgacgctcccggcggaggatgtgtggatttttccgcagcggtaa

SEQ ID NO: 269818 - DNA, 372 bp, Klebsiella pneumoniae
atgttcgatcatgtgaaattcggcgtcagtgattatgccgcgagcaaagcgttctttttacaagcccttgccccgcttggcgtaacgctggtcggcgaaggcgagccgacctacggcgcagagctggccggcagcggcgatgtctctttgtgtctctatcaaagtgcggacaaaccggcgccgctgcatatcgcctttcgcgccgacagccgcgaacaggtcgacgccttctggcaggcggcgctggccgccggaggaaaggacaacggcgcaccggggttacgaccaaactaccacgccagttattacgccgcctttgtgattgcgccagacgggcacaatattgaagccgtgtgccatctggcgtcttaa

SEQ ID NO: 269819 - DNA, 756 bp, Klebsiella pneumoniae
atgatgtcgagcgagaaaactaacaattccaggcgtgatttcctggtgaagtcgatggcgctgatcccgacggtggtgatcggcggcgcgggagcaggggccattggcgtggccaccagcgcgaccgcgcaggcggcccccgcttcagagccagcctccgggaacacggcggcggccagcgactggaagccgcagttcttcaacgatcgtgagtgggcgtttatcaacgccgccgtcgcgcgcctgatcccagcggatgaacttggccccggcgccaaagaggccggcgtgccggagtttatcgaccgccagctcaataccccttacgccaccggctccatctggtatatgcaggggcccttcaaccccgacgtgccgaaagagatgggctatcagctgccgctggtgcccaaacagatctataacctcgggatcgccgacgccgaggcgtggtgtcaggacaagtatcacaagaccttcgctgaactgagcaacgagcaacaggacgaggcgctcggcctgtgggaatccggcaaagccgagttcaaacagcttccggcctcgctgttcttcacctatctgctgcagaacacccgagaaggcttcttcagcgacccgatccatggcggtaataaaggcatggtcggctggacgctgattaattttcccggcgcgcgcgccgactttatggactgggttgaacggggcgaacgctaccccttcccgccggtatcaattaatggggagagggcgtaa

SEQ ID NO: 269820 - DNA, 1785 bp, Klebsiella pneumoniae
atggccaccgtattgaaaaaaaccgatgtcgcgatcgtcggcttcggctgggttggggcgatcatggccaaagagctgaccgaagccgggctcaacgtcgtggcgctggagcgtggcccgatgcgcgacacctggccggacggcgcctatccgcaggtgattgatgagctgacctacaacatccgccgcaagctgttccaggatctgtcgaaaagcaccgtcaccatccgccataacaccagccagcaggcggtgccgtatcgccagctggcggctttcctgccgggtaccggcgtgggtggggccgggctgcactggtccggcgtccatttccgcgtcgatcccatcgaactgcggatgcgcagccactatgaagagcgctacggcaaaaacttcattccccaggatatgatcatccaggatttcggcgtcacctacgacgagctggaaccgttcttcgataaagcggagaaagtgttcggcacctccgggaccgcctggtcgatcaaaggcaaggtcgtcggtaaaggccgcggcggcaacgctttcgccccggaccgctcagacgacttcccgctgccggcgcagaaaaacacctggtcagcgcagctgtttgaaaaagcggcgctcgaggtgggttaccatccctacaacctgccgtcggccaacacctccgactcctataccaacccctatggcgcgcagatgggtccgtgcaacttctgcggtttctgcagcggctacgcctgctacatgtactctaaagcctcgccgaacgtgaacatcctgccggcgctgcgccaggaaaaacgctttgagctgcggaccaacgccaacgtgctgaaggtcaacctgaccgacgacaaatcccgcgctaccggcgtgacctacgtcgacggccaggggcgcgaaatggagcagccggcggacctggtgatcatcggcgccttccagttccataacgtgcacctgatgctgctctccgggatcggtaaaccgtacaatccggagaccggcgaaggggtggtggggcgtaacttcgcctaccagaacatgaccaccatcaaggccattttcgacaaagacacctataccaacccgtttatcggcgcgggcggcaacggcgtcggcgtcgacgacttcaacgccgacaacttcgaccacggcgcggccggctttgtcggcggttcgccgttctgggtcaaccaggccgggaccaagcccatctccggtttcccggtaccgccgggcaccccggcgtggggcagcaagtggaaagcggcggtggccgatacctacacccatcacctgtcgatggatgcccacggcgcgcaccagtcctatcggcagaactacctcgatcttgatccgaactacaaaaacgtctttggccagccgctgctgcgcatgaccttcgactggcaggaaaacgacatcaagatggcgcagtttatgttcgataagatggcgccgatcgccaaagcgatgaagccgaaatatatcctcggcagcccgaaaaacgccaacagccactttgataccaccacctaccagaccacccatatgaacggcggggcggtgatgggggaggatccgaaaaccagcgccgttaaccgttatctgcaaagctgggacgtgcataacgtcttcgtcatcggcgcctccgctttcccgcaggggctgggctataacccaaccggcacggtggccgcgctggcctactggtcggcgaaggcgatccgcgagcagtatctgaaaaatccgggtcccctggtgcaggcataa

SEQ ID NO: 269821 - DNA, 1338 bp, Klebsiella pneumoniae
atgaaaatgcaatggttatcggccctggtgcttggggcattgagctgcgcggccttcgccgaagaggcgcctgtggacagcaatctgattaagcaaggggagtatctggcgcgggcgggggactgtgtcgcctgtcacaccaacggcaaagcgggcaaacctttcgccggcggtctgccgatggagacgccgatcggcaccatctactccaccaatattacgccggataaagaacatggcattggcgggtacaccttcgaagagttcgacgacgcggtgcgcaagggcgtgcggaaagacggttccacgctctatccggcgatgccgtatccctcgttcgcacggatcagcgaagcggacatgcgcgccatgtacgcctactttatgcacggcgtggagccggtgaatgtcgccaacaaggacaccgacatcccgtggccgctgtcgatgcgctggccgctggcgttctggcgcggcatcttcgcgccgacgccgagcgactttgtcgccaacccgcaggttgacccggtgctggagcgcggccgctatctggtggaaggcctgggccactgcggcgcctgtcataccccgcgtagcctgacgatgcaggaaaaagcgctcagcgaaagcgaaggcgatgattacctggcgggcagcaatgcgccgattgacggctgggttgcctccagcctgcgcggcgaaaaccgcgacggtctggggacctggagcgaagccgagctggccgagttcctgaaaaccggacgtaacgataaatcggtggtcttcggcggcatgagcgatgtggtggagcacagtctgcagtatctttctgatgacgacatcaccgccatcgcccgctatctgaagtcgctcccgccgcgcggcggcaaacagaccccagccccggtggaagacagcgtggcgaaagatctgtggaagggtaacgacagcaaaaccggcgccgcgctgtacgtcgataactgcgccgcctgccaccgcaccgacggcgtaggctataaacgcgccttcccgtcgctgaagggcaatccggtggtgcagaccgaagatgccacttcgcttatccatatcgttctgaccgggagcaccacgccggcggtgaaagatgcggtctccaacctgaccatgccgtcgttcggctggcgtctggacgaccagcaggtggcggatgtggtcaacttcatccgcaccagctggggcaacaacgcgccggcggtcagcgccagcgatgtggcgaaggtgcgtaaggagaccgcggcgcacgatgagaaggcgttaggcaacgctgatatctcgaagctgccgggggccggacagtaa

SEQ ID NO: 269822 - DNA, 624 bp, Klebsiella pneumoniae
atgctgcatgcagagcgactgacctgcatcgttgacgatcgaccgctgtttgcggagctgacgctgtcccttgctgccggtgagctgctgcaggtcgccggtgataacggcgcggggaaaacctcgctgctgcggatcctctgcggcctggcgcgcccggaaagcggcggggtgagctggcagggccagccgctggcgaaggtccgggagtcatttcatcgtcagctgctgtggctgggccataagcccggcgtcaacgcggcgctgaccgccgatgaaaacctgcgtttcttctttccggccagccgccttcagcagcgggaacgctccctcgccgccgtcggcctggcgggctatgaagatctccccttgagccagctctccgccgggcagcagcgccgggtggcgctgacccgcctgtggttaaccgacgcgccgctgtggatcctcgatgagccgttcaccgccctcgacgccacggcgatggaaaccctgacccgacgcctggagcagcacgcccggcaggggggaagcgcgatcctcaccacccaccagccgctgcggccgctgcgctgcccgttgcgcaccctgcgcctcggcggcggcgacgggaggtggcaatga

SEQ ID NO: 269823 - DNA, 660 bp, Klebsiella pneumoniae
atgatgcgggcgctgttggcccgggaactgcgcctggcgtggcgcagcggggcggagatcctcaatccgctctggttctttctgatcgtcatcaccctgtttccgttcggcgtcggcgccgcgccgcagctgctggcgcagattgcgccgggcgtggtatgggtcgccgcgctgctggcggcgctgctggtgatggatcggttgtttcgtgacgactggcaggacggctccctggagcagctgttgcttctgccgacgccgctggtggcggtggtgctggtgaaggtggtcgcccactggatgatgagcggcctgccgctgctgatcgtctctccgctggcggcgctgctgctggggatgagcgtgcatgacgccggcgtgctggcgctgaccttgctgctcggcaccccgacgctcagttttcttggcgcggtgggggttggcctgaccgtcggcctgaagcgcggcggcgtcctgctgagcctgctggtgctgccgctggcggtgccgctgctgattttcgccaccgcggcctgccaggccgccgccgccgggctcccggtcggcggctatctggcgatgctggcggcgttcttaaccgccagcgccaccctgtgtccgttcgccaccgccgccgcgctgcggctaaccgtgcaataa

SEQ ID NO: 269824 - DNA, 696 bp, Klebsiella pneumoniae
atgaatgacatctcttctgacgatatccttctgctgaaacagcgccttgccaaacaggaagcgctgaaccgtgccctgctggaaaagctggcagaccgggagcgcgaaatagaccatctgcaggcgcagctggataaacttcgccggatgaacttcggcagccgttccgaaaaagtctcccgccgtatcgcacaaatggaagccgatctgaaccggcttcagaaagagagcgatacgctgaccggtcgggtggatgacccggcagtacagcgcactctgcgtcagacccgcacccgcaaaccgttccccgaatcactcccccgcgatgaaaaacgcctgcggccagcgggttcctgctgcccggagtgtggtggtgcgctgagttacctgggtgaggatgccgctgaacagctggagctgatgcgcagcgccttccgggtgatccggaccgtacgggaaaaacatgcctgcacaaaatgtgatgccatcgtgcaggcccccgcgccttcgcgccccattgagcggggtatcgccggaccggggctgatggcccgcgtgctgacctcaaagtatgcagagcacacaccgctgtatcgtcagtctgaaatatacggtcgccagggcgtggaactgagccgttcactgctgtcgggctgggtggatgcatgctgccggctgctgtccccgctggagtag

SEQ ID NO: 269825 - DNA, 1188 bp, Klebsiella pneumoniae
atgtccactgagtatggcgaaattgcgaatgatgaaacttggtttgatgattatgcagatgagttggatcaattccaaatttcagaatatgatataacttctactcccaatgattttaatgtaatgacattgcatagttttattgaatctggtgcggtaaaaataccaggttttcaaaggaactttgtatgggacatggcccggtcatctaaattgattgaatcccttattttagggttgccggttcctcagctatttttatatgagcaagcaaggaatagttttttagttattgatgggcagcaaaggctcatgtctatttattatttcattaaaaaacgttttcctaagaaagagatgagggttcagctaagagagatttttgataaggaggggcaaatacctgaagagattcttcatgatgacacctatttccaaaacttcaatttaaaattacaagagaaggtgcctggggttaaaaatatatttaaagggctgaattattcaactcttggtgaatataaaacgcagtttgatcttcgtccgcttcggaatataattgtgaagcaaaatactccagatggagatgattcatctatgtatgaaatcttcaatagattgaatactggggggattaacttaaggccacaggaaatcagaacgagcatgtatcattctgatttttacgcaatgctttataaggttaatattcatcctgggacaagacggattcttgctactactgaacctgacttacatgtaaaagatgtagagattattctccgcggatttgcaatgttgattgatttcgataactatattccttccatggttaagtttttaaatcagttttctaaaaagagtaagacaaatactaaagaaaaaaatgaatatttgcaggatttatatttgagttttattgatagctgttctgaacttcctgatgatgcgtttgttaataaaagcaataaaaggtttaatattgctctctatgaggcagtgtttaccgctgcatgtgagccttcatttttaaaacatgagttgattcgtggaaaaatacaatatgaaagtattgagctaattaagtcgaattcggattttacagcagcagctaacgagggtacgacaaaggttgccaatgttgagctaagaatttctatcgctaagcgtgatttagttattgtataa

SEQ ID NO: 269826 - DNA, 534 bp, Klebsiella pneumoniae
atgtcaacgaacatagtagaaagactacatgcagagtttggcgagctaacccgtatactaagtgagtcaggggagatatcgctgctaaacgtagctgaggataatttcagaaaatcattattattagctgcagctagttacttcgaaaaaagaatgaccgaaaatgtgttgcaatttgcgtatgaaatagctggtgaaaatcatattctcgcagcgctcatacagcaaaaagcaataaatagacaatatcatacatggtttaactgggagcagacgtccgcaaactcctttttttcattgtttggtggttctttttctacgatcgccaaagaagaggtacgtagaaactctacattggaagtatctatacgtgcttttttatcgttaggttcagaaaggaatagacttgtccatcaggactatggaaatttcaccttagagaaaaccactgaggaaatattttcacttttcaataattcattgttttttgttaattggattccgcaatttttacgtgataactgcagatgttga

SEQ ID NO: 269827 - DNA, 1395 bp, Klebsiella pneumoniae
atggctaagtataaggcgtatccggagtataaggattctggggttgagtggttgggggagattcctggtcactggagacttagtaaacttcgataccaatttgcttttggtaaagggcttaccattactaaagaacaccttcaggatgaaggtattccgtgtgtaaattatggggaagtacattcaaaatatggttttgaagttgaccctaaaattcatactttaaagtgtgtaagtgataaatatcttaaagataacttcaactcgttgttatttaaaggtgatattgttttcgcagatacatcagaagatatagatggctcaggaaatttcactcagttagtgagtgatgcgactacgtttgcaggatatcacactattattgcacgccctttcgaaagaaataatagccgtttttatgcttatctcttggattgcatagagttaaggacccaagtccagcatgcagtaaaaggagtcaaagtatttagtattactcaagcgatcttacggaatctttcgatatggcttccatcaaaagatgagcaagagcaaatcgctactttccttgatcacgaaaccgcaaaaatcgataatctgatcgagaagcaacagcaactgattgaactgttgaaagaaaaacgtcaggcagtgattagccatgccgtcaccaaagggctaaaccctgatgcgccgatgaaagattctggtgttgagtggttgggggaagtgccggagcattggattgtttctggttttaaaaaatatttatcatcaattgttgattatcgaggaaaaactcccaacaaaacagatgatggaatattacttgttactgcgagaaatataaaaaaaggtgtgcttgattatacgttgtcccaagagtttgttgctccttctgattacaaagaagtaatgggccgtggcctgccagatatcggtgatgtattatttacgaccgaagcaccattaggtgaggtagcaaatgttgatagagttgacattgcactagctcagcgaattattaaattcaagggtatgatatcccgtcttgataattattattttaaatatttcattatgtcttctgcgtttcagcagtctcttaatctttattcgtcaggcagcacggcgcaaggaataaaagcagaacgctttgtttatttgaggaaattgttgccaccaataaacgagcaaatggaaattgtgggttttcttgataaagaaattaccaaaatagatatattagttgaacaacaatttgtaatgctatctttactccaggaacgccgcaccgcccttatctccgccgccgtcaccggaaaaattgacgtccgtgattgggttgcaccggatacgcaggatgttgaggagtcacaggaggccaccgcatga

SEQ ID NO: 269828 - DNA, 135 bp, Klebsiella pneumoniae; identical to SEQ ID NO: 233142

SEQ ID NO: 269829 - DNA, 690 bp, Klebsiella pneumoniae
atgaaagaacgtggaatgatttttaacggggagatggtgcgggccattatcgacggtcggaagacgcagacccggcggattgttaaagggactgacggcgccgtgaagttctgcaaggaatgggacatcaacggagaagaaattttcgttgttctaggcgaaaaagaccacaccggaatgaatcctgttttgggtgctatctcatgcccgtttggcgcagtcggcgaccgcatctgggtgcgcgaaacatttcaggggccgcttgttcatgaggagttattcgaagaatacagcgcttatcctgaaaagttcgaaacaccggaatactgcgaatatgccgccgatggtggagttaggcctgaatactgtgaccttgacgataacctccgtcatggttggcgaccatctatccacatgcctcgctgggccagccgcattcttctggaaatcaccaacgtgcgagttgagcgccttaattcaatgcacgatgtcgatgctatgcgagaaggaattcagaacctgacgacatgtttacactccgatttcggcattcctggcgtcgtaaatgcgcaacatcctgtgcgagcgtttcaactgctatgggaatcaatctacggcactgacagctggcacgctaacccgtgggtttgggttatcgagttcaaacgcgttgaaggcggtgcagcatga

SEQ ID NO: 269830 - DNA, 1908 bp, Klebsiella pneumoniae; identical to SEQ ID NO: 202064

SEQ ID NO: 269831 - DNA, 600 bp, Klebsiella pneumoniae; identical to SEQ ID NO: 202065

SEQ ID NO: 269832 - DNA, 2985 bp, Klebsiella pneumoniae
atgaaacaacttaaatctatcacgctctcaaacgtccgccgatacggtaccgacaccaaaattgagctcagtggcggtgcaaccattttactggcccctaacggtacggggaaaacggccttcttcgaagcgatcgaatttagcctcacgggtaatatttctcgtctaggcgagaatctctcacccattatcagggacagccagacagtcgctaaggtggtcttggattttggggatgtacaagcctctgcgcaggtgagcaacggaggtaacgtcgaaaggactggtgatttaagctctctttttccggatacgaagtcggaggacatcccctttttattaagacttacccacttactggatcagcgcgagggacaatggctggtcaaagcggatgcaaaagttgcgggcgctcaactggctcgcttgccaatcggtaaagatggaaccctcgttagtaatgctcttggcggcattcgccgcgttctcactgagaagctgaagcatgcaaagggagcccttgaggcgctggaagctgagtttgcggaatggcaaagtctgattcttgatcgggaccaggccgcatcacaatctcagggggccctgcgcagtaaagaaaacatcgcagaatcaatctcagacatcgctcgcaatactcagagtgcagaacaattgccagtaggtttattagttccgccagtgggtatcagcaatctggaaactatgcacgatgcattagagcaaacagtacaagcaaaactgagccgacttcgcgaacagatttcagcgcttatggaagtggatggactaattggccggttcgtttctgagcaagcgcgttctgagcagcttggtaatgcgcttataactgctaaagaggagctgatacaaaaacaacaggtacgatctcagctagttgataaaaaagataaactccagaaggaactcgtcacagctgaagcagaacgtgatgtaattatacagcagcttaaccggctcaatagtgaggcgcgaaccaaagaggccttcgaacaacgtaagcttgacttggcgtcagctgacaaagcgttggtcgacgcccagtctcaagcatcagccttgaggcacgtacatgaggggaacgaacagctccgtattgagcatgaacttataaataaacagcgtaagtctctgcagcttgtagatagtgaagtacttactgctcatcaacttatcaagcgctgggaagacattcttcaacatattgcgacaattaccgacttggttagcaatgaggaaattcaggagcgtgtacttcaggagcatctccataccgcgaactcgttaaaggtatcagctgaaacagatgagctttcagcgaagcagttccatgagatgctcacgtctactgctgactctataaggcaatccgtagccaccattgccgcacatttaccagaggatcgaggggactgccctttatgtggagtggagcacggcgctgccgttcttcatgaacgcgttactagatcattagaggctatagaccccaaagtcatcgaagcagaacagcgcgttaaaatagcatccgatcacttgcggaaatgcacagaaacagtgacgcataccgaaacagaattgaaaacgtgccagagtaaaattgttgaactgcgaggcgatatcgttcgctcagtagcggagatcaatcaactcaaaacaaacatccttcttgacggagatacggtacaactagcgaaagcatctatccaacgtcgcgaagaatcaaatgcttcagctaaacagcagcttgacgaaaaacagcttaaccttgcccccttaccgacacctgaaatattggaagcgtctaaaaacgcataccaatcgtcgactcgcgaactggatactgcgcggcagaatcgggccgaagtcttggctagccttgaacaaacaaccgctgcattagctgcaataacagcaggggcactcccttcaaaaacgctggctgatttatccactgaacaaaacaaaaatacaattcaactagctgaattaaaatcaaaaattgaggctgagcaatctgcattggatagacagaatatccctttagctgaagttaataataagataaatggcctcgaaaagcagatcactgacgctcaggttcagttagcctcaatccggtattcatggagacaactgtcctttcccggcgatcccgctctcgaagtggcgagcagtaaagagattcaactgcagtcatccgttgctgacctgtcccgacattcagaacagttacaaacactcaaaattgagattggtacttggagcaagctggaacagactcgtttggcacaagggcttatagatcgtcgccgaggaacatcatcggagcaggaattcgctacaagtcttagccagcgaattgataacgagagaacaaatcagatgcagttgctgcaattatctgaagcgatggagacgctcaatcgttgcctatctactgagatctcgaatgtacaaaaacatgtgctctctgtcgttccaaggtggcaggctttgctcaaacgcgtagtcagagaacagcgctttactggcaccagtttgggttttcgcagtatctacagaaaggaacatgctgaagtatctgttccgttacatggggagtcagtaccggttccggcgatagccagcgaagctcagctaactgatctacagcttaccttcttgctctccatggcattggaacaccagtggtcctcatggcgctgcctgcttctggatgacccaacacagcatcatgacttggtccacgcagcgtccgtattcgatttactgcgtgattacatagttgatcatggcttccaggttgtaattgcaacacatgatgcccttcaggcgcgttatttcatgcgcaaactgcaaaatgatgccattgatgcacgcttgtggtcactcgttccaacacctgaaggggtgacggcatctgagatgcggataaccaggtaa

SEQ ID NO: 269833 - DNA, 918 bp, Klebsiella pneumoniae; identical to SEQ ID NO: 202067

SEQ ID NO: 269834 - DNA, 1305 bp, Klebsiella pneumoniae; identical to SEQ ID NO: 202070

SEQ ID NO: 269835 - DNA, 714 bp, Klebsiella pneumoniae
atgcactgtcaccttgacttatatcctcagccagaacaggtggctgaggagtgcaagcgtcgagggacttatatactgtcggtaacaacgacccccagagcatggcatgggacctcttcgctggctaaaggaagccaacgaatccgaactgctcttgggctccatccccaaattgcacatcaaagatcgcatgagttagagctgtttgattcactactttcggagacgaggtatgttggcgaaatagggcttgatggtggtaagggatttaaagagcattgggatgtccaactgaaggtatttcgacacatactcaatagtgtgcatcgtgctggaggtaagattatgactattcatagtcggggaagtgcatcagctaccattgatgaaattaaaaatattgatgggatagcgatattacattggttcactgggacacccaagcagctagaaagagcaatcgatttagggtgttggttctctgtggggcctgctatgctcaatacaattaaggggaaggccttggctttaacaattcctaaatcacgcattcttacagaaaccgatgggccatttggtaagtttcgtaatgatccactaatgccatgggatagtgagattgctgagacccagttagccaaattatggggggtgagtctgatagatgttaaagttcagctttctgataatctaagaagactatgtagctattaa

SEQ ID NO: 269836 - DNA, 1449 bp, Klebsiella pneumoniae
atgtttaagcttgatacaataaaaaatcacagaaaagatgacgttatagttagcattgacaataaattgaacaatgagagcttttacacattaattacaggtgagaatgggtgtggtaagtctactttactaagcaaagctattaatagctttctatttatcaaccctaggaaaagtaaagagtgtcaagtttcttcttcgtcaaaatcgcaaccatcgagaataattgccatatgcaatgctcgatataataagtttgcgctaaaaaaaaccttcttggaaaaaaataaaatctataatcctgattattatatccaagcagatcctaccttggaagtagggagagccttaaatgaagtaatccaatcatcattaagggaaataactaatacacaaaatgaagtcaataacaaaacggtgagaaccatacaggataaagaaagatgctttaaagctttttccatgatcggaatacatcctgagattagatttaatttagagttaaatgttgatagaatttgtaaaataaaggatgcgtaccagcgtccggaattaaatgaacctagtcatgtctcagttgatcattccatctctagggattttctttatctcgctaggatgaatcacattagctcaagtgatattgaggattttttcaatttttatgattgtattgacaataaaataattagcttaggagagggttttttacactttgattctcctagatatcagattctatcagaacagactaatactgacctattaaaaatcggaatagcagtgggttttattgcccctacaaaaataaaagttcagcgtgacaactctttgaaatgggtaagccatcatgaccttagttctggacaacaatctttacttttaaatgcaatactcatatccattttcgcgaaaaaaaattctttgatttgcattgatgaaccagaaaatagtcttcaccctgagtggcaaataaactatatgaagtttctagactgcttatgtccatcaaatctgcaaagtcatatttttattgcgacacactcgccacaaataatttcaggactacagagcaataatggttgcatagtgtctttgttaaatttaaatcctatgcataaaaataacagaaatcatatttcaacaagtggggaaataatttcaacaaattggcaagagttacattcagcttcatcgtatagaagaaagtccgctgctcatcaactagtggagatttttaaaagccctggttttgataatgaggcaataataaataagttattattaattcttactaaacagacaaaaaagattgagataaattatgaagatgaaaattttattgatggtgttcaaaatttaattagaaatgaaaaaatagatgactgcgatcctgtattggtaatgtacagacaaattaaagctattgctaatttaagggaattttaa

SEQ ID NO: 269837 - DNA, 129 bp, Klebsiella pneumoniae
atggacaaactggatgccatgcaggtctatgttgcggtcgtggatgcccacagcttcgcccgcgcggcggaggtgctcgggcagccgcgctccacggtatcgcgggtggtgaaggagctggaagcctga

SEQ ID NO: 269838 - DNA, 255 bp, Klebsiella pneumoniae
atgcgcgtactcgtggttgaggataatgccctgctgcgtcaccacctcaaagttcagctgcaggagctgggccatcaggtcgatgcggcggaagatgccagggaagcggactactatctgggcgaacatctcccggatatcgccatcgtcgatctcggcctgccggatgaagacggtttatcactgatccgccgctggcgcagccacgacgtgtcgctgccggtgctggtgctgaccgcccgcgaaggatggtag

SEQ ID NO: 269839 - DNA, 147 bp, Klebsiella pneumoniae
atgactgccatagatcagtttgctgctcatgttggtctggactgggcggatagaaagcacgatgtctgcgagcgtgtcatcccaaaaagtgaattggattccttgatgggcataagtgatagtgtgttcgtgagcaccaggaactga

SEQ ID NO: 269840 - DNA, 234 bp, Klebsiella pneumoniae
atgccgtatgaactgtctcaccttaataacctgtggtatgcgctggggaaaacaacggtcggggatgaggacggtggccttgtgaccgacgaacccttcctgcatttcccgacaggtacccctctcttccatatctggtcatggtttaaatccctgcacgacgggttcgtcgttgccgtgaaactgtacaacacatctgcgcccgacgcgtcaaccgacaggaaaagcaaatga

SEQ ID NO: 269841 - DNA, 978 bp, Klebsiella pneumoniae; identical to SEQ ID NO: 202104

SEQ ID NO: 269842 - DNA, 1167 bp, Klebsiella pneumoniae; identical to SEQ ID NO: 108071

SEQ ID NO: 269843 - DNA, 1272 bp, Klebsiella pneumoniae
atgaaacgactcttaattttactatgccttttcctgaccgcctgtgaccagaataatacccacaaggacgcgccgatgaacccgctgaccgatatcaatacccgcctggcgtttacctgtaaacgccagattattcctgaggcatctgctgataccgatgtcctgtttaaatatgcccgctggctgcaaaaaaataacctgattaaccgggataaaacggtggatgcggaaattgcgcgactgtatcgcatcgcggcggaaaacgggcattacaaagccagtattaacctgcagaacggtgcgctgcgcgggcgtttttcgctgagcagcactgaacttttgcgtctgagccaacaactgattgatgcgaaggttgccgccggttattactttattgccatcttcctggagcaaggtgcggcaggactggcgaaggacccggagatggcgctgcgctactatcgtaaggcggcagatgaagggaatccccaggcgcaggcgtatgtaggaaaaaaactcgcgcctgctgatatggccccggatatatcccgtcagatgcgccgttgttccgctgagcaaggggaggggcgtgcagctaatgcattggggaatagccttgcagttgacaaaaaataccaagaggcagtagaggcattccagttgggcgttgcagcaggagattcaggctccgccagtttccttgaacatggatttgcaggcccggaactgaccgacaggctgtactatctggcactggagaaagacccggagcgtgcccgtcgttatgagcagataggcgctgtgctggcgaaatactcatgggcccagcctgtcgtcccggaaatcaacgatatcgtgccgctgccgccggccccgctgccggagtgggacggtaagctgaagtggctggaggaacgggaggccaatatcccgccgccagcgcctgatgcgaccctgatagagaaactggcgaaagcgaaacagctgaacccggcgacgggcaggccgttgccgacgtcaccggactttgagaaggacagcgtggcgcggctgcagtgccgcagcggtgaaccctgcccgcaaagcggctactggcagccggcgtggcggccccgtgaagggatgagcgaacatgccatccgttacttccgcgagggagacatcatgccggtggagaaggtgaccttcgttcggccacgtccctggccgctgcgcgacagactggtcgtggaggagcaggagacggtgtggcgccgggtcggcgaggcataa

SEQ ID NO: 269844 - DNA, 552 bp, Klebsiella pneumoniae
atgcgctttcaccagcccgccgacgccatccgcgcgggcatcgtctgcgtgccggaagagcggcagaaacagggagcgatcatcgccctgcctatcgcccagaacatcagtttaccgcagctcagcaagctcaaccctaacggcgtcctgaacgacgcccgggaatggcggctggccgacgagtacgcctcgcgcctgcaggtaaaagccttcagctggcggcagccggtggagaccctctccggcggcaaccagcagaaagtggtgattggcaaatggctggcgacccagcccgaggtgatcattctcgatgaaccgaccaaaggcatcgatatcggctcaaaggccgccgtgcatcagtttatgtccgagctggtcagccaggggctggcggtgattatggtgtcgtcagagctgccggaagtgatgggcatggccgaccggattatcgtaatgcacgaagggctgatggtcgccgaataccaggccggggaagcgacagcggaaaccatcgttagcgccgccagcggcatcggccaggaggcggcatga

SEQ ID NO: 269845 - DNA, 135 bp, Klebsiella pneumoniae; identical to SEQ ID NO: 239987

SEQ ID NO: 269846 - DNA, 285 bp, Klebsiella pneumoniae
atgcggcgcttcgctggggcttgtcgcttcgtctttaaccgtacgctggcgcttcaaaacgaaaaccatgaagcggggaacaaatttgtttcctacaccaaaatggcttcatggctcattgagtggaaatcacaccctgatacccagtggctaaaagacacgccatcacagccgttgcagcagtcgctcaaagatctggagcgcggctacaagaatttcttccagaagcgtgcagcattccctcgtttcaagaaacgcggccaaaacgatgcccgcaaggcgtga

SEQ ID NO: 269847 - DNA, 228 bp, Klebsiella pneumoniae; identical to SEQ ID NO: 105755

SEQ ID NO: 269848 - DNA, 633 bp, Klebsiella pneumoniae; identical to SEQ ID NO: 30074

SEQ ID NO: 269849 - DNA, 903 bp, Klebsiella pneumoniae; identical to SEQ ID NO: 30075

SEQ ID NO: 269850 - DNA, 552 bp, Klebsiella pneumoniae
gtgataaaaaaacctgaaggtgcttttctggaagatgacaaggaacctgtcattgaacggattaacgagttaatacagaggtatccatcacgcagtgctgctgcacgagcgtggggtataaacattaatacacttaagagttactttagacgcggtgactccgttcctacaccacgtgagaacatccttgtccgcatagccaataacgaaggcgtgggactggactggcttaaagccggggccgggctaacacgagaatcaccaaaatcaccagaaacaccaacaatacccaaccaagagaaggatcgactacaagagatgctttcgtttttaacgccagatgaaagacagcagctcacagcactgctcgcaagaaagggagtcgagctcgtcttgtatcttttggatgaacgaaatatagagttactacaaagcgatgacgatgttaaacatcgtgcattggcgatgatgagagcgaaaaaagggacatctaaaactagtaaacaaatagccaacccagacctctccaattcaagcaaaaaggtcgtttga

SEQ ID NO: 269851 - DNA, 141 bp, Klebsiella pneumoniae
atggttcccttctatccgcgcagaaccaagactttccaacatatgaaatacgtctttcaactgtgcgaacagaatcggatggacgtcggtttccaacctcaggtgcctgaggagttccagttcagtaagaacatcaactaa

SEQ ID NO: 269852 - DNA, 702 bp, Klebsiella pneumoniae
  misc_feature (387)..(396): n is a, c, g, or t
atgttctgccagcctttgcgccagctttcaagcgtttcaggcttatcccattcacggacctttttaccaaagccggtagaaaggacctcacgggttgttcccatgatatggatatgtgggttacgaccattgatatcgtggataacaacatctgcgatgatgccttgcttggtaaagtgttcaagaacaaaagcagcggtgagttcaatgctttgttctggtgttagctcagcggggagggcaattttaaattctttggcaagacgggcatcttttctcttctctgaggcttcaacagcattccagagtgtttcactgtcaacaatcagggcaggaggggtatgttcaggtgcaaaaatctgcgcaaaggaaaggtcctttttatgnnnnnnnnnnctttttatgtgctgttttgcgaccacaaacttcaccagttctgtaatcgaagaaaactttacggtgacgatatgcagcagagttaaccgaagatttgccttcgcctctgctgatgttctccattttaaaactgtatatcgccatccaaagatacctctaatgctgactagctggttttcgttttacgcaaggaaaacgctggggttgacgttgaccttgattttgtttccgaaggaaacggttttagcctgcggcaggcaaccgtcggtagaccccacggcattagagcgaagcgataatgcgtaa

SEQ ID NO: 269853 - DNA, 840 bp, Klebsiella pneumoniae; identical to SEQ ID NO: 213617

SEQ ID NO: 269854 - DNA, 294 bp, Klebsiella pneumoniae; identical to SEQ ID NO: 214838

SEQ ID NO: 269855 - DNA, 1011 bp, Klebsiella pneumoniae; identical to SEQ ID NO: 214760

SEQ ID NO: 269856 - DNA, 405 bp, Klebsiella pneumoniae; identical to SEQ ID NO: 111143

SEQ ID NO: 269857 - DNA, 333 bp, Klebsiella pneumoniae
atgctcacggcggggatttttcctctgaccgtattctgcaagaacggtgatatcacgaatcccgagctgtctggcggtaaaatgccggacgccggaaggaatatgattcatatcggtgaggaaggtgcccagaaaacggacacatccaatttgcagggcaatgcccagacggttgtgatcacctctgctttttccgataaattccttgtctgcttcatcaaggtgaaaatatcgtgccagctgaagctcatccggttcaccggtgaatctgccatagctttcagtctgctcagtggtcagaaagtcaacgggcatatcggcctccctgcctga

SEQ ID NO: 269858 - DNA, 558 bp, Klebsiella pneumoniae
atgcgaatttttggttatgcgcgggtctcaaccagccagcagtccctcgatattcagatcagagcgctcaaagatgcaggggtaaaagctaaccgcatctttaccgacaaggcatccggcagttcaacagatcgggaagggctggatttgctgaggatgaaggtggaggaaggtgatgtcattctggtgaagaagctcgaccgtcttggccgcgacaccgccgacatgatccaactgataaaagagtttgatgctcggggtgtagcggttcggtttattgacgacgggatcagtaccgacggtgatatggggcaaatggtggtcaccatcctgtcggctgtggcacaggctgaacgccggaggatcctagagcgcacgaatgagggccgacaggaagcaaagctgaaaggaatcaaatttggccgcaggcgtaccgtggacaggaacgtcgtgctgacgcttcatcagaagggcactggtgcaacggaaattgctcatcagctcagtattgcccgctccacggtttataaaattcttgaagacgaaagggcctcgtga

SEQ ID NO: 269859 - DNA, 333 bp, Klebsiella pneumoniae; identical to SEQ ID NO: 96870

SEQ ID NO: 269860 - DNA, 558 bp, Klebsiella pneumoniae; identical to SEQ ID NO: 25303

SEQ ID NO: 269861 - DNA, 333 bp, Klebsiella pneumoniae
atgctcacggcgggtatttttcctctgaccgtattctgcaagaacggtgatatcacgaatcccgagctgtctggcggtaaaatgccggacgccggaaggaatatgattcatatcggtgaggaaggtgcccagaaaacggacacatccaatttgcagggcaatgcccagacggttgtgatcacctctgctttttccgataaattccttgtctgcttcatcaaggtgaaaatatcgtgccagctgaagctcatccggttcaccggtgaatctgccatagctttcagtctgctcagtggtcagaaagtcaacgggcatatcggcctccctgcctga

SEQ ID NO: 269862 - DNA, 558 bp, Klebsiella pneumoniae; identical to SEQ ID NO: 25303

SEQ ID NO: 269863 - DNA, 231 bp, Klebsiella pneumoniae; identical to SEQ ID NO: 224064

SEQ ID NO: 269864 - DNA, 246 bp, Klebsiella pneumoniae; identical to SEQ ID NO: 215022

SEQ ID NO: 269865 - DNA, 558 bp, Klebsiella pneumoniae; identical to SEQ ID NO: 25303

SEQ ID NO: 269866 - DNA, 231 bp, Klebsiella pneumoniae; identical to SEQ ID NO: 121864

SEQ ID NO: 269867 - DNA, 354 bp, Klebsiella pneumoniae; identical to SEQ ID NO: 223602

SEQ ID NO: 269868 - DNA, 648 bp, Klebsiella pneumoniae
atgtgtctgcagtactgccgctcactgcgcagtttctccgcagcacgctccgcgtactggcagacagcctggcgcattgcgtcatattccgtgatgcgttcaccaaaactccggctgcagactatctgctgttttggcggaggcgcttcttccagcgaaatacagctttctccgttgagttcccggacggttctctccagcaccacgttgaaattcttcctgatgaatgctggattcgcgcgcgccagctgtagtgctgtggtgatccccattgtgttcagcttcttcgagatccggcgcccaacaccccatatttcttccaccggctgcagtgaaagcagtttctctgtccggcggggattatccggggtcaaagccagtacgccgccaaactgcggccactctttggaagcccactgggctgattttgccagcgttttgctgggtcccataccgacgccgatggtcagcgcggtgtggcggtgcacatactctcgcaactggcgcccaaaatcctcaaaatccacgcagttgtcgatgccggcgacgtcgaggaacatctcatcgatactgtactgctccacgcgcggcgccagcgcctcaaggcaacgcatgacccgttctgacatactgtggtacagcgaataa

SEQ ID NO: 269869 - DNA, 405 bp, Klebsiella pneumoniae
gtgaaagcgtactatatacttggacataacgttgcatggcttaacggtatatgcctgattctttttgttattggtgtggtcggtgcgatggcaatggttgccatccctgaaaaattcaatcttcgagttaacagaggcgatacattcatatactgtgcgcttatagcggtggttgggttttccgggatgttcgttatctccattcactcattttcgatggatgaacttgaagcaggtagacactggaaagatgactgccggacacttgaggtaaacatgccgacaggcgcttttaccagccctgttaataaactggactgtgatggcatcatcattaatgtgccaggtgagcggtattatgcgtatatccatcagtgggaattataccaggcgaataaaaaatga

SEQ ID NO: 269870 - DNA, 312 bp, Klebsiella pneumoniae
atggctgaataccagttaagttttgatggttttgttcgacttttttttgcaatggcaatcattatctgtggttacgggtatatagttatgagcatttttgtaaaggatacccttactcatattttaatgttactgggtcttgttgggttcagtgctttattttctttcatggtgttcatggataaaaacatgtgggccggttctcctgatttgacgctgtcagtaataacgggattttttacagccacagtgatcttttatatgttttatgtcttgatttattcctttgatcagatgggggcaggtgaatag

SEQ ID NO: 269871 - DNA, 393 bp, Klebsiella pneumoniae
atgatgctgttttttagaaagtatggatttttgtttatccctccagtctactggctcatctatctgggcgcccggttgacttacaatggactgacaggagagtattctcctgatttctttcagggtattcgacatgaaggcatctatattatctgtagtttgtgtatcttttattttttctgcttagaggtggaagttggtgatggggagttctcagcgaacattctgttcctgattgttttctttcatgtggttttattatttatcactctgcttatttgtttgtggcaaggggaggtgttgttggattcgatctttatgggtcagattattgcctccatgtgtttattgttttttattccagtgctttccattataagaaggagattctag

SEQ ID NO: 269872 - DNA, 231 bp, Klebsiella pneumoniae
atgtcacccggcttcagaaacgttcttcgctttgccggcgtccccgtcgacagcagcgaaccggtacgcaggcagtacggcagtcgcatgattggcattgtgacggtatgcctgctcccgctcctggtgttcgacgtcccgctgtgggttttcgtgctctcccaggttatctggggcgcgggcgtgtatatcggcctctccgtggccggagataaatcccggaaccgctga

SEQ ID NO: 269873 - DNA, 246 bp, Klebsiella pneumoniae; identical to SEQ ID NO: 200688

SEQ ID NO: 269874 - DNA, 462 bp, Klebsiella pneumoniae
atggctgccggaatgagtcgcagggagcccctgtttgacccggaggcggtgttcactcttccggccacgccatcttccctgcagctgcccctgtttgcggatgcctgtgcggcgggttttccgagtcctgccggggattacgttgagcaggagctggacttaaacagcctgtgtatccgccatccggcagccacttatttcctgcgcgccagcggagagagtatgaaagacctcggtctgtatgacggcgacattctggtcgtggaccggtcggagaccgccgtggacggcgatgtggtgattgcggaagtggacggcgggtttacggtgaagcggctgcgccttaccccccgccctgccctggagccgatgaatccggcttatccgacgctctggccggaagaactcacgctgttcggcgtggtgatgcacttcattcatcgtacccgcgcccgcctgtaa

SEQ ID NO: 269875 - DNA, 231 bp, Klebsiella pneumoniae
atgtcacccggcttcagaaacgttcttcgctttgccggcgtccccgtcgacagcagcgaaccggtacgcaggcagtacggcagtcgcatgattggcattgtgacggtatgcctgctcccgctcctggtgttcgacgtcccgctgtgggttttcgtgctctcccaggtcatctggggcgcgggcgtgtatatcgggctctccgtggccggagataaaacccggaaccgctga

SEQ ID NO: 269876 - DNA, 246 bp, Klebsiella pneumoniae
atgttgcagatttccgtccgtttttccccggagcaggtgaaggccatgcgcagcggcacctttgccgcactgcagcaggaaattgagcgccgcctcaccccacgataccctcaactctggctgaacatcgggaaaagttcgcagaccgcgctggatgtcagcggcgcgcgcagcgaccaggaaaagtcagacatcatgaacacgcttgaagctatctggcaggacgacacatggctgccggaatga

SEQ ID NO: 269877 - DNA, 462 bp, Klebsiella pneumoniae
atggctgccggaatgagtcgcagggagcccctgtttgacccggaggcggtgttcacactcccggccacgccgtcttcccagcagatccccctgtttgcggatgcctgtgcggcgggttttccgagtcctgccggggattacgttgagcaggagctggacttaaacagcctgtgtatccgccatccggcagccacttatttcctgcgcgccagcggagagagtatgaaagacctcggtctgtatgacggcgacattctggtcgtggaccggtcggagaccgccgtggacggcgatgtggtgattgcggaagtggacggcgggtttacggtgaagcggctgcgccttaccccccgccctgccctggagccgatgaatccggcttatccgacgctctggccggaagaactcacgctgttcggggtggtgatgcacttcattcatcgtacccgcgcccgcctgtaa

SEQ ID NO: 269878 - DNA, 648 bp, Klebsiella pneumoniae
atgtgtctgcagtactgccgctcactgcgcagtttctccgcagcacgctccgcgtactggcagacagcctggcgcattgcgtcatattccgtgatgcgttcaccaaaactccggctgcagactatctgctgttttggcggaggcgcttcttccagcgaaatacagctttctccgttcagctcccggaccgttctctccagcaccacgttgaaattcttccttatgaaggtcggattcgcgcgcgccagctgcagtgctgtggtgatccccattgtgttcagcttcttcgagatccggcgcccaacaccccatatttcttccaccggctgcagtgaaagcagtttctctgtctggcggggattatccggggtcaaagccagtacgccgccaaactgcggccactctttggaagcccactgggctgattttgccagcgttttgctgggtcccataccgacgccgatggtcagcgcggtgtggcggtgcacatactctcgcaactggcgcccaaaatcctcaaaatccacgcagttgtcgatgccggcgacgtcgaggaacatctcatcgatactgtactgctccacgcgcggcgccagcgcctcaaggcaacgcatgacccgttctgacatactgtggtacagcgaataa

SEQ ID NO: 269879 - DNA, 462 bp, Klebsiella pneumoniae
atggctgccggaatgagtcgcagggagcccctgtttgacccggaggcggtgttcactcttccggccacgccatcttccctgcagctgcccctgtttgcggatgcctgtgcggcgggttttccgagtcctgccggggattacgttgagcaggagctggacttaaacagcctgtgtatccgccatccggcagccacttactttctgcgcgccagcggggaaagtatgcgagacctgggtctgtatgacggcgacattctggtagtcgaccgtgcagagaaggccgtggacggcgatgtggtgattgcggaagtggacggcgggtttacggtgaagcggctgcgccttaccccccgccctgccctggagccgatgaatccggcttatccgacgctctggccggaagaactcacgctgttcggcgtggtgatgcacttcattcatcgtacccgcgcccgcctgtaa

SEQ ID NO: 269880 - DNA, 489 bp, Klebsiella pneumoniae
atgcgtaacggaaaaatcctcggctgggcatggggggccggttttgttgacgggattggtcagggcatggaacgggcttcacagccggctgttggcctgggggcaaccgcatctgttggcgccggtgacgttctgaaaatgggggtcggcggtggtgcatctaaagctgcgcagacgctgagcgagtactacatcaaaagggccgagcagtatcacccggtcattccgattggtgccggcaacgaagtgactgtcgtgttccaggatggattccagctgaaaacgattgaagagctggaagcggaaaagaacgggcaacagcaggctcagaatcaggaggcggggccggcaccgcaggctgatgcccatcatcagtcaggcggcggtatgaacggattcaatactgacgagatgctgaagaagctgggcaaacttgatccgcgggagttctctccgggcgcagcgccgcagggggaaaataatggctaa

SEQ ID NO: 269881 - DNA, 597 bp, Klebsiella pneumoniae; identical to SEQ ID NO: 226827

SEQ ID NO: 269882 - DNA, 267 bp, Klebsiella pneumoniae; identical to SEQ ID NO: 215002

SEQ ID NO: 269883 - DNA, 240 bp, Klebsiella pneumoniae
atgaaagacctcggtctgtatgacggcgacattctggtcgtggaccggtcggagaccgccgtggacggcgatgtggtgattgcggaagtggacggcgggtttacggtaaagcggctgcgccttaccccccgccctgccctggagccgatgaatccggcttatccgacgctctggccggaagaactcacgctgttcggcgtggtgatgcacttcattcatcgtacccgcgcccgcctgtaa

SEQ ID NO: 269884 - DNA, 648 bp, Klebsiella pneumoniae; identical to SEQ ID NO: 269868

SEQ ID NO: 269885 - DNA, 462 bp, Klebsiella pneumoniae
atggctgccggaatgagtcgcagggagcccctgtttgacccggaggcggtgttcacactcccggccacgccgtcttcccagcagatccccctgtttgcggatgcctgtgcggcgggttttccgagtcctgccggggattacgttgagcaggagctggacttaaacagcctgtgtatccgccatccggcagccacttactttctgcgcgccagcggggaaagtatgcgagacctgggtctgtatgacggcgacattctggtagtcgaccgtgcagagaaggccgtggacggcgatgtggtgattgcggaagtggacggcgggtttacggtgaagcggctgcgccttaccccccgccctgccctggagccgatgaatccggcttatccgacgctctggccggaagaactcacgctgttcggcgtggtgatgcacttcattcatcgtacccgcgcccgcctgtaa

SEQ ID NO: 269886 - DNA, 405 bp, Klebsiella pneumoniae; identical to SEQ ID NO: 111143

SEQ ID NO: 269887 - DNA, 123 bp, Klebsiella pneumoniae
atgtggagcggctctcctgatttgacgctgtcagtaataacggggttttttacggccacagtgatcttttatatgttttatgtcttgatttattccttttgtcggatgggggaaggtgaatag

SEQ ID NO: 269888 - DNA, 543 bp, Klebsiella pneumoniae
atggcagcacgtggcgttaacaaagtcattctggtcggacatctgggacaggatcccgatgtgcgttacatgcccaacgggggcgcagtggccagtctgacgctggccacgtctgaaacatggcgtgacaagcagacgggagagatgcgcgaaaacaccgagtggcaccgtgttgtcatgttcggcaagctcgcggaagtggcgggcgaatacctgcgtaaaggcgcacaggcctacatcgagggccaactgcgcacccgcaactggcaggacgatgccggagtcacgcgctacgtcaccgaggtgctggtcgggcagaacggcaccctgcagatgctcggcggccgccgtgaatccggagtgcctgagagcgccgcgcagccgcagaatcctgccaccccggcacaacctgctcaggccgcagctaaatccccgaaagcgaagggcggtaagaaaggccgtcaggatgccgccccgtctcagcaaccgcctcagcctctcccgaatgatttcccgccaatggatgatgacgcgcccttttaa

SEQ ID NO: 269889 - DNA, 294 bp, Klebsiella pneumoniae
atgatgtgcatcagcctgcggtgccggctccgcctcctgattctgagcctgctgttgcccgttcttttccgcttccagctcttcgatggttttcagctgaaatccatcctggaacacgacagtcacttcgttgccggcaccaatcggaatgaccgggtgatactgctcggcccttttgatgtagtactcgctcagcgtctgcgcagctttagatgcaccaccgccgacacccattttcagaacatcaccggcgccaacagatgcggttgcccccaggccaactgccggctgtga

SEQ ID NO: 269890 - DNA, 168 bp, Klebsiella pneumoniae
gtggtgattgcggaagtggacggcgggtttacggtgaagcggctgcgccttaccccccgccctgccctggagccgatgaatccggcttatccgacgctctggccggaagaactcacgctgttcggcgtggtgatgcacttcattcatcgtacccgcgcccgcctgtaa

SEQ ID NO: 269891 - DNA, 168 bp, Klebsiella pneumoniae; identical to SEQ ID NO: 269890

SEQ ID NO: 269892 - DNA, 294 bp, Klebsiella pneumoniae
atgatgggcatcagcctgcggtgccggccccgcctcctgattctgagcctgctgttgcccgttcttttccgcttccagctcttcaatcgttttcagctggaatccatcctggaacacgacagtcacttcgttgccggcaccaatcggaatgaccgggtgatactgctcggcccttttgatgtagtactcgctcagcgtctgcgcagctttagatgcaccaccgccgacccccattttcagaacgtcaccggcgccaacagatgcggttgcccccaggccaacagccggctgtga

SEQ ID NO: 269893 - DNA, 462 bp, Klebsiella pneumoniae
atggctgccggaatgagtcgcagggagcccctgtttgacccggaggcggtgttcactcttccggccacgccatcttccctgcagctgcccctgtttgcggatgcctgtgcggcgggttttccgagccctgccggggattatgttgagcaggagctggatttaaacagcctgtgtatccgccatccggcagccacttatttcctgcgcgccagcggagagagtatgaaagacctcggtctgtatgacggcgacattctggtcgtggaccgtgcagagaaggccgtggacggcgatgtggtgattgcggaagtggacggcgggtttacggtgaagcggctgcgccttaccccccgccctgccctggagccgatgaatccggcttatccgacgctctggccggaagaactcacgctgttcggggtggtgatgcacttcattcatcgtacccgcgcccgcctgtaa

SEQ ID NO: 269894 - DNA, 327 bp, Klebsiella pneumoniae; identical to SEQ ID NO: 266620

SEQ ID NO: 269895 - DNA, 366 bp, Klebsiella pneumoniae
atgttcggcaagctcgcggaagtggcgggcgaatacctgcgtaaaggcgcacaggcctacatcgagggccaactgcgcacccgcaactggcaggacgatgccggagtcacgcgctacgtcaccgaggtgctggtcgggcagaacggcaccctgcagatgctcggcggccgccgtgaatccggagtgcctgagagcgccgcgcagccgcagaatcctgccaccccggcacaacctgctcaggccgcagctaaatccccgaaagcgaagggcggtaagaaaggccgtcaggatgccgccccgtctcagcaaccgcctcagcctctcccggatgatttcccgccaatggatgatgacgcgcccttttaa

SEQ ID NO: 269896 - DNA, 168 bp, Klebsiella pneumoniae; identical to SEQ ID NO: 269890

SEQ ID NO: 269897 - DNA, 462 bp, Klebsiella pneumoniae
atgaaccggctaatcgcagtcatcagctccgtagtgatctgcctgatagtcagcctcggatggctggccagttactaccgcgacaacgccatcaccttcaaagagcagcgcgataaagccactgaaaagctcactctggcgaacgccaccattaccgacatgcagaaccggcagcgagacgtcgcagcgctcgatgccaaatacaccggagaactggctgatgccaaagctactatcgatcagcttgagcgggatgttgcttctggcaagcgtcggctgcagctcaacgcaaaatgtaccgcgaacggaacggccgtcgccagcggcatgggcgatgcttccggcccccgacttactgactccgctgaacgggattatttcaccctcagaaaacgaatcgtcacagtgacgaagcaggtaggctatctgcaggactacatcaaagagcaatgtattgagtga

SEQ ID NO: 269898 - DNA, 606 bp, Klebsiella pneumoniae
gtggtttcgttgcaacgaattcaggagcatctttcatatgtcgtccaacatcttttccatatctacgatcgtaaatcccggcctcgccgtatttggccggcggcccgtttctcgatagccgagcttcagataaagctcgatgtttctcaccatgagcgcgttggtgtagagcatcatgcgtctcttcccggcaaggaacgcctgtcgctccgcctctgcgataaggcgagggccgataccttttccagcgctgtccggatcaacggcgacactgaaaataaggtgatggtcgtcactaggttctacagcaatcaggccgagcacatgttgaccatggcaagccagcagaacttcgcctcgtttgatgcgaggcccatgatcatccgtcatcggctgggctgggtagcccaagaccggcagccaggcagcatacgccctttgtgtgatcgaatgaaccgctgccaaatcctcatatcttgctgctctcgtctcgatcatcagttttgcctcgcgatagcggtcgcagcaccgcccaaggcgacggcaccaattcggtgggcgatccgcgtagcatgcggagttcgcaagagatgccgggctttatga

SEQ ID NO: 269899 - DNA, 354 bp, Klebsiella pneumoniae
atgataaattccgatcataaaaatatcatagaaatgattagccatgatttagttaccatgggtattagccatgaaaactttgccgggaaaattggtttgacgttatgtcagctaaagtctttactacatgaaaaggggggtattgatccatcgcttgcggaaaaaatagcgaatttattaggaagtactgctgtattttcattatggttacaatcaacttgtaatcgccttccgcgcgggcgtagatcagttgaggagttacttaatgatattgaccctgaagaaatcaaaggaatgaataaacaagtgcaagactctctgaatgaaaatccggtcggtaaagagattctataa

SEQ ID NO: 269900 - DNA, 1707 bp, Klebsiella pneumoniae
atgacagtcgcgagcattaatgactttaaacttttgaacattaaatgcagaaagtacttcgatctttttacaaaatcgaataattttttcagtttacctgaaagtgaaaaaattagagagcgatttgggttctatttctttatgcttgaagctttgtgcaatgaaaaagacgttgataagctaagcgactttataactgatacagagtataacgctcatcttacgaatcaaagaagccctgatcatggaatcgacgcaatatatatagatgacgagattaaggaaataaaattatttaactttaagtttagagaaaactataaacccggacagtcacaaagttctaatgaagcttttgtatccacgaagttagtcaattgcatcctaaatgaagacacgcaagggctggaaggtaaactaaaaggattggttagtgattcgattactaacttaactagtaatgaggtctggaaaatgactctttatatggttagtaatgaacctgtacctattgatattgatgaaacttcaattcagcaattgaaaacattttatgatatggaagttatatctgtctgtcttccggatattaaacgtatgatgtcaattaggcctgcccctattaaagcagagcttatcgttgacaacgaagcgcttatgtcttattcagaaagcaccatatcaacgtctaaatcttatatagtcaggctcaatgctgctgatattattagaatcacatgtaaaaaccctgacttaaggagtgactataattgtgagaggatggaagtactgacaaaagaaacccttgattatggggttctttttgacaatgttcgaggatttgttcagaaatctaaatataaccaagcaattggaaaatctttaaaggatgatccaacaatgttcttcatgtataataatgggatgactatagtaactaaaaacattaaagccgagcaagttaatgccaacaaaaaggtcagaattacgattgacgatttccaagtattgaatggcggacaaacactcaggactcttcataactttaatgcacaaaatgaaagtcacataacagaatatttagccaaaagtgaaatattagtacgtatatttaacacgactgacaatgaagcagttaataaaattgctgaattcaccaacagtcaaaattcaatatccagtgttgacctaaaatctttaagtacccttcaaatacaaattgaacaactccttgatgaacatgacataatttattctagaaaaaatggcgatacaggtattaatgatgctaagcactataagtataaagtaagcatggaacagttcgggcaaattttgttcgccatacaaggtagccctgacaagtcatcaaaccaaaagcagcatatatttggaaagtactatgacgagattttttctgaggataacttcaacctgctagatgcgccaaatatcattgaaagctactttgaaatcaaaaaagcttacgactcttccgttgaaagcatccaaaaaatagagcaaaagatattttatatcttgtatataaaaaataaactacctggactgtcgtatgatgattgcatcatctctcttgagaacgcattaaccgaattcaagactgaatcatcaagtctgacagatgcgaggaaaatgatacaggtaggttttaaagaatttttaaattttaagctttctattgtgtaa

SEQ ID NO: 269901 - DNA, 699 bp, Klebsiella pneumoniae
atgctgaacctttcaaccgtcacttttgatgttcacagtatccttaaccagtcactctgctctctatcaagagcacaatgtgctgaagttattgccgcgtacttagggtatgaaagccttgcagcgttgaaatcagaggaaacaggcgattcgcttgatacttgttttgcagatgcagaattcattattctcaatgtagagtcaggtatatgccgccttaagacacttgctagagaaaatatttcagacgtgttatcagacttggtcactgttcaaatagtcagatcactttcagttgtggatgatacttgcaaagttttcaaatcagtcgatgaattctattttgaatatgctcaggagaaattttgtgaggctattattttctctgatgaatgggggagcgcaacctctgagctgaatgcagaattctcagactatcctgaaatgaacgaaaattattccatctcgggtgatctttggaggtcgcgggaagaatggagcttggaagcgcagggtagttccatcggaagctatgctggttcagatcgtttctacaacggtcataaaattgattgctggggaaagatgaaattccttaaggctggtcgtgcaggcttgatcttcagcgccttagatgccaatgcaggtaccagtaatgaggactggagagacgaggatgactgggtagaaattggttaa

SEQ ID NO: 269902 - DNA, 843 bp, Klebsiella pneumoniae
atgcattattatcacattgttgttgaaactaatgatagggatgtaaataaaaaatttataaaattatatgaatatgatagggaaaaccttagtgagattaaatctgatgttttaaaaccatatgttttaaaggaagaaatatattttgatggggcatatttgaaaagtgaaaacatccgttcattgaaagtaaaaaaatcagagagaacatcttcggagttagttaaaatagcaaatgataatgttccggctaatgtttttatatttatctctaccgaagatgtaatttctgaggatggttatgttgaggacgtaacaagggggctcattagagaaataaaagaagaaatagcacaatcatcaaaaaaacaaccctcgcagctaagtttagggggtaataataaaaaaatattcgttgtgcatggtcatgataattctgcaaaacttgagatggccaggtttttagataaggcagggttagaaccgattattttgcatgaacaagcaagctctagtaatacgataattgaaaaaattgaggctaatagtgatattggatatgcagtggttctatatacaccatgcgatataggctcaagaaaaactgacaatcctgagttaaaagctagggctagacaaaatgtggtttttgaacatggttattttatcggtcgtctaggaagatctagagtttcagctttacgggttgatggtgtagaaactccaaatgatattagcggtgttgtttatattgatttagatgtgcgtggcgcatggaagctcgatttagctaaagagttgacagcagctggatatataataaatacacaagcattaatgtag

SEQ ID NO: 269903 - DNA, 555 bp, Klebsiella pneumoniae
atgaatggtaattattgcgcattttatgttgcagagcctttcaatgaaagtgctcttggtgctcacgctacaaaagactttgtttactataatacattacggatgtggaaaggcgctgatccaacatttccttttaataattcacataatacaacttataatgttcgtgatggtagtaactgggagctaactttgatgccccgcctcagacagcgtttacgtaactctattaatattattttctttttgagcgagagaacgttaaactctcgtgccataagagaggaaataaattatggtattaactcgctggggcttcctgttattgtcatatatcctgactataatacaaaggaaagtttattaaataataatatattgaagcaacagatacaaagtttatgggctaaagttcctgtatttagagattcaatgcatttagttcctactttgcatataccaatgaacaaatatattattatgcaatcgcttgctgatagtcgttttaaagtggcatccaagaccgttcctgatgtatatagatatactgtgtga

SEQ ID NO: 269904 - DNA, 837 bp, Klebsiella pneumoniae
atggctaaagttaacctctgtgatagacaggttttcaatgagttcaaagggtatgcatcattgttatttggctttattggtggagtcgtaatttttgttgatattcctgcgaatcaaaaagttgcagcaggaggtatttgcattctagtgcttatcatcggctatctttggttgtggcatagagctaataatctgagggaagttaaccttactattgagggaagttctgtcatcattaagaccggtgatatattcaaacaggaagggcttaaagttattgcttttaatgaatattttgatacgaaagttgatgagcgaattatcgccgaaaccagtcttaatggtaagtttattaaagagcatctatcttgcactgtaagcgaattagatgactatataaaaaattatcgatttgaagcggatgagataaaggagtttaatcaagggaggggggaaggaaaacagcaaaaattcgagattggtactatatgtgtttatggtgattatattcttactgcactctctaaatttgatgagcacaataaagccaatctcacaatgcctgaatacttaggctttttaataagtttctgggataaagttaatcgtgtttatgctcaaaaaaatgtttcagtaccgatctttggatctggacttaccagaattaaggggcataagatcattgatgaacaagatttgttaaaaattatgctttggacattcagaataagtgagatgagattcaaatatccagcaaaactaacaataatgatacatgaaggaaaaatagataaagtcaatcttttagaactcaagatagcacgaaatggcttatag

SEQ ID NO: 269905 - DNA, 771 bp, Klebsiella pneumoniae
atgaatttaaacggtaaaacagcgctggtcaccggctccaccagcggcatcggcttagggatcgccaaagtgctggcgcaggcgggcgcccagctggtgctcaatggcttcggcgacagcagccacgcccgggctgaagtcgccgcgctgggcaagatccccggctatcacgacgccgacctccgcgacgtcgggcagatcgaggcgatgatgcgctatgccgaaagcaccttcggcggcgtcgatatcgtgatcaataacgccggcatccagcacgtggccccggtggagcagttcccggtggacaaatggaacgacatcatcgcgatcaatctctccagcgtcttccacaccactcgcctggcgctgccgggcatgcgccagcgcaactgggggcgcatcatcaacattgcttcagtgcatggcctggtggcgtcgaaagagaaatcggcgtatgtcgccgccaagcacgcggtggtcggcctgaccaaaaccgtggccctggaaaccgcgcgcagcggcatcacctgcaacgccatctgccccggctgggtgctgactccgctggtgcagcagcagatcgataagcgcatcgccgagggggtcgacccggagcaggccagcgcccagctgctggcggaaaagcagccctccggggagtttgtcaccccgcagcaactgggcgaaatggcgctgtttctgtgcagcgacgccgccgcccaggtgcgcggcgcggcgtggaacatggacggcggctgggtggcgcagtaa

SEQ ID NO: 269906 - DNA, 1506 bp, Klebsiella pneumoniae
atgagttatcgtattcaatttgcatctttgggagagttgggagtatcgttctttaataaaccatgtggtaatgataatctatttaccgttttgattggtaagaatggttcaggtaaaagtagagtgttaagctctataacaaatacattgtgctcaatttatgttggtaataagttattaaagagagatataggtactattagtaaacatcaacaagatgataataatatattaatcaatatccataaggataataaaggctgtgaaattaaagtcaatggccggagtattttgtttgatcttaataaagatgcttctcatatttgtcctaaaaaaataattgcagcatctacaagtccttttaataagtttcctggagagaacatctatttcactgggctttatagtgactctgttttttatcattactatggagttgatgggaactataaaaacaaagcgttattatctctaattgaaagagtgtttttttcttcagcagatggttttttaacaaaaaataaattaactttagttaacttgttaggttttttaggtcttgaagataatgttgagattcacttcagaataaagcatggtattcataaatttatgagctatctatctggttccaatattaaggagttcatgaattatgtttctactgcttctcaaagagacctttcttatttacaaaagaaatatgacttaacatatgataggcttcgtgatgcttttatcattcttaatgaatattgctctaagcaagatgactcaagaattattaagttctatttgaatttatctcgaatgagattaggaagcaaagatcgtgaatttatttctgctataaaaatattgtcagatattggcatatttaatattcatgatgttattgtttctcggagaactaacagggaagaagatgggtggaagtggtgggaagaacctacagagtcatttagtattagtgatgcaagttctgggcagcagtgcatgcttttgaacatacttggtgttgcatcatctattgaagataactcattaatactcattgatgagcctgaaattagtttgcatccagagtggcaggaaacttatatagagttattaacggaatcatttattcatatcaagggctgccactttattattgcgacccattcaccacaaattgtatcaaatttaaaaggtaataattgttttgtttcaaatttagaaaatcatgaggttttgaattcttttgatattaaaaataaatctgtcgattttcagttggctacgctgtttgatgctcctggtaatgataatgaatatctaaagaggattgctgttaatgttctgtcagcattatcgaacggttcatatacggaggagttttatggccatgaattgaatttattgattaaaaataaagataaaattgaagatggtgataatgttaagagattaatcgaacttgctgtagaggttttagcgagggttaaatacaatgaaagcaattaa

SEQ ID NO: 269907 - DNA, 651 bp, Klebsiella pneumoniae
atgaaagcaattaaattatctcttgattctactgataaaataaataaaaaaatgagttgcgagggatttaatggagcatcatggtctgatgatgatattgcatctgtgcgaaaagaaataaaagaattctatatacaagagcaaaactatacatgtgtttattgtaagcaggtttttaaatccaaatacggtcgagtgtgggatgttgaacacataatatctcgtgaatctgtatgtgagtttatgtttgaaccattaaatttatgcgttgcctgccctgaatgcaatcagaggaaaggaaatgggaaagtcactaatagtaccgcaaaaaagaatctcccagttggttcggaacaatactctattgttcatcctcactttgataattatcaagaccatatagaggcgataaagccgggtgaattctatttctcaaaaacaaaaaaaggggagtgtacaattgcattatgtggtttaaatcgcttttatgagtatggtggatatactcccgccgtggctgcaaatgatatgatttttcattatgcgagccttttgtcatctacagataatgaagataaagttaaatttttactgagagaaataagctttttagcgctaaagcaattggttgcagacgagggtgcaaaataa

SEQ ID NO: 269908 - DNA, 531 bp, Klebsiella pneumoniae
atgtttgacttaaaccacttcagaacattaatcaatgatgttgatgcagctactacaaaccaacaaaaaggtcagtcttttgagcttctgtctatttatatgtttgcgcatctgaatggagtagacattactgagcatgatgttaggatgccttcagaggaaattgacattgttctgtggaatgcacaaacagaagagatattaagaccatgggattcagtgatcctcgttgagtgtaaaaattggaattcggctgttggtgcatcggtattagataattttgtgaataaagtccgtagacgagctttaactaccggtatatttgttgctgctaatggggttacgggtggttttgtgagaggagacggaaatgaacctggagcaattggtattttaacaagtgctttgcaagatggcattagagttattgtgattactatggatgatattcgttctttaacttctttagatgacatcagggcgttaataaaaaaacgatactgcgggctttatgtgcacaaagtactttaa

SEQ ID NO: 269909 - DNA, 933 bp, Klebsiella pneumoniae
atgaaaagaattggattgttaaatagtttgtcgcatgaggcctatgagctaaaaaaatccctccaaaatatgtcccaattggaaagctatgaagtagaaacgattgatgatttttaccaacaagagactgtatccggtgctatgtggggactgattaatttatgtgacgtattagttgtgttcgttaataggaaatctgaaagcatgtattatcagattgggttagcccatggtgcagggaagcccgttgtaataataactgataatgagtattcgttaccaccagagattagaggccaaagaatattaaatgtatcggagcatggtttttttaataacaaattcatctttcaattaaaagaagcaattgacgatgcaacaagaagaaaatctggctatctaggtcctagaaatgagcacaaaaaatattccgcctcacataactttcagcccgctgttaattttcgtgatcttttttccgtggaaggttataggcgtgtccgattatttgaacaatggcttacagagagagctgcaggtatcgaaggttgggaggttaccgcatctgaaacgcttaatcgtaaagatgctggtttcgatttggttatctggaactcccaagaagattctgaactttctattttaggaaatcccatagcggttgaaattaaagcaattggctcaatgaactcggcaagccttcataatcttcttaaaatgagtaagaagtcaggaattaaagggttaatattagccacgactgggttaaataatataagaacaaaaaaattactcagcagacttagagcagaagagggtatcaatgttattgcgttagaccgagatgatcttataaatgtaattagtccaagtgatctattatatcttgtcaaaacgaaagttagagaactcttgtacggaaaggagttctaa

SEQ ID NO: 269910 - DNA, 738 bp, Klebsiella pneumoniae
atgggggatgaagccgctttatgccgggtggcggtttcgccttacccggcctacagagtggcgttccggccaggaccggtagcccggccaggcgaagcgccgccggggaactggatgggggatgaagccgctttatgccgggtggcggtttcgccttacccggcctacagagtggcgttccggccaggaccggtagcccggccaggcgaagcgccgccggggaactggatgggggatgaagccgctttatgccgggtggcggtttcgccttacccggcctacagagtggcgttccggccaggaccggtagcccggctaagcgtagcgccgccggggaactggatgggggatgaagccgctttatgccgggtggcggcttcgccttacccggcctacagagtggcgttccggccaggaccggtagcccggctaagcgtagcgccgccggggaactggatgggggatgaagccgctttatgccgggtggcggcttcgccttacccggcctacagagtggcgttccggccaggaccggtagcccggctaagcgtagcgccgccggggaactggatgggggatgaagccgctttatgccgggtggcggcttcgccttacccggcctacagagtggcgttccggccaggaccggtagcccggctaagcgtagcgccgccgggatgtggttggattaacgggtggttccgcgcagcttcaacacgctgggaacaaaaacgttaa

SEQ ID NO: 269911 - DNA, 1110 bp, Klebsiella pneumoniae
gtggctaaaaataaagcggcaaacgccggggttgatgcgttaactggttttgagtttcaaagaaactgtgcattgtatcttttgttagataatttcaattcttttatcaataaagagttctttatttgtatcgaacatcacgatgattttctattttgttataaaactgattgcttaagttatataaacgagatacatgcctatcaagcaaagaaacttagcgggaaaatatggactatcgattctaggttttctgagatggtatctaaaatactattggtgggcgaaaacttaagaaatgatgcttttgaaaaaagtgaagattataaacaccagctaacatttatatcaaatacagaaatagaattaaaatactcaccgtcaaaggctttaaaaaaagaaggtattactgagcagatattaaggattaatgagcaaaactctatctgtgcttatgatgaattacataaaaacattcagaataaaattgaagagaaagttacagatatttgtaatgaagaatcttctgttttccatcgtaaagaactaagtaacctaaaaattcagtgggtagattttccaagaacagctgcaaaacaaaaagaatcgcttattggacttatgtctagaaagttttctcatatagctgacccgaaagcagccatcgaggtaatacttgctctttttagaaatgtggaaactgtatataatcaagggcaggaaatatgtctactcgatccaacaaaaagggttgaaggcgaagatgttaagaaagttatgaatataattgattcacagcaaaaggcattcgactattggcgtgacgaagcacagcaattctcaatgaaattcagaataccacttagcatacagaaaaatcatgaaaactatatacttaactcttttgaactactcaaggatatgagtaattacgattatcaaatcattaaagactttgttagaaataatgattacacaactcaatatttttctcttcaagacgcattaactgcatatgttgataatgttagaaaatctcattctataaacctagataatattgatacattttttgcagttctgtgttcatacgttgagtgctacgattaa

SEQ ID NO: 269912 - DNA, 435 bp, Klebsiella pneumoniae
atgcaatttcgaaccattcgtaccgcccttgatcacgagggcgaagtcacttacatccgggacctgactccgcgttcaagggggcgctggttctgccgttcctgtaacaatcccctgcgtctgcactggacgcatgacagcggcggttatttcgaacatgacttagaagatgctgacgaacgcagtttaatgcgttgtgagtaccgggttatttctcaggacaaaccggtatccgcttttgaccaagccgtgagtgcactgatagaacgtgataattcagtctccactgccccctcaaaaaaagattatttctgcgtactatgccagtttgaatattatggctttcgatgctgtccggcgtgcaaggagcacatctacagcacagaaatgaaagatttcgataagctcactgtaccggagacatttgcgaaataa

SEQ ID NO: 269913 - DNA, 1017 bp, Klebsiella pneumoniae
atgcaaatttattattataaagattctgtcggcaactttggcgatgatcttaatggttggctctgggatcgattactgcctaatttttttgatagtgataccagtgttcgcgtctctgtaattgggacaattattaacgaggtaatgcctaaggctgataaatggtttgttttaactagtggggtgggatatggacatttacctgagggatttggtaatgataactggaaaatactgagcgtgcgagggcctttatcagctaaagtattaggtctaggaagtgataaatatattactgatggcgcagcattactaaatactttagctgaatttaagccgttaccagaaaatgagcgaagtggtgtgatatttatccctcatcatcatgccatctcagttggtaactgggaggaagtttgtcgtttggcaggggtagagtatgtaagcccgcagtggaatgccgttgatgttatcaataagataagaaatgctaaattagtaattgcagatgctatgcatgctgcaatcatagctgatgctatgagggttccatgggttcctgttataacctcacctcagataaatacatttaaatggttggattgggctctcacaattaatacaccatacagccctatagatcttgggccatcacattttcatgaaagtttgagaagtaataccttaaagtactatggtgagaaatataagttatctgatatctcacctgaatcagcaataaaagatttttattttaaaagaaaatataaaagcagtaagctatggccgacttatagccgcattgcaagaaggttgacttataatttgccatataagatcttgtcttctcttaaggattctgaaataaaaaataaaaatttggtttatactgaatctgcagcagaacgtctgattaaagttaaaaatagctctggttttttaagcgatgatgttgtttttttcaataatgtcgatggcttactatccaagttagatatccttaagcaacataaatga

SEQ ID NO: 269914 - DNA, 828 bp, Klebsiella pneumoniae
ttgggtaatttctcaactgttttgagaattcaaggggttaatattattattaacttgtttttttctactactgcgaacgctgcctatgctgtctctaattccattaatggtgctcttaattcattgagtacttcattgaacattgcaattaaaccacagatttataaagcatatgcaacaggggatatggatagatattttcaacttattattcatggatcgaaattgacttttttattcctctttttgttgtgtatgccaatttttattaatctgcatggaatattgaccttttggttgattaacccaccagtttatacgtatttacttacttttattgtgttgctggtttcgttaatagacagtctttcatttcctttaatggcggcattacaagcaacaggaagaataaaaacttatcaacttattgtaagttcaataacaattctatcaattcctgttatatatttgctgtttaattttggtttttctctttatattctgggtgttgttttaattgcatcttcaatactaactctatgcattcgtgtacatttgcttgacttactgacatcagtaaagaaaaaaacgctctatttaaaagctatcatcccatgctttcttggcgctgcaatttcctctttattaatcctctcttgtcatcgcttttttcttgatgatggtatatttcatattgtaatatcttctatatgtgttgatataattacgatctctattttttacattcttatttttaataggaaggaaaaaatgatgattaataactttgtttcgaaaattttcagaaagctacttaggaataattaa

SEQ ID NO: 269915 - DNA, 540 bp, Klebsiella pneumoniae
atgctggtcgtcaatgatggtgagggtctctttctcccccgccaggcggagcatggttttggcaaagttggcgccgcgggtggcatacacccagctggtacggaaaatcaggtgacgcgggttgccctgctccagggccagctcaccggcacgcttggtttcaccgtagacgttcagcgggccggttgcttcatcttcccggcgataatggctgccggcgccgtcgaacacatagtccgtggaataatgcaccatcagggcacccagcttcgccgactccgccgccagcaccgccacccctttgtcgttcagcaggtcggagagctcccgctcgctttcggccttgtccacggccgtgtgcgcggcggcattcaccaccacatccgggcggacggtacgcacggtctgcgcgataccttccagatccgtcaggtcgccgcacagctctttgtcaaagtagtccaccgcgaccacgtcgccgagggtggacagggaacgctgcagctcccagcccacctggccattcttgccaatcagtaa

SEQ ID NO: 269916 - DNA, 963 bp, Klebsiella pneumoniae
gtgaaaaaaatttctgctctattattatttttctggatgtcttacgcgactagtgcaacaatgggaatctgcgtgcatcctgatagtatgaaaacaaatcctagtaatattatatctttggttactaagttcaatttcaagtctatcagaatggattatagatggtcagatgtagaaactcactatggcaattatcgttttgaaggtgttactgaggatattttacagttagctcttcgaaataatattacaccgttaatcattttgggtggatctaaccatctttatggtaaaggaaggccttgggatgataaaacacaattagcttttgcaaaatatgcagaaaacatagctcagcattattccaataaaaaagtaatatttgagatctggaatgagtggtcattaaagcacaattatgatcctaagttatctgactttaaaaatttagattctgcaacagcatattataatcttgttagaattgtttcgccaaaaataagaaaatatggcggtaaaaatttcattatagttgccggaggatttaaccctacagataaaaatgatcaaaattggggaagtcagttaataaaaatgggtattatgaaatatatagacggaatttcagtacatccgtatactgatcttaatcctgaggatagtttcataattatggatagaatgcaagcttcgttcaccgctaacaataacggtaatgttgtacctttgtttattactgaatatgggattcctaataggattggaactaaatatactcaacgatatacttatactcttgctaaaaggttcattaatgaagcttctaaacgtagttatatccaaggcatatggtggtacgatctcgttgatgatggaaatcaaattagtaattcagaacataattatggtatattgacgcaagacatgaaacagaaagagatatctcaattgtttttaaaatag

SEQ ID NO: 269917 - DNA, 282 bp, Klebsiella pneumoniae
atgcttgcggcagagttcacgggcgggtaccccagcttcggcttcgcggagaatactgatgatctgttcgtcggaaaaacgcttcttcgtggggatgtcctcatgtggcttatgaagacattactaacatcggggtgtactaatcaacggggagcaggtcagttgaaggacggcaagcggctttgtacctacgaatcgtcactgtatttgtttacactggtgacgcgctcgcagtcttgtcccttttcgaagacgttcgacaccgaggacaacgaaaagtaa

SEQ ID NO: 269918 - DNA, 1257 bp, Klebsiella pneumoniae
atggatgcgatgttcagcgtgcgcagtaatgcggtcaccaccggggagcattatcgttacgcagcgccttatcgtgacgcgggtgacgatgccagcccggagccggaaaccgaatccggcgcgttctacgcccgtcttgatcacgagcgggagctcaacaggtcagcccgcattcatctgttcagcaatgcttccggcctgacgcccggacaggtgctggagccgcagggcgatgtcattacggccctgaaggaaggcgtcgtcctcacgctggtgactttccggggagcgcgtgattcccgtctgcacgtgtcggtgtggggcatgccttacactgaacgttactgtttccgcccggcggaaatcccgcgtccggaaattcacggcacacttccggcccggattgagagccgggaaaagaacgatatctacgctcacctggacgggcaggggcgctaccgggtgaagccggacttcgaccgggaaggaaccgaaccgggttacggctatctgtggctgcggatggcgaaaccttatgccggtgaaacgctgggctggcatacgccgctcattgacggaaccgaagtggcgattgcgtacagcaacggtgatattgacctgccgtacatcgcgtatgcgctgcacgactccgaacatcccgacctggtgaaccgggacaatcacacccgcaatgtgctgcgcaccccggcgaacaacaagctgcgaatggaagacaggcgtggtgaggaacacatcaaactcgccacggagtacggaaagacgcaactgaacacgggccatctggtggacagccagggacaacgtcgcggccagggggccgaactgcgcaccgatgagtggggcacaatccgtgccggtaaggggctgtttgtcagcgcggatgcgcaggcaaaggcgcagggtgaggcgctggacagggacgccgccctgaaagaaatcgacaggcttaaccagcaactgcaacagctggaaatggccgcagagcaggctctggcgctgaaggcggatgttgacagtcagatagagatgtttgagcagcggctgaaaccgctcaatgaagctgtgcttttctcggccccggaagggatggcgctgaccagcggggagcacctgcagatgacggccacgaaaaatgtcgccattaatgccgggggcgatatcagtgccggtgtcatgggcaatatgacggcgctggccggggaaaagctggggcctttgcccggaccggacagctga

SEQ ID NO: 269919 - DNA, 255 bp, Klebsiella pneumoniae
atgggtacacgttttgtagtaaactttgattatcgtaccaaaaatgatgacattcagttttcacaaatagttgaacactttgcatttatcatagcgcaacttaataagttatttcaggtggaaaagaattggtatgaaacgggttattccagaaaacaagctctaaatgagatagcttttcagaatggaggtatcacagataacactcgtttgaaatgggagcgccgatataaaaaaatatgccgatgtttgtag

SEQ ID NO: 269920 - DNA, 738 bp, Klebsiella pneumoniae
atgagtcatctgcttaattgcggcttcttctcataccccaaagatgtcgaaagaggtaatcaagattctttcctacttcctaaacacatagatggcggatatgttttggctgtggctgatggtgttggatcgtatcttggtgcaagagaggctgctgatgccgccatttttactacagaaattttatcctcgaacactttgcgtgacgtcgcaagcgcatttgaagcaataaagaaaaacgtagatattttgacagaacgcaataatcaatggttcaaagctgcaacgactttgtcctactgctttattgatgatgagtatttgcattttggacatgtaggcgacacaagaatctacttcaaatcaggtgcaagactgattgccctgaccagagatcatacgcagcaccaagagttgctagatgagggcatttacactaagcgggaattgcgggatatgccgggtaaaaatgctctcacgtcagcaatttcaaaaagtttgcctttgagatttcaaaaggaaagtattccattatcgagaattgcagatgaaaatggtgtcattactctgtatttaatgtctgatggtgcacatcatttttgggaaaagcgcccaaggctctcggttaacactttgtcaaaaggaccgctttttgcatcaagcttacttaagcgaatagagaggaatgaagctatcgatgattacaccttgatagccgcatctttcaaagtatcctaa

SEQ ID NO: 269921 - DNA, 768 bp, Klebsiella pneumoniae
atggaatcaagagggaattacctagtaaagcctattgaagagcttggaaatggagcatttggacgcgttgaaagaattgaactttataatacgagcggccatttgtgtggagaatatgcacgtaagctactgtgcgttaaagacgatctaatcggttctctctttagttatgatgattggcgacgaagatttgagcgcgaagttaagtaccaagccgaatgcgtaaactcgcatgtggtaccagtatgcattcaccacttggcaactgaaaacccatggtttgtaatggagttggctgaatcagatttgagaacagccttggttcgaggtcagctaagcgatagcgaaaaaattgaaatcattatgatgatgcttgaaggtgtcagctatgtgcattctaagggttacctgcacagggacctcaaaccagagaacatcctaaaatttaaagatggacgttacaaaatctctgattttggattggtgaaaaacactaatcttgaggctcagtctgaagtgttaactaagatagctgttaagatgggtacggacgggtatatggctcctgaggctcagaagggtatttacaccgaaaaaacagacatctatgctctgggggcaataattcatgagatcaatgtgggcaacatagacggtatcgacacaatgattggtaaggccacaacgttcagaccagctgatcgttatgcgcatgtgcaccagatgattgctgatttaaggaaaataatccaaaggagaacggcatga

SEQ ID NO: 269922 - DNA, 780 bp, Klebsiella pneumoniae; identical to SEQ ID NO: 235619

SEQ ID NO: 269923 - DNA, 540 bp, Klebsiella pneumoniae
atgaccgaaagaaagtatccatctcaggataccgtcagaaagtatttcatttatgaaaacggaatcctcatccggaaagagaggtcggaaattgagttctccacctcgggcctatgtgaaagatggaatgccttgtatgccggtacgcatgcaggaagtctgagcaccaacggatatatttatataaagcttaatggcctaaggtttatggctcacaggcttgtctggatataccacttcggagatataccgacaggaatggaactcgaccacatcaaccatcaaaggcgcgataacagaatagaaaaccttcgtatggtcaccaggaagcaaaactgtcgaaatcgtgctttgcctaagagaaacacatctggggttgttggtgtcacatttgataacttactgaaaaaatggaagtcacaaataaacattgatgggaaaaacatgaatcttggaattttttccacctttgaaaaggcagtgaaagctagaaaatctgccgagaatctttatggcttccatgaaaaccatggctgttga

SEQ ID NO: 269924 - DNA, 228 bp, Klebsiella pneumoniae; identical to SEQ ID NO: 199855

SEQ ID NO: 269925 - DNA, 3975 bp, Klebsiella pneumoniae
atgaccttacaagaattctatgcggctcgcttcggtagcgatccgtattcattgcttgaagcagcgcgggatgagctgtcagagctggccacaatggctggcattaactggacagcatgcgctgataacattcagttgaacccgcgcggcggggaagaacgttattcaaaatataacggtggcgcccccgaggctctggaaaagagcctcaaagggcgtgtggaaatctactcccgcaaggaacaacacaaaagcggcatcagctacccattcgtcaactttgtccagaaagggcatgacgaaggttcctggagcggcttctccttcctgttcgccgaataccgccgtgaacaacaaagaaatcatgcgaccgtggtcgcacaacctgctgaagaactggcgcgtattgaacgccaggctgaagcccgcaagcgccgcgccgaacaacaacggataaatgaacttaaaaacaatcagttagagcaagaacggttgctcggatggttggcgttccacagtgcatgggaacatgcgccagctgaggacgggtcgtggccttacgcagtgaaaaaaggcattcgtgacgtattcagcgcttgcgatattcgtcgcgtgaccagtcacgacaacgcaaaatggagccgtggaccgactacatacatggcgattccgctggcccacctggacggacgcaaagacggacaaattgtcggctggcagcgtatcgaccagcgcggcggtaaattccagaccagcgcgatcaccagcggtgatttcgtcggggcgtgctttgttatcggcaacctgaacggcgcgcaaaatattgcagtggtggaaggtttcgccaccggcgcgtccgtatggctggctacccgtaaggacccgaaaaaaagctttgatgctgtcgtggtcgcagtggccgcaaacaacatgacccatgttgttgagcagctggtgaatatgtacccggcagcaaaaattacctgcgccctggataacgaccgcaaatcatcggctgaaggtaaaggcaacacaggcctgcgcaccggatacgacatcatggagaagttttccggcgtcaaatgtgtttacccaacttttgaggatgaccctgagcaggaatgcagcgattttaacgacctgcacagcttgagagggctgaaggaagtcgctcgccagttaacgagaaataatctgagccgtgcaaccgacctgttgtcgattacgctgaataaactgcgtactctcccgcggctgaacagacgtacttttgccaaagagctgcttcgcgccgtcgatattggcatgctgacatgcccggtaccaaacagcccgaaagaacttatgcgcctgttcagcagcacgctgcgagatatggggatcgcagaaatttataacggtaccgttaaagatcacattacgcgccggttgaatcgcaaatgccgtgccgcgcaaacatcacgttcgttcagtgaacgcatcaccaacccgaaccttcgcccgtcacacatcacttacaaacggtttgaaacctccaggatgactgatgaggttatgacatacgccgcacagctgcagggcatcgttattgtccgcgccgggatgggctctggtaaatcgacaggtctcctgcgtccactgatgctgcagtccacgcgtggcgtttccgtcgcgcaccgcgtatcccttataggcggcctgcatgaaatgatgaccgaagggaaaggcgctaaagccgacattctgcattatcaggatcccggctatcaggaaatggcgccatatgccaacaagctgactatttgcatcaactccatacttaaaggctgctggcaaccgctgatgcgccagcatgacttcttcggcttcgatgaagcaacacagggcctgcgtgccattctggccgggcgtgcgatggaaaacccggtaggcgtattcaacacgcttatcgacgcgctagcgcgtactgaagagcatgccattatggtggatgccgacgccaacgatctgcttgtcgaccttgctgaactggcgatgaagcgacgcgaggagctgggcctacctgcctggctgcaaattcacgtgattgaactcccggtcgacgttcgcaaccgcgaaaccaacaagcctatccgcgtattttataccgagaaaaatcggatcatgaccgaggtcatcgctgcagtgcaacgcggcgaacgaatcatgctggccaccgacagttcgacgttcgccgaagacgttaccatgcagctgagactccatttccctgacaaaaagtttctctgcgttaaccagaaaaacaaacaggagaaggaagtcgacgatttcaccaaccagcctaaagtgatggtgaaaaaatatgacggcctcatctacagcccgtcgatatcttcaggtgtatcgattgaggagaaacacttccaccgccatttcggcatgttctgcggcgaagtggtccccagcgacgccatccagatgctgcgccgcgaccgtacagctcaggaatacatcatcggtttcgacaagcttcgcggtaaacgtgaaaccgatccggaaaaaatcaaacgcgcctacgcgcaggccttgctcgaaacggctggccactccgggctgctgacagacgttgtctttgacggtgaccgaatttcactcggtgtggctaactcttcattcatgcagctcaaaattaaagccgccgcgctcgaggcgtcggccagaaatgattatgccagcaacatgatttgcatcatgcatgatgatggctatcaggtcgcgcctatggctaccgacgcgcttgcaaacagcatcggtaaggatttacgtaaagaagcccgtgagctggtctttgagcagcttatggaacgccacctgagtgtcgatacccctgaccaaggcgaacacgatgagttgataaaaaaacgcaccctgtctctggatgagcaggcccagctggtccgctgggacatcgaaaaggagctgcagctggatgtcgacgaggaggcgttaaaattctatttcgacggcggcctgaaaaaagtgcgtctgtttgaaaccatgcagctggatgagataaccgcgcgtcgccttgaccgcgaggaagcgttgatccactttacctacgcttatcgcgtcgccggtcgctggcagcaatttgtcacaacagctatgacacgagaacaggccgacgaggagttccacgctaaattcccggccataaccgattaccgcgtcaaatctacaccagcggttgaaataggcatgcgtggtttttacactctcaaatcagcaacgctacgacagtacttccgcgactgtggtattgatccagaaacactgaccggtgaggccgacatggacgccctcaaacgcgccagggataacctgctaaccccggaacggcgcgatctgctgaacaacgttttgcgcataggtggcttcaacacagagaagggcaaaaagaaagcccctgaagaactatgcaaaggcatcctggagtctatggggttatccagtaagaccagacgcgccagagatggtgatgctcgacctacaatgcgttctatcgactcacagtcggtcgagttcctcatgaatattgtggagaagcgccgcgaagcagggttatcaattcacgcccgcaaggtcgaaaaaaccaccatcgaagtggatcgcgatctggatctaaatatagatatacatggtaaccctcgatccaaaacaagccacattccggacaccccgcaatcagtaattattcaggcactggaggctatcccggtgacggtgccggaagcgtgggcggagaacgcgttgccagcaaccgaaatggaggcggtacgcctgtggccagtggccagcatcgcgagaacgttcgcctcgctgtacatgaccgaatttatggacctgctatcagtacgcgagataaggctgctgaaagcttttctgagccagcggcaagccgtggcgatataa

SEQ ID NO: 269926 - DNA, 609 bp, Klebsiella pneumoniae
atgattgatcgtatgaaaacacgaggcgaacgactgaaagcacgccgtttagaactgggaatgacactgcagcaagttgctaaaagtgtggatatctctcttcctggcgtccaaaacttagaacgtggtgacgttatgccgtcactgaagattgggcttgccctggcgaaatgcctacgcaaacctgtgcaatggatactttttggtactgaatctgatcctgaccgcgttcctgttattggcacaacagagagtggtccggatagcgactggcagccaggagaacctgccaacacagaacgattcctgccatttgttagccagcgggaaaccgtttatgcgctcactgtcgggaaccaggttcagcacaactatcaaccgggtgacgtcgtcctggttgactcagctctcacgccagttccgggtgaggatgtgttagtttgtgataaagacgggaaaatctcgatacagcggttagcgcgcttcgacgatgagcgctactacttagatggcgctaactctcaacgagttatccatgagaaaagtgatcttcaatttgtgcaccaaatagtcggtacgatcaaatcgttcatgatagagggtagatga

SEQ ID NO: 269927 - DNA, 738 bp, Klebsiella pneumoniae; identical to SEQ ID NO: 206978

SEQ ID NO: 269928 - DNA, 477 bp, Klebsiella pneumoniae; identical to SEQ ID NO: 206981

SEQ ID NO: 269929 - DNA, 204 bp, Klebsiella pneumoniae; identical to SEQ ID NO: 247608

SEQ ID NO: 269930 - DNA, 288 bp, Klebsiella pneumoniae; identical to SEQ ID NO: 229143

SEQ ID NO: 269931 - DNA, 309 bp, Klebsiella pneumoniae; identical to SEQ ID NO: 180595

SEQ ID NO: 269932 - DNA, 222 bp, Klebsiella pneumoniae
gtgaactatcaaggcaacgaaaaaatgagacaggacgcggctgagatttctaacaagctgtatgaactctggcaaaaagtgaagcgtttccagcgtgagtacagcttcaacagcgagaacattacagacagactggcgggccgactgattggaacaatggaacccaagctggccgaccttaacagctttatggccgatgtcgattaccagtttgaagattaa

SEQ ID NO: 269933 - DNA, 219 bp, Klebsiella pneumoniae; identical to SEQ ID NO: 229135

SEQ ID NO: 269934 - DNA, 432 bp, Klebsiella pneumoniae
atgatgtatcaacgcacggatctgacgctctccatgttctatgcatccagcgctgatgcagacgggaacaaagtggctacgttgacgatgcaggtaattgcggcagaggttggcgccgtccagaccagtcaactgctatgcatcaccgatagcgcgaagaaaaaaacgtataccgtgggcgagcaatctatcagtaatggttccgatccgttgctggtcgcgattgagaattactggcgccagagtacggatgttgtggttaaaggactgatcgccgaggtgaccgatttcatcgcagggaatatcaactcagtgagcacctggatcggccagtttgggatgaaggtatttgagaaccagccattagctgagcggctgccagaaagcgtgctacaggcagatggtagctccgctacagcgacagggtcctga

SEQ ID NO: 269935 - DNA, 921 bp, Klebsiella pneumoniae; identical to SEQ ID NO: 207001

SEQ ID NO: 269936 - DNA, 339 bp, Klebsiella pneumoniae; identical to SEQ ID NO: 207005

SEQ ID NO: 269937 - DNA, 402 bp, Klebsiella pneumoniae; identical to SEQ ID NO: 200123

SEQ ID NO: 269938 - DNA, 756 bp, Klebsiella pneumoniae
atgagccttaacgcgaattatcagaagttagagccaggcgatgaggttcgtctcctggagatcgatggccaggcgtttggcctggatgaggttttgtatttccacggctataacgttccccatactgcagccgaaatcctcgccgctggcggcgacctggataagctgccggcgaaaagcatctggtggcaggggcgggagtataaagcctggccatgtgaaatcgaagggatcgagtcctccaccacgggcagtgacgcgcagccaacgctgcgggtagggaacatcgacgggaagatatccgcgctctgtcttcattacgacgatctggctctggcgcgggttgtcatccacgacacgcaaaaacagtatcttgatgcgaagaactttccggacgggaatgcctcagctgatccgactcaggagaaacggcgccttttcttcattgacgtaaagcattatgaagacgatgagaaggtggaatttactctctccagcccgtttgccctgcaggggatgatgatccccactcgccagctgcatgcgatttgcacctggtgtatccgcaatcagtaccgcagtggtaacgggtgcgactatgccggcacccggtattttgacaggaacaatcagccagctgatgacccgtcgcaggatgtctgcaacggaacgctcacggcctgcaaattacgtcatggtgagaatagtgaactgccgtttggcgggtttcccggcacctcattaatcaggagctga

SEQ ID NO: 269939 - DNA, 351 bp, Klebsiella pneumoniae; identical to SEQ ID NO: 180567

SEQ ID NO: 269940 - DNA, 612 bp, Klebsiella pneumoniae
atgattacagttcaggagtcaatggttaatattgagctgagcggtgaattaggaaagcgatttggtaaaaaacataagcgcctagtagccactacaaatgaagctattcaggcgctttgctgtacgatcagtggctttgaaatgttcatgaataaagcgaaagaacgaggattgacttttgcgatattcaagaacgggaaaaatatagggctaaatgatttttcttatcctgttaatgatgaaactataaaaatagtccctgttgttattggtagtaaaaaagcaggggtattgcagactatccttggcgcagtaatcatagctgctgccgttatgcttggacctgccggcgccggtgctttagccgcaggcactgcgtggaatgtcgggttggctggcggcgccatgatgctcggcggcgtcgttcagatgctttccccacagccagcaggcctggcacgaaaagaatccgctgacaataaagcgtcctacgcctttgggggcgtgacgaacactgcctctcagggatacccggtccctttgctttatggcaaacggcgaattggcggcgccattatatctgccggtatttacgtagaagaccagcaataa

SEQ ID NO: 269941 - DNA, 378 bp, Klebsiella pneumoniae
atgccagataacctgcgaatcgaactggatattagcgccggcagcgaggctggacatttcccgcgccagattctcatcggcagtcttcatcacctgagtcaggctctcgatactcgcctcaatcccctgcgttgccgccagcagttcatcagcggcctgtgccgccttcgcgttaacatcggcgatacgatccgcggtctcctgcttcactgcattggtcagcgtggtgttaacctgagacagcgactgcttcaggccattttcggcagtctttatctgcgcattcaatgcggcatcgccgtcggccagcgttttgctgaccctggcaatctccaggtcgatggtagcgttgatttccgcagccgtatcggtgactga

SEQ ID NO: 269942 - DNA, 939 bp, Klebsiella pneumoniae
atggagattattttttaccatccgacctttgatacccaatactggatctgtgagctggaaaagcagttacccggcgcgcgggtgcgcgagtggaaagcgggcgataaccggccggcggactatgccctggtctggcatccgccggtagagatgctgcagggccgggcgctgaaggccgttttcgccctcggggcaggggtggactctattctcagcaagctgcgcgaccatccggatatgctgccgctgtcgattccgctgtttcgtctcgaagataccggtatgggacggcagatgcaggagtatgccgttagccaggtgctccactggttccgccgctttgatgactatcaggcgctgaagctggcttcccgctggcagccgctgcccgagtaccgcgccgacgaattcaccgtcgggattatgggcgccggcgtgctgggggcgaaggttgcggaaagtctgcaaccctgggggttcccgcttcgcgtctggagccgtagccgcaaatcctggccgcaggtgcagagcttcgccggccaggccgagctgggcgaattcctgcagggcactcgcgtgctgatcaacctgctgccgaataccgccgaaaccgccggcattattaaccagacgctgctggcgcagttgcctgatgagagctatgtcctcaaccttgctcgcggcgtgcatgtcgttgaagaggatctgctggcggcgctgaacagcggtaagctcaaaggggcgatgctcgatgtcttcagtcgcgaaccgctgccgcaggagagcccgctatgggcgcatccgcgggtggccatgaccccccatgtggcggcagtgacccgtccaatggaagctatcacctacattgcggagaccattagccggcttgagcgaggggagccggtaagcggtcaggtcgaccgccagcgcggttattaa

SEQ ID NO: 269943 - DNA, 738 bp, Klebsiella pneumoniae
atgtatcccgttgacctgcacatgcataccgtcgccagcacccatgcctacagcaccctgcacgattatattgcggaagcaaagcgtaaagggatcaaactcttcgccatcaccgaccacggcccggacatggcggatgctccgcactactggcacttcgttaatatgcgcatctggccccgcctggtagacggggtggggatcctgcgcggtattgagtcgaatattaaaaatattgaaggcgagatcgactgttccggaccgatgttgacttccctcgatctgatcatcgccggatttcatgagccggtgtttccgccgcaggatcgtgacacccatacacaggcgatgatagccgcgatggccagcggtaaagtgcatatgattagccatccgggtaatccgaaattcccggtggatatcccggcgattgccgaagcggcggctcgctaccaggtggcgctggagattaataactcctcgttcgtatcatcgcgcgtgggcagtgaagacaactgccgggccatcgccgccgcagtgcgtgatgccgggggatgggtggcgctgggctcggactctcacaccgcctttaccctcggggagtttaccgaatgccgcaagatccttgatgcggtcgatttcccggaggagaggatcctcaacgtttctccgcgtcgcctgcttaacttcctcgagtcgcggggcatgccggcgatcccggaatttgctgacctttaa

SEQ ID NO: 269944 - DNA, 555 bp, Klebsiella pneumoniae
atgaacgagttttcaatcctctgccgcgtgctgggttcgctgtattaccgtcaaccgcaggacccgctgctggtgccgctgtttaccctgatccgcgagggcaaactggccgccagttggccgcttgagcaggacgagctgctggcgcgtctgcagaaaagctgtgaaatgcagtccctggcgacggactataatgcgctgttcgtcggtgaagcctgcagcgtcccgccgtaccgtagcgcgtgggtggagggttcctcggaagcggaagttcgggcttttctgagcgaacacggcatcccgacaggggaaggtccggcggatcatctcggctcgctgctgctggccgcctcctggctggaggatcatgccgcagaagaccagagcgagacgctggagctcctgttcgccgactatatcctgccgtggtgcgggacgatgctggggaaagtcgaagcccatgcgcacacgccgttctggcgcaccatggcgccgttgacccgcgacgccatcgccgcgatgtgggacgagcttcaggaagaagatgagcaataa

SEQ ID NO: 269945 - DNA, 483 bp, Klebsiella pneumoniae
atgaacatactcttcgcaatcgcattaacgacaggcatcctctccgggatttgggggtgggtggcggtcgctctcggcctgctgagctgggccggattcctcggctgtacggcctatttcgcctgcccgcagggcggcttgaaagggctggccatctcgtcctgcacggtgatgagcggcgtggcctgggcgttagtgattatccacggtagcgcgctggcgccacaggtgcagatcctcagctatatgatgaccggtgtggtcgccttcctgatgtgcattcaggcgcgacggacgctactgtcgtttgtcccgggcacctttatcggcgcctgcgcgaccttcgcggcagacggcgactggcgtctggtgatcccttccctggcgctgggtctggtctttggctatgccatgaaaaatagtggcctgtggctggcggcccgtgcggataagcataaattgttcgtcaacgacaacgcctga

SEQ ID NO: 269946 - DNA, 528 bp, Klebsiella pneumoniae
atggctgttaaacctgaggtaattctcggcgatattacgacacttgatgtcgatgtgattgttaatgcggcaaatccctcgctgctgggtggtggcggagtagacggggccatccaccgggcggccggtcccgcgctgctggcggcttgtaagcaggtgctgcagcagcagggcgaatgccctcccgggcatgcggtaattactattgccggcaatctgccggccagcgcggtgatccacaccgtgggcccggtctggcacggcggcgaccgcatggaggcgcaaaccctggccgatgcttacaaaaacagtctgcagttggcctcggcaaacaactatcgctccattgcgtttccggcgataagcaccggcgtgtatggctatccgaaagaggaagcggcggcgatcgccgtgcgcaccgtcaccgcgtttctcactcgctataaccctcttgagcgcgtcctgttcgtctgttttgacgaggaaacggcggctatctatcgccgcctgctggcgtcatacccctga

SEQ ID NO: 269947 - DNA, 594 bp, Klebsiella pneumoniae
gtgtcagaaggaaaagtccagcagaaacagcaggcgcgccgcgcggagatcgttgtcgctgcgcaaaaatgtttcgctgaaaaggggctgcacggcgcttccgtcgccgatatcgcccgggaagcgggcctgagcgtcggtcagctatatcgcatttttgccagcaaggaagcgatcatcgaagcgattgttagcgaaatcgtcaacgccagagtcggggagatgatcgatgagaaccacaatctggcgcgtaaagcggcggttttggctggcaggatcccgacgtcggcagccaccaaaagcgataattatctgctgatggagatcaatgccgaggcctcgcgtaacccacgcttgcgtgagatcctgatgcaggccgatcggcggttgaaagaggagggcggtcgcctgtcgcagcgctaccatcccgggctcagcgatgcgcgacgcaatgccgcatcagagctcatcgccgttctgacggagggggcagcttaccgctgtgagctgagcgcctccaccccggtcgataaggcagatttagaagccctgtacaatatgattttcgaccggctttttgacgagcaggcataa

SEQ ID NO: 269948 - DNA, 1161 bp, Klebsiella pneumoniae
atgaataatactccggtacagcgtgaatatttcttcgacagcatccgcgcctggctgatgctgctggggatccctttccacatttcgctgatctattccagccacagctggcatgtcaacagcgctgagccctcgtggtggttgacgctgtttaatgacttcatccatgccttccggatgcaggtctttttcgtcatctccggctatttctcctacatgctgttcctgcgctacccgttgaaaaagtggtggaaagtgcgcgtcgaacgggtcggtattccgatgctgaccgctatcccactgctgacgctgccgcagtttattatgctgcagtacgtcaacggcaaggcggaaaactggcacaccctttccgggtacgacaaatttaacaccctggcgtgggagcttatttcccacctgtggtttttactggtgctggtggtgctgacctcgctgggcgtggtgctgtttaaatggctgacgcgccgcccggcagggggcgcctcagcctttggtgacactgtcactatgggccagctaacgatgattttccttgcgctgggggtgctttacgcgctgatccgccgatcgctgttcctgatttacccgccgctgcttagcaatggtctgtttaactttgtggtgatgcagacgctgttctatcttcccttctttgtgctgggggcgcagacctttattaatccgcgtctgaaggcgatgtttaccaccccgtcaccatggtgctgcgcagcggcgctgctgggatttatcgcctaccggctgaaccagcagtacggctccggcgacggctggatgtatgaaacggaatcggtgatcaccatggtgcttgggctgtggatggtcaatgtggttttttcgctcggccatcgcctgctgaatttccagtcggcgcgcgtaacctatttcgtcaatgcttcgctgtttatttacctggtgcaccatccgctgacgctgctgtacggggcgtggatcaccccggtcattaagtccaataccttaggctttattggcgggttggtttttgtggtgggtattgccctgatcctgtatgaaattcacctgcgcattccgctgctgcgtttcctgttctccggtaaaccgatgaacaaaccggccaaaaccccagcctcggccagctaa

SEQ ID NO: 269949 - DNA, 1554 bp, Klebsiella pneumoniae
atgaaacataaaccacagatgatgaaaatgcgttggttaagcgcagccgtaatgttgtccctgtgtacttcatctgcatgggcatttagcattgatgacgttgcaaaagaggccaaaacgttagccgggaaaggctatgaagcgccgaagagtaacctgccctccgctttccgcgacatgaaatacgcggattaccagcaaattcagtttaatcacgataaagcttactggaataaccagaaaaccccattcaagcttgaattttaccatcagggtatgtacttcgacacgccggtcaccatcaatgaagtgacggccaccagcgtgcgcaaaattaaatatagcccggactattttaactttggtaacgttcagcacgataaagacacggtgaaagacctcggtttcgccggcttcaaagtactgtatccgatcaatagcaaagataagaacgatgagatcgtcagcatgctcggtgccagctacttccgcgtgctgggtcagggtcaggtttacggcctgtccgcgcgcggcctggctatcgataccgcgctgccgtccggcgaagagttcccgcgttttcgcgagttctggatcgagcgtcctaaagccaccgacaaacgtctgactatctatgcgctgctggactccccgcgggcaaccggcgcttatcgctttgtcatcatgccgggacgcgacaccgtggtagatgtccagtccaaagtttacctgcgtgacaaagtgggcaaactgggcgtagcgccgctgaccagcatgttcctgttcggttccaaccagccttctccggcgcttaactatcgtccggcgctacacgactccaatggtctgtcgatcctggccggtaacggcgagtggatctggcgtccgctgaacaacccgaaacaccttgccgttagcagctatgcgatggaaaacccgcaagggttcggcctgctgcagcgcggccgtcagttctcgcgcttcgaggatctcgacgatcgttatgacctgcgtccgagcgcctggatcaccccgaaaggggagtggggcaaagggaaaatcgaactggttgaaatcccaaccaacgatgaaaccaacgataacatcgtgacttactggacgccggatcagctgccggagccgggcaaggagatgaacttcaagtacaccatcaccttcagccgcgatgaagacaagctgcatgcaccggataacgcttacgttatgcagacccgccgctctaccggcgacgtgaagcagtcgaacctgatccgccagccggacggcaccattgctttcattgtcgacttcaccggcgccgatatgaaaaaactgccggcggataccccggtcgccgcccaggcgagtaccggcgataacgctgaaatcgttgaaaataccgtgcgttacaatccggtgaccaaaggctggcgaatgatcctgcgtttgaaggtgaaagatccgaagaaaacgacggaaatgcgcgccgcgctggttaacggtgatgacacgttgagcgaaacctggagctatcagctgcctgccaatgaataa

SEQ ID NO: 269950 - DNA, 2529 bp, Klebsiella pneumoniae
atgaataagataacaaagtacattgacgcattgccgctgtcggacgccgagaaatcggcgctgccggacaccagcctgcaggccgttcatcaggccctggatgacgaccatcagaccttcgcccgcgaagacgactccccgctggggtcggtcaaggcacggctggcgcacagctggccagattcgctgtctggcgatcagctggtgaaggatgatgaaggccgtactcagctgcatgcgatgcctaaagccaagcgctcctcaatgatcccggacccgtggcgtaccaacccggtcggccgcttctgggaccgtctgcgcggacgcgatgtcacgccgcgctatctctcccgtctgacgcaagaagagcgcgagagtgagcaaaaatggcgtaccgtcggcaccattcgtcgctatatcctgctgctgctgacgctgtcgcagaccgtagtggccacctggtatatgaaaaccattctgccttatcagggctgggcgctgatcaacccggccgacatggtggggcagaacctgtggatctcgttcatgcagctgctgccgtacgtgttgcagagcggcattctgatcctcttcgcggtgctgttctgctgggtttccgccggcttctggaccgcgttaatgggcttcctgcagctattgatcggccgcgataagtacagtatttccgcctcgacggtcggtgacgaaccgttgaacccggcgcaccgtacggcgctgataatgccgatctgtaacgaagacgttgaccgcgttttcgccggcctgcgggcgacctgggagtcggtgaaagcgaccggtaacgccgctcatttcgacgtctatatcctcagcgatagctataaccccgatatctgtgtggctgagcaaaaggcgtggatggagctgattgccgaagtgcagggcgaagggcagatcttctaccgccgccgtcgtcgtcgagtgaagcgtaagagcggcaacatcgatgacttctgccgccgctggggcagccagtatagctatatggtggtgctggacgctgactcggtgatgaccggtgagtgtctgagcagcctggtgcgcctgatggaagcgaacccgaatgccgggatcattcagtcttccccgcgcgcctcgggcatggacacgctgtatgcgcgttgccagcagtttgccacccgggtgtacggtccgctgtttacggcgggtctgcacttctggcagttgggggagtcccactactggggccacaacgccattatccgcgtgaagccgttcattgagcactgcgcgctggcgccgctgccgggcgagggcaactttgccgggtcgatcctgtcgcacgacttcgtcgaagccgcgctgatgcgccgtgccggctggggggtgtggattgcctacgatctgccgggctcctatgaggagctgccgccgaacctgctggacgagctgaaacgcgaccgtcgctggtgtcagggcaacctgatgaacttccgcctgttccttgtcagagggatgcacccggttcaccgggcggtgttccttaccggcgtgatgtcctacctgtcggcgccgctgtggtttatgttccttgccctgtcgacggcgttgcaggtggtgcatgccctgaccgaaccgcagtacttcctgcagccgcgtcagctgttcccggtgtggccgcagtggcggcctgagctggccatcgcgctgttcgcctcgaccatggtgctgctgttcctgccgaagctgctgagtattattctggtgtggtgtaaagggccgaaagagtacggcggatttatccgcgtcacgctttcactgctgctggaggtcctgttctcggtcctgctggcgccggtccgtatgctgttccacacggtcttcgtggtcagcgccttcctcggctgggaggtggtatggaattcgccgcagcgtgatgatgactccacgccgtggggggaagcctttatgcgccacggctcacagctgctgctggggctggtgtgggcggtcgggatggcatggctggatctacgcttcctgttctggctagcgccgattgttgtctcgctgatcctctcgccgttcgtatcggcaatttccagccgggcgacagtgggcctgcgcaccaagcgctggaagctgttcctgatcccggaagagtattcgccgccgcaggtgctcaaggataccgatgcgtacctgacgatgaaccgtcagcgttcgctggacgatggctttatgcacgcggtgtttaacccgtcgtttaacgccctcgccaccgcaatggccactgcgcgccaccgtcaggggcatatcctggagatcgcccgcgagcgccatgtcgagcaggcgctgaatgaaacgccggataagctgaaccgcgatcgccgactggtgctattgagcgacccggtaaccatgtcgcgtctgcactatcgcgtatgggccgcgccggagaaatactcttcatgggtgaacgcctatcagcagttggcgcttaacccgctggcgctgaaaacgaaataa

SEQ ID NO: 269951 - DNA, 228 bp, Klebsiella pneumoniae
atgcgaatactaccgatcattgccatggcgctgctgctcagcggctgcggcagcattatcagccgtacggtgcccgggcaggggcatggcaatcaatattacccgggcgtacagtgggatgttcgcgattcggcatggcgctatctcaccattctcgacctgccgttctcgctggtatttgatacgcttctgctgcctctggacgccagccacggaccctataactga

SEQ ID NO: 269952 - DNA, 387 bp, Klebsiella pneumoniae; identical to SEQ ID NO: 135922

SEQ ID NO: 269953 - DNA, 921 bp, Klebsiella pneumoniae
atgactcatttgcctaaattttctccggcgctgttgcatccgcgctattggctgctgtggctgggtatcggcctgctgtggctggttgtccaactgccctacccgctgatctaccgcctcgggaacgccatcggccgtctggccatgcgctttatgaagcgccgggcgaaaatcgcctatcgcaaccttgagctctgcttccccgagaaaagcgagcaggaacgccaccgaatggtggtgatgaactttgaatcggtgggcatggggctgatggagaccggtatggcctggttctggccggttcgccgtatcgcccgctggaccgacaccatcggctttgagcatattcgcgatgtgcaggcgcagcagcgcggcattctgctgatcggtattcatttcctcactctcgagatgggagcgcggatgttcggtatgaacgagccggggattggcgtctatcgccccaacgacaacccggtgatcgactggctgcagacctggggccgcttgcgctccaacaaggatatgattgaccgtaaggatctgaaaggcatgatccgggcactgaaaaaaggcgaagtggtgtggtacgcaccggatcacgattacggcccgaccgccagcgtcttcgccccactgtttgcggtcgaccaggcggcgaccacctccggcacctggatgctggcgaaaatgtccaaagcctgcatcgtgcccttcgtcccgcgccgcaaaccggacggtaaaggttatgaactgattatcctgccgccagagtgttccccgccgctggacgacgcggaaaccaccgccgcgtggatgaacaagatcgttgagcagtgcatcatgatggccccggaacagtatatgtggctccatcgtcgcttcaaaacccgccccgaaggcatgccctcccgctactga

SEQ ID NO: 269954 - DNA, 1065 bp, Klebsiella pneumoniae
atgccagtgttacacaaccgcatttcaaatgagacgttaaaggcgcaaatgctggctgagaccgagccgcgcacgacgatctcattctataaatatttcaccattgtcgacccgcaggcgacccgtgatgcgctgtgggttgccttaacccagctgaaggtctttggccgcatctatctggcccgggaagggatcaacgcgcaaatcagcgtgccgcaaagcaacgttgaggctctgcgtgagtttctctatggcttcgatccggcgctggcggggctgcgtttcaatatcgccgtggaggacgatggtaagtctttctgggtgctgcgcctgaaagttcgcgatcgtatcgtcgccgacggcatcgacgatccctcgtttgacgcctccaatgtgggggagtatctcaaggcggcggaagtcaacgcgatgcttgacgatccggatgccgtgtttatcgatatgcgcaaccactatgaatatgaggtgggccatttcgaaaacgcgctggagatcccggcggataccttccgcgaccagctgccgaaagccgtggaaatgatgcaggaccataaagacaagaaaattgtcatgtattgcaccggcggcattcgctgtgaaaaagccagcgcctggatgaagcataacggcttcaataaggtctggcacatcgagggtggcatcatcgagtacgcccgtcgcgcccgcgagcaggggctaccggtgcgcttcattggcaaaaactttgtctttgatgagcggatgggcgagcggatctccaatgacgttatcgcgcactgtcatcagtgcggcgcgccgtgcgacacccatactaactgcctgaacgatggctgccatctgctgtttatccagtgcccgagctgcgccgagaagtttgccggctgctgtagcgaagcctgcatggaagagcataagctaccggaagaggagcagcgtaagctgcgcgccgggcgtgaaaacggcaacaaaatctttaataaatcccgtggccggctgaataccaaactcgggatcctcgacccggagccgtcagaaaaaccataa

SEQ ID NO: 269955 - DNA, 1119 bp, Klebsiella pneumoniae
atgcaatacgatcttatcattattggcagcggctccgtcggcgccgccgctggctattatgcgcgccgtgccggactcaatgttctgatgaccgatgcccatcaacctccccaccaggaaggcagccatcacggcagcagccgtcttatccgtcacgcctatggcgaaggtgagaaatatgttccgctggtgctgcgtgcccagcagctatgggatgaactggcagagatcagtggcgaagccgtgtttgaacgcaccggcgtcattaacctcggccccgccagctccgcttttctcgccaacgtcgccgccagcgcccgtgcgttccagcttgaggtggaagagctggatgcccaggccgtgatgcagcgctggccggagatacgcctccccgatgactatcgggcgattttcgaacccgcttccggcgtactgcgcagcgaactggccgtcgaaacctggatccgtctggcgcgggaagcaggctgcgcgcagctattcaactgtccggtctcggctattcatcaccatgctgacgggatcaccatcgataccctcgacggtgaatatcatggtaaaaagctgctggtcagcgccggcacctgggtcacccgcctgcttccggacctccctatccagccggtacgcaaggtgttcgcctggtaccaggccgatggccgttacagcagcaagaatcacttcccggccttcaccggcgagttgcccaacggcgatcaatattacggtttcccggcggaagataatgaactgaaaattggcaagcataacggcggccagccgatctccaccccgcaggagcgggtagcgtttggcgctgtcgccagcgatggttccgaatccttcccgtttttgcgtaacgtcctgcctggcatcggcggctgcctgcacggcgcctcctgtacctacgacaataccgtcgatgaggactttattatcgatacgttgccaggcaggccagacacgctgctgatcaccgggctgagcggccacggctttaagtttgcaccggtgctgggcgaaattgccagtcagtttgctcagggcgaagcatcgagcttcaatctggcccccttttctctggcgcgctttaacgcgtaa

SEQ ID NO: 269956 - DNA, 255 bp, Klebsiella pneumoniae; identical to SEQ ID NO: 243936

SEQ ID NO: 269957 - DNA, 252 bp, Klebsiella pneumoniae
atgcgcattgaagtgtctatcgccaaaacgaccgccttacctaacggcgcgctggaagcgctgaataacgaactctctcgccgtatcgccgagcaattcccggccatcgatagccaggtgagcgtccgctacgccagcggcaatcagctctcggtgtttggcgccctgaaagaagacaaagaccggataagcgaaatcctgcaggaaacatgggaaagcgcggacgactggtttgtccacgatctctcctga

SEQ ID NO: 269958 - DNA, 1047 bp, Klebsiella pneumoniae
atgacagcacaatcccaggtattgaaaatccgccgcccagacgactggcatatccatctgcgcgatgacgatatgctgaaaaccgtcgtgccttataccagtgagttttatggccgggcgatcgtgatgccgaatctggtgccgcctgtcaccaccgtcgcggcggctatcgcttaccgccagcgcattatggacgccgtgccggccgggcatgattttaccccgctgatgacctgctatctgacagactctctcgacccagcggagctggaacgcggctttaacgaaggggtgttcaccgccgccaagctctacccggccaatgccactactaactccagccacggcgtcaccagcaccgacgccattatgccagtgctggagcggatggaaaaactggggatgccgttgctcgttcacggcgaagtcactcacgccgagattgatattttcgatcgtgaagcgcgctttattgagacggtgatggagcccctgcgccagcgcctgcccggcctgaaagtggtttttgaacatatcaccaccaaagacgccgccgagtacgtgcgtgacggtaatgaactgctggctgctaccatcaccccgcagcatctgatgttcaaccgcaaccatatgctggtgggcggcattcgccctcacctgtactgtctgccggtacttaaacgcaatattcatcagcaggctctgcgggagctggtcgccagcggcttcagccgcgccttcctcggcaccgactccgcaccgcacgcccgccaccgtaaggaagccagctgtggctgcgccggctgctttaacgccccgaccgccctcggcagctacgccacggtgtttgaagaaatgaacgctctgcagcactttgaggctttctgctcgctgaacggcccgcgcttctacggtctgccggtcaatgagagctacgttgaactggtgcgtgaagagacgaccgttgtggacagcattgccctgcctaatgacaccctggtgcccttcctggcgggtgaaaccgttcgctggaccgtgaagaaataa

SEQ ID NO: 269959 - DNA, 561 bp, Klebsiella pneumoniae
atgaaaaagatattgatcgccgccgcgctaattgtcagcggcctgctgagcggctgtaatcagctgacccaatatacggtaagcgaacaggagattaaccaggccctgcagaagcgaaaccatttcgccaaagatattggtctgaaaggcgttgccgacgcccatattgaactgcagaacctgaccagcgctatcgggcgcgaggagccgggcaaagtcaccctgagcgggatcgccaatgtcgatcttaactccctgttcggcacgcagaaagcgacgatcgatctgaagctcaaagcgctgccaacctttgaccgagagaaaggcgccatcttcctgcaggaaatggaagtggtcgatgccaaagtggcgccggagaagctgcagtcggttattcaggccctgctcccctacctgaatcagtctctgcgcagctacttcagccagcagccggcttatgtcctgcgtgaggacgccagcaccggcgaagcgctggcgaagaaatacgccaaaggtatagaggtgaagccaggcgagattgtcatcccctttaccaattaa

SEQ ID NO: 269960 - DNA, 1209 bp, Klebsiella pneumoniae
atgtcccgcgtctcgcaggcaaggagcctgggtaaatatttcctgttagtcgataacatgctggtcgtgctgggcttttttgtcgtttttccgctgatttccatccgctttgtcgatcagatgggctgggcagcgctgatggtcggcattgcgctcggcctgcgccagctggtacagcagggattaggcatctttggcggcgccatcgccgaccgcttcggcgcgaaaccgatgatcgtcaccggtatgctgatgcgtgccggcggtttcgcggcgatggccgtcgcccatgagccgtgggtgctgtggttctcgtgcatactctccggactcggcggtacactgttcgatccgccgcgggcggcgctggtggttaagctggtgcgtccgcatcagcgcggccgctttttctccatcctgatgatgcaggatagcgccggcgcggtgattggcgcgctgctgggtagctggctgctgcagtatgattttcgcctggtgtgcagcgccggcgccgcgctgtttatcgcctgcgccgcgtttaacgcctggtatatgccggcatggaagctctcgacggtgaaaacgccgattcgcgaggggctgggccgggtgctgcgggacaaacgcttcgtcacctatgtcctgacgctgaccggctattatatgctggcagtacaggtgatgctgatgctgccgatcatggtgaatgatatcgccggctcgccggccgcagtgaaatggatgtacgccatcgaagccaccatttcgctcaccctgctctatcctattgcccgttggagcgaaaaacgcttccgccttgagcaccggctgatggccggtctgctggtgatgaccctggccatgctccccatcgggatgaccagcagtttacagcagctgtttaccctgatttgcctgttttacatcggctctatcattgccgaacccgcccgcgagacgctgggcgcttcgctggcggacgcccgggcgcgtggcagctatatgggtttcagccgtctggggctcgccttcggcggcgcgctgggttacgcgggcggcggctggctgtttgatgccgggaaagccgtcggccagcccgaactgccgtggctgatgctcggcgccatcggggttatcaccttcctggcgctatggtggcaattcagtccgaaacgctctgcctccggtatgctggagccgcgcacctga

SEQ ID NO: 269961 - DNA, 624 bp, Klebsiella pneumoniae
atgagagcaagagtgaagtcagggggactgaaaaaggaaatgtttggctatcgcagtaacgtgccgaaggtgcgtttgacgacggaccggctggtggtgcgcctggttcacgatcgtgacgcctggcgtctggccgattattacgccgaaaataaagcgttcttaaaaccctgggagccggttcgtgacgacagccactgctatccctccggatggcaggcgcgtctgtcgatgatcgctgagtttcataagcaggggtcagctttttatttcgcgctgctcgaccctgaggaaaaagagatcatcggtgtggcgaatttctccaacgtggtgcgcggatctttccatgcctgttatcttggctattccattggcgagaagtggcaggggcaggggctgatgtttgaagcgctgacgtcggcgattcgctatatgcagcgcacgcagcatattcatcgcattatggccaactacatgccgcataatcagcgcagcggcgcgctgctggcgcggttggggtttgaaaaagagggttacgccaaagattatctgctgattgacgggcagtggcgtgaccatgtactgacggcgctaacgacgccggactggtctgcgggacgttaa

SEQ ID NO: 269962 - DNA, 654 bp, Klebsiella pneumoniae
atgaaatatcagttaactgcgcatgaagcgcgcgtcattggctgcctgctggaaaagcaggtcaccacccccgagcagtatccgctgtcggtaaatgctgtggtgaccgcctgcaatcagaaaaccaaccgcgagccagtgatgtcgctgagcgaaagcgaggtccaggccctgctggatacgctggtgaaacggcactatctgcgcacggtcagcggattcggtaatcgcgtcaccaagtatgaacagcgcttttgcaactctgaatttggcgatctgaagcttagcgccggcgaggtcgcggtggtcacgacgctgctgctgcgcggtgctcagacgccgggcgaactacgcagccgggcgcagcggatgtatgagttcagcgatatggcggaagtggaaagcgtgctggaagggctgacgacgcgcgaagatggccccttcgtcgcccggctgccccgggagccgggaaaacgggaaagccgctatatgcatctgttttgcgacgatatggacacgctgatcaccacagtggaagctctcgcgccgctggacgatgacggcgatctgcgcgccagggttgaagcgctggagggcgaggtggcggagctgaaagcgcgcctcgattcgctgttacaccatctgggagactaa

SEQ ID NO: 269963 - DNA, 924 bp, Klebsiella pneumoniae
gtggggacaagattgcgcattggggtggtcggcttaggcagcattgcgcagaaagcgtggctgccggtgctgggggcggcggaaagctggacgctgcaggcggcctggtcgccgggtaaagagaaggcgctgcggatctgcgaaacctggcggatgccatacgctgattccctcgatgccctggcggcacagtgcgatgcggtctttgtccatacctcgacggcttcacattatgaagtagtgaatcacttactgaatgccggggttcatgtttgtgtggataaaccattggcggacaagctgagtgaggcggagacgctggtcgagctggcggcgcgacgtcgactgacgttgatggtcggttttaatcgccgcttcgcgccgctctatcgggagctgaaggggcggctgggcgaggcggcctcgctgcggatggataagcatcgtagcgatagcgtcggcaacgatctgcgctttacgctgcttgatgactatctgcatgtggtggataccgcgctatggctggccgacggtcaggcacgtctgcgcggcggcgcgctgaagatcaccccgcagggcgaaatgctctatgccgaacatcagttcagttcgccccggctgcaggtcaccaccagcatgcatcgtcgcgcaggcagccagcgcgagtgggtgcaggcggtcacggatggcgggctatatgccgtcagcgagatgcgcgaatggcaggaggagtgcggtcatggcgtggtccagcgcccggttgccggctggcaaaccacccttgagcagcgcggctttgtcggctgcgcgcgccattttatcgaatgtgtgcaaaatcagacagttcctgaaactgcaggcgaacaggcgctgctggctcagcggatcgttgagaaactgtggcgcgacgccattagcgaataa

SEQ ID NO: 269964 - DNA, 1536 bp, Klebsiella pneumoniae
atgaaccttttaaaatcactggcggcagtcagttcgatgaccatgttttcgcgcgtgctgggctttgcccgcgatgcgattgtggcgcgtatttttggcgccgggatggcgaccgatgccttttttgtcgccttcaaactgcctaacctgctgcggcgtatttttgccgaaggcgccttctcacaggcgtttgtgccgatccttgccgaatataaaagcaagcagggcgaagatgccacccgcgtgtttgtctcatacgtctccgggctgctgaccctggccctggctatcgttaccgttatcgggatgctggcggcgccgtgggtaatcaccattactgcgcccggctttgccgataccgccgataagtttgcgctaaccacccagctgctgcgtattacctttccctatattttgctgatctccctggcttcgctggtgggggcgatcctcaatacctggaaccgcttctcggtgccggcctttgcgccgacgttcctcaacgtcagtatgattggctttgcgctgtttgccgcgccatatttccatccgccggtgctggcgctggcctgggcggtgacggtcggcggcgtgctgcagctggcttaccagctgccgcatctgaagaagattggcatgctggtcctgccgcgaattaatctgaaagatgccggcgcgatgcgggtggtgaagcagatggggccggcgatccttggcgtgtcggtaagccagatctcccttatcatcaataccattttcgcctcattcctcgtgtcgggctcggtgtcgtggatgtattatgccgaccgcctgatggagtttccctccggcgtgctgggcgtggcgctcggcactatcctgctgccatcgctgtcaaaaagcttcgccagcggtaaccatgacgagtattgccggctgatggactggggactgcgtctctgttttctgctggcgctgccgagcgcggtggcgctggggatcctcgccaaaccgctaaccgtggctctgttccagtacggcaaattcagcgcctttgacgcggcgatgacccagcgcgcgctggtggcttattccgtagggctgatgggccttatcgtggtgaaagtgctggcgccgggcttctattcacgtcaggacatcaagaccccggtcaagattgctattatcaccctgattatgacccaggtaatgaacctggcgtttatcggcccgctgaagcatgcgggtctgtcgctgtccatcggcctggcggcctgcctgaacgccgcgctgctctactggcaactgcgtaaacagaaaattttcaccccgcagccgggctggttggccttcctgctgcgtctgattattgcagtgctggttatggccgcggcgctgctgggcgtcatgcatctcatgcctgagtggtcgctggggacgatgccgttccgtctgatgcgtttgctggcggtggttatcgccggggtggtagcctatttcgccacgctgctggtgctgggcttccgcgtgaaagagtttgtccgtcgcacggcgtag

SEQ ID NO: 269965 - DNA, 1215 bp, Klebsiella pneumoniae
atgacaccgacttccctttccacccgcgacgcaggctggattatcttcattctcgcactcggcgccggctttagcgtcgcctctatttactacgcgcagccgctgctgccgttgatgggcgccaatctccacctgactgtagaaggtatgggtctggtccctaccctgacgcaggcgggttatgcgctcggcattctgttcctgctcccgctcggcgaccgccacgatcgccgccggctgatcctggtgaaaagcgcgctgctggcgctcctgctgctcctgtgcagcctcaccggccagctcagctcactgctggtggtcagtctgctgatcggtatggcggcgaccatggcgcaggatatcgtcccggcggcggcgatcctcgccccggcgggcaagcagggaaaaatggtgggcacggtgatgaccgggctgctgctggggatcctgctctcccggacggtcagcggcgtggtgggcgccgtattcggctggcgggtgatgtatcaggcggcggcggtcagcgtcgcgctgattggcctggtaatgtggcgcgtcctgccgcgcttcgctgtgcactcgacgctgagctatccgcagctgatggcctcgatggcgcatctgtggcagcgttacccggcattacgccgcgccgcgctagctcagggcgcgctctccatcgcctttagcgccttctggtcgacgctggcggtgatgctctccgaacactatcacatgggcagcgcagtagcgggcggtttcggtatcgccggggccgccggggcgctggccgcgccgcttgccggcggtctggccgataaatttggcgccggtaaggtgacacagatgggtgcggcgctggtcaccctctcctttgccctgatgtttatgctgccgctgctgccagtgcacgctcagttggcgctgattgccctgtcggcgattggctttgaccttggcctgcagtcaagcctggtggcgcatcagaacctggtatatggccttgagccacaggcccgcggccgcctcaacgccctgctgttcaccgtggtgtttatcgggatgtcgctggggtcggtgctgggcagtaagctgtacgtgctggccggctggaacggagtggtcacgctggcagtgatcactggcgcgctagccctggcgatccgcctgctggagaatgcccgcatcctcgctgccgaacgcagcgcatcataa

SEQ ID NO: 269966 - DNA, 936 bp, Klebsiella pneumoniae
atgaaaagacaagagcgtatagaccgcattgagctgatgcgcacctatatccgcatcgtagaggccggatcgctctccgccgccgcagggcagatggacactacccaggcgaccgtcagccgccgcctgcagtcccttgaagggctgctgggggttaagctgatcctgcgcaccacccatgcgatgaagctcactgacgatggcgaacgctgttatcgtcacgcccgtcaggtggtggacgcctggctggcgctggaggatgacctgcgtattgccgacgatcggccggtgggcgttctgcgagtgcgggcgccccacgcgtttggccagcagcagctgctggcgccgctggtggcatttctacagcgccatccgcagctgtcggtggagtggatgctaaacgataataccgtcgacttcctcagcgataatatcgactgcgctattcgcgtgggggcggaggtggatccagcaacggtatccgtactgctggcggaagtgccgcgctgcgtagtggcttctcctgagcttctggcgaagtatccgccgttaacctcgctggaggcgttatcgggcctgccatggatcgccattaataccttttatcagcatgaggtacggctcaggcatcaggcaaacgggcagattgtctctacagcgattactccctgtctgagcactgacagtctttacgtcgcgcgcaacaccgcgctggcggggctgggggtggcgatggtgtccagctggacggtcgtggaggatattgccgccggacggctgattgagctgttcccgcagtggcgacccgcctcgctgccggttcatctggtttatccctgggcgcgctattacccgacacgcctgcgtaagttcctcgacctgatgcgggagatcatgccggatctcgccgggatgcagcgtccgcaaagcgcataa

SEQ ID NO: 269967 - DNA, 3234 bp, Klebsiella pneumoniae
atgaaaagaatgttaatcaacgcaactcagcaggaagagttgcgcgtcgcccttgttgatgggcagcgcctgtacgacctggatatcgaaagccccgggcacgaacagaaaaaagcgaacatctacaaaggcaaaatcacccgcattgaacccagccttgaagccgcgtttgttgattacggcgccgagcgtcatggtttcctccccctcaaagaaatcgcccgcgaatacttccccgccaactacaatgcgcatggtcgtcctaatatcaaagacgtactgcgggaaggtcaggaagttatcgtgcagattgataaagaagaacgcggcaacaaaggcgctgcgctcaccacctttatcagcctggcgggcagctatctggtactgatgccgaacaacccgcgcgccgggggaatttcccgccgtatcgagggcgacgaccgtaccgaactgaaagaagcgctggcgagcctggagcttccggacggcatgggcctgatcgttcgcaccgctggcgtcggcaaatccgccgaagccctgcagtgggacctgagcttccgcctgaagcactgggaagcgattcagaaagccgcggaaagccgtccggcgccgttcctgatccaccaggaaagcaacgtcattgtccgcgccttccgtgactacctgcgccaggacatcggcgaaatcctgatcgataacccgaaagtgcttgagctggcgcgccagcatatcgccgcgctgggtcgtccggatttcagcagcaaaatcaaactgtacaccggtgaaatcccgctgttcagccattatcagatcgaatcgcaaattgagtccgccttccagcgcgaagtgcgcctgccttccggcgggtctatcgttatcgatagcaccgaagcgctgaccgcgatcgatatcaactccgcccgcgccacccgcggcggcgatatcgaagagacagccttcaataccaacctcgaagcggctgacgaaattgcccgccagctgcgtctgcgcgacctcggcggcctgatcgttatcgacttcatcgatatgaccccggttcgccaccagcgcgccgtggagaatcgtctgcgcgaagccgtccgtcaggaccgggcgcgcattcagatcagccatatttcgcgcttcggcctgctggagatgtcccgtcagcgcctgagcccgtcgctgggcgagtccagccaccacgtctgcccgcgctgctccggcaccggcaccgtacgtgataacgaatcgctgtcgctctctattctgcgtctgattgaagaagaagcgctgaaagagaataccaaagaagtccacgccattgttccggtaccgatcgcctcctatctgctgaacgaaaaacgtgccgcagtgagcgctatcgaatcccgtcagggcgatgtgcgcgttattatcgtgccaaacgacgaaatgcaaacgccgcactactccgtcctgcgcgtgcgcaaaggtgaagaaacctcaacgctgagctatctgctgccgaagctgcatgaagaagagatggcgctgccaggcgacgatgagccggcggagcggaaacgtccggaacagccggccctggccgcttttgtcatgccagatgcgccgccagccccgatgctcgaagagcctgccgccgcgcctgtcgccgcagcggcaccggtcgcggccgccgcaccggcgcagcctggcctgctctcacgcttcttcagcgcgctgaagaatatcttctctggcgccgaagaggccaaaccggctgaagttcaggtcgagaagaaagcggaagaaaaaccggagcgtcagcaggagcgtcgtaaaccgcgcgccaacaaccgccgcgaccgcaacgaccgccgtgataaccgcgacaatcgtgacaaccgcgataaccgtgacaatcgcgacacccgtgcggacaatgccgagggccgtgaaccgcgcgaatcgcgtgaagagaaccgtcgcaaccgtcgcgagaagccgtcgcagaacgtggaagcccgtgatgttcgccaaacctcaggcgacgacgcggagaaagcgaaatcccgtgacgagcagcagccgcgccgcgaacgcacccgccgccgcaatgacgacaaacgtcaggcgcagcaggaagccaaagcgcagactcgcgaagagccggttgtgcaggagacggagcaggaagagcgtctacaaactctgccgcgtcgtaaaccgcgccagctggcacagaaagtgcgcgttgagtccgctgtcgtcgagccagttgccgagatcgtgccagaagccgtagtggctgaagttatcgctccgcaaagcgagccggtgaaagccgagctgccggcaggggtggagagcgtggcggaccaggacgaaaatggcgaatcccgtgaagcgaacggtatgccgcgtcgctcacgtcgctccccgcgtcacctgcgcgtcagcggtcagcgtcgtcgtcgctatcgtgacgaacgctatccgacccagtcgcctatgccgctgaccgtagcctgcgcatcgccggagatggcttccggtaaagtctggatccgctacccggtggttcgtccgcaggatcagcagccggaagaggttcagattcaggacgccagcgtcgcgaaaactgtcgaggccgtagcggccccggttgccgtcgttgaaaccgttaccgctgcgccggtcaccgtcgagccggctaccatggaaccagtaaccgctgagccggtagtcgtcgagccggtagcggccgccgagccgctggtcgttgatgctgcggaagttgtcgcgccagcagccgtcgagccagcgcctcaggagccggtcaccgaagcaccggctgtcgaagcgcctcaggctatcgcgccagtgacgctcgacgccgagccggtggtggtagaacctgaagcggtggaaacgacgcctgtcgttgcagcgccagtggaaactatcgccccggtcgcagaaaccgtggagcaagcgccagtgaccgaagcggcccctgccgaaccggtcaaagccgagcccccggtgagcaagccggtcgtagtggcgggtcatcgccatgccaccgcgccaatgacccgtgcgccagctccggactatgtcccggaagcaccgcgtcacagcacctgggtgcgcccgccgttcgcctttgaaggtaaaggcgccgccggtggtcatagcgcgacccataaagccaccgctgaaccgactcgcccacagcccgtcgagtaa

SEQ ID NO: 269968 - DNA, 996 bp, Klebsiella pneumoniae
atgagtggcgctaatgcgtccggctatttagaatcgcgcaccatgaaaactgagaccccaaccgtaaaaatggttgccattgctgctgatgaagcggggcaacgtatcgacaactttttgcgtacgcaattgaaaggcgtaccgaagagcatgatttatcgcatcctgcgtaaaggcgaggtgcgggtaaacaaaaagcgcgtgaagccggagtataagctggaagcgggcgatgaagtccgtatcccgccggtacgcgtggcggagcgtgaagaagaggcggtatcgccgcacctgcagaaagtggccgcgctctctgaggtgatcctctatgaagacgatcatattctggtgctcaataagccttctggtaccgcggtacacggcggcagcggcctgagcttcggcgtgattgaagggctgcgcgccctgcgcccggaggcgcgcttccttgagctggtgcatcgtctcgaccgggatacctccggcgtgctgctggtggcgaaaaagcgctcagcgctgcgttcgctgcacgagcaactgcgcgataaaggcatgcagaaagattatctggcgctggtgcgcggccagtggcagtcgcataccaaagtggtccaggccccgctgttgaagaatattctgcagagcggggagcgcatcgttcgcgtgagtcaggaaggcaagccgtcggagacgcgctttaaagtggaagagcgttacgaattcgccacgctggtgcgctgcagcccggtcaccggccgcacgcatcagatccgcgttcatacccagtatgccggccatcctatcgcttttgacgaccgctatggcgaccgcgagttcgacaagcagctgtccgctaccggcttaaaccgcctgttcctgcacgcggcggcgctgaagtttacccacccggggagcggggagatgatgcgcgttgaggcgccgctggacaaccagctgaagcactgtttacaggtgctacggaagagcaaataa

SEQ ID NO: 269969 - DNA, 585 bp, Klebsiella pneumoniae
atgtctgatcttatcctcgcgtcaacctctccctggcggcgcatgctgctggaaaaactgggtttaccgtttgaatgtgccgcgcctgacgtcgacgaaacgccccggcctgatgaatccgcacgtcagcttgtcacccggctggcgcaggccaaagcgcaaagtctggccacacgcttccctaatcaccttattataggctccgatcaggtttgcgtgctggacggtgaaatcaccggcaaaccgcacaccgaggaaaatgcccgcaggcagttaagaaaggccagcgggtcaatcattaccttttataccggactggcgctgtacaactctgccagcggccatctgcaaaccgaatgcgaaccctttgacgttcactttcgccatctcagtgataaagagatagaaggctatgtgcgcaaagagaacccgctgcagtgcgccgggagtttcaagagcgaaggattgggcattacgctgttcgaacggctggaaggccgcgacccgaacaccctggtcggtttacccttaatcgcgctctgtcagatgttgcgccgtgaaaactacaacccactgttaggctga

SEQ ID NO: 269970 - DNA, 522 bp, Klebsiella pneumoniae; identical to SEQ ID NO: 210705

SEQ ID NO: 269971 - DNA, 174 bp, Klebsiella pneumoniae; identical to SEQ ID NO: 210706

SEQ ID NO: 269972 - DNA, 1161 bp, Klebsiella pneumoniae
atgaagcttagtgaggactccccgggcaactggggaatcaccgaaccgggcagcgacgataccttgacacgtctaaccctggcgttagatgtcatggggggcgatttcggcccatccgtgacggtgcctgcagcactgcaggcactgaactctaattcgcaactcacacttcttttagtcggcgatcccgacgccatcacgccattactcgccaaagctgatttcgaacaacgttcgcgtctgcagattattcctgcgcagtcagttattgccagtgatgcgcgacccgcacaggctatccgcagcagtcgcggaagctcaatgcgcgtggcgctggagcttgtgaaagaagggcgggcgcaagcctgcgtcagcgctggcaacaccggcgcgctgatgggtctggcgaaactgctgctcaaaccgatcgaaggtattgagcggccggcgctggtgacggttttaccgcaccagcagaagggcaaaaccgtggtgctggatctcggcgccaacgtcgattgcgacagcacgatgctggtgcagttcgcggtaatgggcgcggtgctggcggaagaagtggtcggcattgccaacccccgcgtcgctttgttgaatatcggcgaagaagagatgaaaggcctcggcagcatccgcgatgctgccgcagtgctcaaaacgctgccttccctcaactacatcggctatcttgaagccaatgaactgttgaccggaaaaaccgatgtgctggtttgtgatggattcacgggcaacgtcacattaaaaaccatggaaggtgttgtcagaatgttcctttcactgctgaaatctcagggagagggcaaaaaacggtcgtggtggctgctgttactaaaacgttggttacaaaaaagcctggcgaggcgattcagtcacctcaaccccgaccagtataatggcgcctgtctgttaggattgcgcggttccgtgatcaagagtcatggtgctgccaatcaacgcgcctttagcgtcgcgatagagcaggcagtgcaggcggtgcagcggcagatccctcagcggatcgccgcgcgcctggaatctttatacccagctggtttcgagctgccggaaagcgacagtgacgtgaacgcccgacagcaaagcgggacgaatggccacgattga

SEQ ID NO: 269973 - DNA, 954 bp, Klebsiella pneumoniae
atgtatacgaagattattggtaccggcagctatctgcccgagcaagtgcgtacaaacgccgacctggaaaaaatggtagaaacctctgacgagtggattgtcacccgcacaggtatccgtgagcgtcgtattgccgcagcgcatgaaacagttgctacgatgggctttgaagccgcaaagcaggcgctggcgatggcgggcgtgtccgcggagcaaattggtctgattatcgttgcgaccacctccggcacgcacgcgtttccgagttctgcatgccagatccagtcaatgctgggcgttaagggttgcccggcgtttgatgtcgccgccgcctgcgcaggtttcacctatgcgctaagcgtcgccgatcagtatgtgaagaacggcgcggtagattatgcgctggttgttggcgccgatgtgctggcgcgcacctgcgatccggcggatcgcggaacgattattattttcggcgacggcgccggcgcggttgtactgggcgcctccgaagagccgggcattatctcgacgcatctgcatgccgacggcagctatggcgaactgctgaccctgccgaacgccgatcgtgtcgatccggaaaacccgatctatctgacgatggccggcaacgaagtcttcaaagtggcggtcaccgagctggcgcacatcgttgatgagacgctggcagcgaataatcttgaacgttcagcgctggactggctggtgccgcatcaggctaacctgcgtattatcagcgcgacggcgaagaaactgggtatgtcgatggataacgtcgttgtgaccctcgaccgccatggcaacacctccgcggcgtcagtcccttgcgcgctggatgaggccgtccgcgatggccgtattcagcgcggtcagctgattttgctggaagcctttggtggcggtttcacctggggttccgcgctggttcgtttttag

SEQ ID NO: 269974 - DNA, 930 bp, Klebsiella pneumoniae
atgacgcaattcgcatttgtgttcccggggcagggctctcaggccgtaggcatgctggccgaaatggctgccgcctggccggtcattgaagagaccttcggtgaagcttccgcagcgttgggttacgatctgtgggcgctgacgcaacagggcccggcagaagaactgaataagacctggcagactcaaccggcgctgctcgccgcctccgtggcgctgtaccgcgtctggcaacagcagggcggcaaagcgccagcgctgctggcgggtcacagcctcggcgaatactccgcgctggtatgcgcgggcgttatcggtttcgctgatgccgttcgcctggttgagctgcgtggtaaattcatgcaggaagccgtaccggaaggtaccggcgccatgtccgcgattatcggtctggacgacgccgctatcgccaaagcctgtgaagagtctgccgaagggcaggtggtctctccggtgaactacaattctccgggccaggtggttatcgccgggcacaaagaggccgttgaacgtgcgggcgccgcctgtaaagccgccggtgccaaacgcgcgctgccgctgccggtgagcgtgccgtcccactgcgcgctgatgaagccagccgcagaaaaactggcggtagagctgcagaagatcaccttcaacgcgccgacgattccggtggtgaataacgtcgacgtgaagtgcgaaaccgcgccggacgccattcgcgacgcgctggtgcgccagctgtacagcccggtgcagtggaccaaaaccgttgagtttatggctgccgagggcgtatcgcatctgtatgaggttggcccgggtaaagtcctcaccggcctgaccaaacgtattgttgacaccctgaccgcttccgcgcttaacgagccggcggcgatgtctgcggcgcttgagcaataa

SEQ ID NO: 269975 - DNA, 735 bp, Klebsiella pneumoniae
atgagttttgaaggaaaaatcgcgctggttaccggtgcaagccgcggtattggccgtgccatcgctgaaacgctcgtcgcccgtggcgcgaaagttatcggtactgcgaccagcgaaagcggcgcgcaggcgatcagcgactatttaggcgccaatggtaaaggtctgatgttgaatgtgaccgacccggcatctattgaatctgttctggaaaatgtgcgcgcagagtttggcgaagtggatatcctggtgaataatgccgggatcactcgcgacaatctgttaatgcgcatgaaagatgacgagtggaacgatattatcgaaaccaacctgtcatcggttttccgtctgtcaaaagcggtaatgcgcgctatgatgaaaaagcgtcatggacgtattatcactatcggttctgtggttggtaccatgggaaatgcgggtcaggccaactacgccgcggcgaaagcgggtctgatcggcttcagtaaatcactggcgcgtgaagttgcgtcccgcggtattactgtaaacgttgttgctccgggctttattgaaacggacatgacgcgtgcgctgaccgatgagcagcgtgcgggtacgctggcggcagttcctgcggggcgccttggcaccccaaatgaaatcgccagcgcggttgcatttttagcctctgacgaagcaagttacatcactggtgaaacgctgcacgtcaacggcggaatgtacatggtctga

SEQ ID NO: 269976 - DNA, 237 bp, Klebsiella pneumoniae; identical to SEQ ID NO: 210711

SEQ ID NO: 269977 - DNA, 1242 bp, Klebsiella pneumoniae
gtgtctaagcgtcgtgtagttgtgaccggactgggcatgttgtctcctgtcggcaataccgtagagtctacctggaaagctctccttgccggtcagagtggcatcagcctgatcgaccatttcgatactagcgcctatgcaacgaaatttgctggcttagtaaaggattttaactgtgatgacattatctcgcgcaaagaacagcgcaagatggatgccttcattcaatatggaattgtcgctggcgttcaggccatgcaggattctggccttgaagtgacggaagagaatgcaacccgtattggcgccgctatcggctccggtatcggcggtctcggcttgatcgaagaaaaccacagttcgctggttaacggcggaccgcgcaagatcagcccattcttcgttccttccacaattgttaacatggtggccggacatctgaccatcatgtttggtctgcgtgggccaagtatctctatcgcgaccgcgtgtacttcaggcgtgcacaacatcggccaggccgcgcgcatcatcgcctatggcgatgccgatgcgatggtggcaggcggcgcggaaaaagccagcaccccgcttggcgtgggcggcttcggcgcggcgcgtgcgctctccacgcgcaatgacaacccgcaggcggcgagccgtccgtgggataaagatcgtgacggcttcgtgctgggcgacggcgcgggtatggtggtgctggaagagtacgagcatgccaaaaaacgcggcgccaaaatctacgccgagatcgttggtttcggcatgagcagcgatgcttaccacatgacgtcaccgccggaagatggcgcgggcgcagcgctggcaatggtgaatgctattcgcgatgcgggcatcgaaccgggccagatcggctacgtcaacgcccacggcacctcgacgccggccggcgataaagcggaagcgcaggcggttaagtctgtcttcggtgatgcggcgagccgcgtactggtgagctctaccaaatccatgaccgggcatctgctgggtgcggcaggggcggtagagtcgatttactctatcctggcgctgcgcgatcaggcggttccgccgacgatcaacctcgacaacccggatgaaggctgcgacctcgacttcgttccacacgaagcgcgtcaggtttccggtatggagtataccctgtgcaactccttcggctttggcggcactaacggttcgctgatcttcaaaaaagtgtga

SEQ ID NO: 269978 - DNA, 810 bp, Klebsiella pneumoniae
atgttcttgataaacggcgttgtacaggacacgttggcagcgaacgatcgcgctacccagtttggcgacggctgttttaccaccgcccgcatccagcaagggcaggttgcgctactggacgcccatctgcagcgtttacagacaacctgtgaaaaattacatatcccatttaacgactggctgacgctgagcgaagagatgcagcgtctggctcggccgcacgcgcagggcgtgctcaaggtgactctcacccgcggcgttgggggaaggggatacagtacggcaggctgcgtgtcgcccactcgcattctcagcttctctccattcccggcgcattatgcgcgctggcgggaggagggcattactctgacccagagtccggtgcccctggggcgcaactcctggcttgccggcctgaagcaccttaatcgccttgagcaggtactgatccgctctcatcttgagcagacggacgccgatgaggcgctggtccttgacagtgacgggtggcttacggaatgctgtgccgcgaatttattctggcgtcagggacgtgatgtatttactccgcgactcgattatgccggggtcaacggcattatgcggcagcgctgtatcgcgcagctggcaccatcgacgtttcgcgttgtcgaagtgacagcgcgtcccgagacgttgcgggaggccgatgaagtgctgatctgcaatgcgctgatgccgctggtgccggttcgccgctgggaggagaccacctggtcctcgcgtgagctttaccattttttagcccctttgtgtgagctgtctggttag

SEQ ID NO: 269979 - DNA, 1023 bp, Klebsiella pneumoniae
atgaagaaaatgttacgttttatcctgttgctggtcgtgctgttgggcatcgccgcggcggcaggcatgtggaaggtacgccagctggcggacagcaagctgctgattaaggaagagaccatctttaccctcgaagccggcaccggccggctggcgctgggccaggatctctatcgcgagaaggtgatcaatcgcccgcgcgttttccagtggctgctgcgggtggaacctgagctgtctcacttcaaggccgggacctatcgcttcacgccgcaaatgacggtgcgcgagatgttgcagctgctggccagcggcaaagaggcgcagtttccgctgcgctttgtcgaaggcatgcgcgtcagcgactacctgcgccagctgcgcgatgccccgtacgtgaagcacacgcttgaagacgatagctacgcgacggtggctaaggcattaggtcttgagcatgccgactgggtagagggctggttctggccggatacctggatgtacaccgccaacaccagcgatatcgccatcctcaagcgcgcgcatcagaaaatggtcgccgaagtggcgaaagtctgggaaggacggatggagaatctgccctatgccgatcagaaccagctgttgaccatggcctcgattattgaaaaagagaccgcggtagcggaagagcgcgaccgcgtcgcgtcggtatttatcaaccgcctgcgcatcggtatgcgcttgcagaccgatccgaccgtaatctacgggatgggcgcaggatatactggtaagttaacgcgtaaggatctcgagacgccgaccgcatacaatacttataccatcagcggtttgccgccaggccctatcgcggtgccgggcgaggcctcgctgaaggcggccgcccatccggcgaaaacgccatatctttatttcgtcgccgacgggaaagggggccatacgtttaccacaaacctggtcagtcataaccgtgcggtgcaggattatctgaaagtacttaaggaaaaaaatgcgcagtaa

SEQ ID NO: 269980 - DNA, 642 bp, Klebsiella pneumoniae; identical to SEQ ID NO: 139063

SEQ ID NO: 269981 - DNA, 1005 bp, Klebsiella pneumoniae
atgaaatggtatccgtggctgcgcccctcgttcgagcaactggtcggtagctatcaggccggacgaggccaccacgccttactgttacagtccctgaacgggatgggcggtgaggcgttgatttacgcgctgtgccgcttcctgatgtgccgccagcccgaaggacataaaagctgcggccactgccatagctgtcagctgatgcaggccggcacgcaccccgattactatgcgctcagccccgagaagggcaagagcgcgctgggtattgacgcggtgcgcgatgtcaatgaaaagctctatgaacatgcgcgccttggtggggcaaaagtggtctggattagcgatgctgccttgctgaccgatgccgccgccaacgcgttgctgaaaacgctggaggagcccccggagaatacctggttcttcctcgcctgcgaggagccggcgcgtctgctgaccactctgcgcagccgctgtcgcctgcatcatctggcgccgccgtctgagccttatgctctggcctggctggagcgtgaggtgagcctgccgcaggagtcattgttgaccgcgttacgcctgtgcgccagcgcgccggctgcggcgctcgaactgttacaggaaccgctgtggacggcgcggcagcagttgtgtcaggcgctggcggctaccctggcgagcggtgactggctggcgctgctgccgatactcaatcatgaacaggcggcggttcgcctgcactggctggcgtcgctgctggtcgatgcgcaaaaacgacagcaggggattaccctggtgagtaaccctgacgtctggccgctgctggagcagctggcgcacagcctgcccgccgcccggctgcaggcgattgcccatgacgtctgtacctgccgcgagcaattgctcaacgttgtcggtgtcaaccgcgaactgctgcttaccgagcgcctgctgcgctgggaacattacctgcaacccgggacggttttacccgtctcccacctctga

SEQ ID NO: 269982 - DNA, 795 bp, Klebsiella pneumoniae
atgtttttagtcgactcccactgccatcttgatggtctggattatcaaactctacacaaaaacgtcgacgacgtgctggcaaaagcggccgcacgcgatgtgaaattttgcctcgccgtcgccacgacgctgcctggctaccgcagtatgcgcgaactggtggggacgcgtgacaacgtcgtcttctcctgtggcgtacacccattaaaccaggacgagccctgggaggtagagactctgcgcgcgctggcagcggaagagggcgtcgtggcgatgggggagaccggtctggattatttttataccccggaaactaaagcccaacagcaaagctcgttccgcgaccacattcgtatcggccgtgagctcaataagccggtgatcgtccatacccgtgacgcgcgtgccgatactctggctattttgcgcgaagaaaaggtgacggattgcggtggcgtactacactgtttcactgaggacagggagacagcgggcaagctgctcgatatggggttctatatctcgttttccggtatcgtcacttttcgtaacgccgagcagctgcgtgatgcggcgcgctacgtgccgctggatcgcctgctggttgaaaccgattcgccgtacctggcgccggtcccccaccgcggcaaagagaaccagccggcgctggtccgtgacgttgccgagtatatggcggtactgaagggggtgtcgcttgagcagctggctcagcagaccaccgacaattttgccaccctgttccacatcgaccccgcccgtttgcaacctgcttga

SEQ ID NO: 269983 - DNA, 1434 bp, Klebsiella pneumoniae
atgtttaagaatgcatttgctaacctgcagaaggtcggtaaatcgctgatgctgccggtatccgtactgcctatcgcaggtatcctgctgggcgtcggttccgctaacttcagctggctgccagccgtggtctcccacgttatggcagaagcaggcggttcagttttcgccaatatgccgctgatcttcgctatcggtgtggccctcggcttcaccaataacgacggtgtatccgcactggctgcagtcgtggcttacggcatcatggtgaaaaccatggcggttgttgcgccgctggtgctgcatttacctgctgacgagattgcggcaaaacaccttgctgataccggcgtgcttggcggtattatctccggtgctatcgccgcctacatgttcaaccgcttctatcgcatcaagctgccagaatatctcggcttctttgcgggcaagcgttttgtgccgattatctctggtctggccgctatcttcaccggcgtgatcctctccttcatttggccgccgatcggctccgcgatccaaaccttctcccagtgggctgcttatcagaacccagtggtggcgtttggtatctacggtttcatcgaacgttgcctggtgccgtttggtctgcatcacatctggaacgttcctttccagatgcagatcggcgaatacaccaacgcggctggtcaggtgttccacggcgatatcccgcgctacatggcaggcgacccgacggcgggcaaactgtctggcggcttcctgttcaaaatgtatggtctgccggcagcggctatcgctatttggcactctgctaaaccggaaaaccgcgccaaagtgggcggtatcatgatctccgccgcgctgacctcgttcctgaccggtatcaccgagccgatcgagttctcgttcatgttcgtggcgccgatcctgtacgttatccatgccattctggcgggcctggcgttcccgatctgtatcctgctgggtatgcgtgacggtacctcgttctctcatggtctgatcgactttatcgtgctgtccggtaacagcagcaaactgtggctgttcccgattgttggtatctgctatgcgatcgtgtactacgtcattttccgtgtgctgattaaagccctggatctgaaaactccgggtcgtgaagacaccaccgaagagagcaaagctggcgccaccagcgagatggctccggctctggtcgccgctttcggcggtaaagagaacatcaccaacctcgacgcatgtattactcgtctgcgtgttagcgtggcggatgtagcgaaagttgaccaggctggcctgaaaaaactgggcgccgctggcgtggtagtggcaggttctggcgtacaggccatcttcggtaccaagtccgataacctgaaaactgaaatggatgagtacatccgtaacagttaa

SEQ ID NO: 269984 - DNA, 357 bp, Klebsiella pneumoniae; identical to SEQ ID NO: 139055

SEQ ID NO: 269985 - DNA, 375 bp, Klebsiella pneumoniae; identical to SEQ ID NO: 210720

SEQ ID NO: 269986 - DNA, 648 bp, Klebsiella pneumoniae
atgatgaaaatgtgtcgctatgcgttaatcacagcactggcgatattcctcgcaggctgtgcggggttgcgggagcagcccgcgccggtagaagaggccaaaccgcagccgcagcagcctgcgcagccgcagcccacggtgccgaccgtaccggcggtgccctctgtcccggcgcagcctgggccgattgagcatcaggatcagcagtcgggtcagccggcgccgcgcgtgcgtcattatgactggaacggcgcggttcagccgctggtggggcagatgctgcaggcgagtggggtcaatgccggcagtattctgctggttgacagcgtgaacaaccgcaccaacggttcgctgaatgctggagaagccaccactgcgctacgtagtgcgctggccggtaacggcaaatttaccctggtatcggcgcagcagctggcggtcgccaagcagcagctgggcctgtcgccgcaggacagccttggcagccgcagcaaagccatgggcatcgcccgcaacgtgggcgcgcagtatgtgctttactccaatgccaccggcaacgtcaacgcgcctgagctgaaaatgcagctcatgctggtgcaaaccggtgagataatctggtcaggtaaaggtgctgttcagcaacaataa

SEQ ID NO: 269987 - DNA, 828 bp, Klebsiella pneumoniae
gtgctgttcagcaacaataagctaacgcgcgacgagctcttgtcgcgcttctttccccattatcatcctgtcgcctcgctgagccagagtggcctcagcggcggcagtgtgattatcagcgacggcgaccggcggcacgtgctgcgtcagccgcacgatccgtctgccggcacttactattttcgccgtcagtatcacgcactccgccgactgcctgccaggctggcaccaaccccgctgttttactcaccctgctggatggtggtggagtattgcgcaggggaggtgaaaagcgagttaccggcctccccgcagctgtcaggcttattgtatgatttgcatcagcaaccgcggtttggctggcgggttagcctcataccactgctggcccagtactggcagaggtgcgatccggcgcggcgcaagccgcgttggctgcgctggcatcagcggctgcgccgccagggcgagccccgtcccctgcggctggcgccgctgcacatggacgtccatgccggcaatattattcataatgagtccggcctgaggctgatcgactgggaatatgccggcgatggcgatatcgcgctggagctggccgcggtgtggatcacgcctggcgagcgccgtcggctggtagaagcgtatgcccggcgggcggccatcgacgcgcagctgctttggcggcaggttgcactctggcgcccgtgggtactgctgctgatggcgggctggtatgaaatgcgctggcggcagagcggggaccggcaatttatcacgctggcagatgaaatatggtgtcagttagacaacgaacgtaaaggataa

SEQ ID NO: 269988 - DNA, 1023 bp, Klebsiella pneumoniae
gtgggcccagtgatgttggatgtcgaagggtatgagctggatgcggaagagcgagagattctggcgcatccgctggtgggagggttgatcctctttacccgaaattatcacgatccggcgcagctgcgcgagctggtgcgccagatccgcgacgcctcccggaaccatctggtggtggcggtcgatcaggaaggggggcgggttcagcgtttccgcgaagggtttacccgtttaccggcggcccagtctttcgccgcgctgctggggatggaagaggggggcaaactggccgccgaagccggctggctgatggccagcgaaatgatcgccatggatatcgatattagttttgcgccagtgctggacgtcggccatatcagcgccgcaatcggcgaacgttcttatcatgaagatccgcagaaagcgctgacgatggcgcgtcacttcattgacgggatgcacgccgcgggcatgaaaaccaccggcaaacacttcccgggtcacggggcggtgactgccgattcgcacaaagagacgccgttcgatccgcgggcggcatcggttatccgcgaccatgatatggcggtgttcaaaagccttatcgccgagcagcgtctggacgccattatgccggcgcatgtgatttacccggagctcgatccgcgtccggccagcggctcggcgtactggctgaaaacggtgctgcgcggcgaactgggctttgacggggtgattttctccgacgatctgtcgatggaaggggcggcgatcatgggcagctatgccgaacgcggtcaggcatcgctcgacgccggttgcgatatgatcctcgtctgcaataatcgtaaaggcgcggtcagtgtgctggataacctgtcgccgatcaaagcagagcgtgttacgaaattgtatcataaaggttccttttcccgtcaggagttaagggattcagcccgttggaaaacggtgagtgcccagctggagcagcttcatgcgcgctggcaagaggcgaagtccgcgtaa

SEQ ID NO: 269989 - DNA, 543 bp, Klebsiella pneumoniae; identical to SEQ ID NO: 243969

SEQ ID NO: 269990 - DNA, 1305 bp, Klebsiella pneumoniae
atgactacgccattgaaaaaaatcgtaattgtgggtggcggcgctggcggactggaactggcaactcagctggggagaaagttagggcgccataagaaagcgaaaatcactctggtggaccgtaaccacagccatctgtggaagccgctgctgcacgaagtggccaccggttctctggatgaaggcgttgatgcgctgagctatctggcccatgcccgcaaccacggtttccagttccagctgggctcggtggttgatatcaaccgcgaagggaaaaccatcaccctcggcgagctgcgcaatgaaaaaggcgagctgctggtggctgagcgtaaactgccgtacgacacgctggtcatggcgttgggcagtacctcgaatgactttaatacccctggcgtaaaagagaactgcattttcctcgacaacccgcaccaggcgcgtcgcttccatcaggaaatgctcaacctgttccttaaatactctgctaacctcggcgctaacggtaaagtaaatatcgccatcgtcggcggcggcgccaccggcgtggagctctccgctgagttgcacaatgcggtgaaacagctgcacagctacggctacaaagggctgaccaacgaagcgctgaacgtcacgctggtcgaggcgggcgagcgcattctgcctgcgctgccgccgcgcatttccggggcagcgcataatgagctgactaagctgggcgtacgggttctgacgcagaccatggtcaccagcgcggatgcgggcggcctgcacactaaagatggcgaatatattgaggcggatctaatggtctgggcggcggggatcaaagcgccagatttcatgaaagagatcggcggcctcgaaaccaaccgtatcaatcagctggtggtcgagccgacgctgcagactacccgcgatgcggatattttcgccatcggcgactgcgcctcctgcgcccgtccggaaggcggctttgtgcctccgcgggcccaggcggcgcaccagatggctacctgcgcgctgaacaacatcctggcgcagatgaaaggcaaaccgctgaaggcatacacctataaagaccatggctcgctggtgtcgctgtcaaattactccaccgtcggcagcctgatgggtaacctgatgcgcggttcgatgatggtggaagggcgcattgcgcgcttcgtgtacatctccctgtaccgtatgcaccagattgctctgcatggttacttcaagaccggcctgatgatgctggtcgggcgcatcaaccgcatcattcgcccgcgcctgaagctgcactaa

SEQ ID NO: 269991 - DNA, 540 bp, Klebsiella pneumoniae
gtgaataaatctatgttggcgggtatagggataggcgtggctgccgcgctgggcgttgcagctgtcgctggtctcaacgtgttggatcgcggcccgcagtatgcgcaagtggtctccagtacaccgattaaagaaaccgtgaaaacgccgcgtcaggaatgccgcaatgtcacggtgactcatcgtcgtccggtacaggatgaaaaccgcatcgccggttcggtgctgggcgcggtggcgggcggggtgattggccaccagtttggcggcggtcacggacgcagcgtggcgacggttgtaggtgcgctgggcggcggctatgcaggcaaccagatccagggcgcgatgcaggacaacgatacctacaccaccacccagcagcgctgcaaaacggtgtatgacaaatccgataaaatgctcggctacgatgtgacctataagataggcgatcagcaggggaaaatccgcatggatcacgatcccggcagccagatcccgctggacaacaacggccagctggtcctgaacaacaaaatctaa

SEQ ID NO: 269992 - DNA, 2190 bp, Klebsiella pneumoniae
atgaaaaagcgcctctgggtgctccaccctctgctgctggccagcacgctgcctgcgctggcggctcagtctgatgaagacagcatcatcgttagcgcaaaccgcacccatcgcaccgtggccgaaatggcccaaaccacctgggtcattgagggccaggagattgagcagcaggtccagggcgggaaagagttcaaagacgtgctggcgcagctgatccccggcatcgacgtcagcagccaggggcggaccaactatgggatgaacatgcgcgggcgcgcaatcgtcgtgctgattgacggcgtccggctcaactcctcacgcaccgacagccgccagctcgacgccatcgatccattcaacatcgaacatatcgaagtgatctccggagcgacctcgctgtacggcgggggcagtaccggcgggcttatcaacatcgttaccaaaaaggggcagcaggatcgtcaggtcgatcttgaggtgggcagcaagagcggttttgcgaacagcaacgatcatgatgagcgcgtcgcggcggccgtcagcggcggaacagaccacgcatccggccgcttgtcggtagcctatcagcgtttcggcggctggtacgacggcaataacgatgcgctgatcctcgataatacccaaacggggctccagcactctgaccgcctcgacgtgatggggacggggacgattgagatcgatgataaccgccagctgcagctggtcacccagtattataaaagccagggcgatgatgactacggtctgtggctcgggaagaacatgtccgcggtcaccagcggcggcaaagcgtataccaccgacgggctcaattccgaccgtatccccggcaccgaacgccatctgatcagcctccagtactccgatgccgactttttcggccagaatctggtgagccaggtgtactatcgcgatgagtccctcaccttctatccgttcccgacgctcacgaaaggtcaggtcagtagcttctcctcgtcgcagcaggataccgatcagtatggggccaagctgaccctcaacagtcaaccgctggcggggtgggatctcacctggggtctcgacgccgatcatgagacctttaatgccaaccagatgttcttcgatctgccacaatcgatggcctccggcgggttgcacaacgaatcgatctacacaaccggccgctacccgggatacagtatttccaatgtcgcgccattcctgcagtccagctacgatctgaacgatatctttaccgtcagcggcggggtacgctaccagtggaccgaaaaccgggtcgacgactttgtcggctacgcccagcagcaggatatcgccaacggcaaagcgcgctccgccgacgccatcaaaggcggcaaaaccgattatgacaatttcctgtttaacgccgggatcgtggcccacctgaccgagcgtcaacaaacctggtttaacttctcgcagggtgtcgagctaccggacccaggtaaatactatggcatcggtaaatatggcgctgcggtgaatggtcatctcccgctgatctccagcgtcaacgtcgatgactcgccgctgcaggggatcaaagttaactcgtatgagctgggctggcgctacaccggcgataacctgcgcacccagctggcggcgtactactcgacctcggataagaccattgtcgtcaaccgcaccgacatgaccatcgacgttcagtccgacaaacggcgtatttacggcgttgagggggcggtcgactactttattccggatagcgactggagcgtcggcggtaacttcaacgtgctgaaatcccaggtgcagaccgacggccgctggcaaaaatgggacgttaccctcgcctcgccgtctaaagccaccgcctgggtgggctgggcgccggatccgtggagcctgcgcgtgcagagtcagcaggtatttgacctcagcgatgccgccggcaacaagctggaaggctataacaccgtcgattttatcggtagttacgcgctgccggtggggaaactgaccttcagtatcgaaaacctgcttaacgaagactatgtcactatctggggccagcgcgcgccgctgctctacagcccaacctacggcagttcatcgctgtatgagtacaaaggtcgtggccgcacctttggtctgaactacgccttaaccttctga

SEQ ID NO: 269993 - DNA, 636 bp, Klebsiella pneumoniae
atgacaactgacgttcaaagttgcgccaaaaaaagccgtggccgaccgaaggtgttcgacagggatgcggcgctggacaaagccatgacactcttctggcagcacggctatgaggcgacctcgctcgccgatctggtcgaggcgacaggagcaaaagcccccaccctgtatgcggaatttgtgaataaagaaggcctattccgcgcagtgttggatcgttacatttcgcgctttgccgcgaagcacgaagccgtgctgtttgccgagggaaaatccgtcgatcgcgcgttgcgtgactacttcacggcggtcgccacctgctttaccagcaaagagacgccggccggctgctttatcatcaatacctccgccgcgctggccgcctcctcgacggatatcgccaataccatcaaatcccgccatgcgatgcaggagcaggcgctaacccagtttctgcagcagcggcaggcgcagggcgaactgcccgcgggccgcgatgtcgcgcagctggcgcaatttcttaactgcgttctgcaggggatgtcgattagcgcccgggaaggcgcggatttcgacaagctgatgcaaatcaccgataccactctccgtctctggccgcaggtcctcgagtcctga

SEQ ID NO: 269994 - DNA, 258 bp, Klebsiella pneumoniae
atgaaaaccgttaatactctggcttttgccgccgttttaagttcccttactttcgccagctttgccgctgtagaggtgcagtccacccctgcaggacagcataaagtaggcaccatctctgcttctgccgggactaacctgggctcgctggaagaccagctggcgcagaaagcggatgagatgggcgccacttcataccgtattacttcggtaaccggtccgaatacccttcacggtaccgccgttatctacaagtaa

SEQ ID NO: 269995 - DNA, 960 bp, Klebsiella pneumoniae
atgagaaaccgtttccccgtgacgctttggctgacgctagtcgcgttagtcgccgcgctggccctgcccgcgcgcgctaacacctggccccttcccccgccgggcagccggctggtgggtcagaatcagttccatgtggtacaggatgacggcggttcgctggaagcgattgccaagaagtacaatgtcggcttcctggccctgctgcaggccaatcccggggttgacccctatgttccgcgcgccggcagcgtgctgaccatccccctgcagacgctgctgcccgatgcgccgcgcgaagggctggtgattaacctcgccgaactgcgcctctactattacccgccgggcaagaatgaagtgaccgtctacccaatcggcatcggccagctgggtgggaccaccatcacaccgacgatggtcacaaccgtatccgacaaacgggccaatccgacctggacacctaccgccaacattcgcgcgcgctacaaggctatggggattgagctgccggcggtagtgcctgctggtcctgacaatccgatgggccatcacgccatccgcctcgccgcctatggcggagtctatctcctgcacggcaccaatgccgatttcggcatcggtatgcgcgtcagttccggctgcattcgtctgcgcgataacgatatcaaggcgctgtacaacactatctcgccgggcacgaaggtgaacattatcaacacgccgatcaaggcgtcggttgagccggatggccgccgtctggttgaggtccatcagccgctgtctgagcatatcgatgacgacccgcagaccctgcccattacgcttaatgcggccatgactgcgttcaaacaggcgccgcagaccgacgggacggtgatggagcgcgcgatgaattaccgctcgggcatgccgattgacgtcacccgtcatgctgagcctggaccgcagtcgctgtag

SEQ ID NO: 269996 - DNA, 3447 bp, Klebsiella pneumoniae
atgcctgaacaatatcgatactcattgccggtcaaagccggcgatcagcgccagcttggcgagttgaccggcgcagcctgcgccaccctggtggcggagatggccgaacgccacaacggcccggtggtgctggtggcgcctgacatgcaaaacgcgctgcgtctgaacgacgagatcaggcagtttaccgacagcatggtaatggggctggcggactgggaaacgctcccttacgacagcttctcgccgcatcaggacatcatctcctcccgtcttgccaccctttaccagttacccaccatgcagcgcggcgtgctgatcgtcccggtcagcaccctgatgcagcgcgtctgtccgcacagcttccttcacggccacgcgctggtgatgaaaaagggccagcgcctgtcgcgcgatgcgctgcgcgatcagctggagggggccggttaccgccatgtcgatcaggtgatggagcacggcgaatatgctacccgcggcgcgctgctcgacctgttcccgatgggtagcgatcagccctaccgccttgatttctttgacgatgaaatcgacagcctgcgcctgttcgacgttgacagccagcgcacgctggaggaagtggcggccattaacctgctgccggcgcacgagttccccaccgaccagaccgctattgagctgttccgcagccagtggcgcgaccgctttgaggtgaagcgcgatgccgagcacatctatcagcaggtcagtaaagggacgctacctgccggtatcgaatactggcaaccgctgttcttcagcgagccgctgccgccgttattcagctatttcccggccagcacgctgatcgtcaacaccggcgatctcgaggccagcgcggagcgattccagaatgaagcccgcgcccgctttgaaaaccgcggcgtcgacccgatgcgcccgctcctgccgcctgagctgctgtggctgcgcagcgatgagctattcagcgaactgaaaaaatggccgcgcgtgcagctgaaaaccgaacgtctggcggacaaagcggcgaatactaatctgggctaccagacgctgccggacctcgccgtccaggcgcagaacaaagcgccgctggataatctgcgccgcttcctcgagtcctttaccggtccggtgatcttctcggtggaaagcgaaggccgccgtgaagcgctgagcgaaatgctggcgcggattaaagttgcgccaaaacatgtgctgcgtctggaggaagccaccggcaacggccgctatctgatgattggcgccgccgagcacgggtttatcgacagccagcgcggcctggcgctgatttgcgagagcgacctgctcggcgagcgggtggcgcgccgtcgtcaggattcgcgacgcaccattaaccctgacactctgattcgcaacctcgccgaactgcatatcggccagccggtcgttcacctggaacacggcgtgggccgctacgcgggcatgactaccctggaagccggcggcatcaccggcgaatatctgatgctgacctacgccaacgatgccaagctatacgttccggtatcgtccctgcatcttatcagccgctacgccggcggggcggaagaaaacgcccccctgcacaagctgggcggcgatgcctggacccgggcgcgacaaaaagcggctgagaaagtacgcgacgtggcggccgagctgctggatatctacgcccagcgcgcggcgaaggcgggttttgcctttaaacacgaccgcgaacagtatcagctgttctgcgacggtttcccatttgaaaccacgccggatcaggcgcaggcgatcaacgccgtcctcagcgatatgtgccagccgctggccatggaccgcctggtgtgcggcgatgtgggcttcggcaagaccgaagtggccatgcgcgccgccttcctcgccgtggagaaccacaagcaggtggcggtgctggtgccgaccaccctgctggctcagcagcactatgacaatttccgcgatcgtttcgccaactggccggtacgcatcgaaatgctctcccgcttccgcagcgctaaagagcaggcgcagatcctcgagcaggccgcggaaggcaaaatcgatatcttgatcggcacccacaagctgctgcagagcgaggtgaagctgcgcgatctcgggctgctgatcgtcgacgaagagcaccggtttggcgtgcggcataaagagcgtatcaaagcgatgcgcgccgatgtcgatatcctgaccctcaccgccacgccgatcccgcggacgctgaacatggcgatgagcgggatgcgcgatctgtcgatcatcgccacgccgccggcgcgccgcctggcggtgaagaccttcgttcgcgaatatgacgccctggtggtgcgcgaggcgatcctgcgcgaaacgctgcgcggcggccaggtctactatctgtttaatgacgttgagaacatccagaaagccgccgacaagctggcggagctggtgccggaggcgcggatcgccatcggtcacggtcagatgagggagcgcgaactggagcgggtgatgaatgacttccatcatcaacgcttcaatgtgctggtgtgcaccaccatcatcgaaaccgggatcgacattcccaccgccaacaccatcatcatcgaacgcgccgaccattttggcctcgcccagctgcaccagctgcgcggccgcgttggccgttcgcatcaccaggcctatgcctggctgctgacgccgcatccgaaagcgatgaccaccgatgcgcaaaagcgcctcgaggccattgcgtcgctggaagatctcggcgccggctttgcgctggcaacccacgatctggagattcgcggggccggggaactgcttggggaagatcagagcggtcagatggaaaccatcggtttctccctgtatatggagctgctggagaacgcagtcgatgcgctgaaagccgggcgtgaaccctcgctggaagatctcaccagtcagcagacggaggttgaactgcgcatgccttccctgctgcctgatgatttcatccctgacgtcaatacgcgcctgtcattctataagcgcattgccagcgccaaaaacgaacaggatctggaagagatcaaagtcgagctgatcgatcgttttggccgcctgcccgatgccgcccgcaacctgctggatatcgcccgtctgcgtcagcaggcgcaaaagttagggatccgcaagctggaaagcaacgaaaaaggcggcgtgatcgaatttaacgagaaaaacaacgtcaatccggtgtggttgatcggcctgctgcagaagcagccccagcacttccgcctggacggtcccacgcgcctgaagttcatgcaggacctggaggagcgtaaaacgcggatggactgggttcgccagtttatgcgccaactggaagagaacgccgtcgcctga

SEQ ID NO: 269997 - DNA, 1200 bp, Klebsiella pneumoniae
atgtaccaacctgccgcactctttatcggcctacgctatatgcgcgggcgcgcagccgaccgcttcggtcgtttcgtctcctggctctcaactatcggtattacgcttggcgtaatggcgctggtgacagtcctgtcggtgatgaacggctttgaacgcgagctgcaaaacaacatcctggggctgatgccacaggccattcttagcgccaaacaggggtcggtgaaccctcagcaactgccggagcgcgaagcgaaacttaatggggtaacccgcgtagcgccgatcaccaccggcgacgtggtgctgcagagcgcgcgcagcgtggcggtcggggttatgctgggcattgatccggcgcagaacgatcccctgactccatacctggtgaacgtcaaacagagcgatctgcaggcgggcaaatataacgttattctcggcgagcagctggcgggccagctgggggttaatcgcggcgataaaattcgcgtgatggttccttccgcaagtcagtttacgccgatgggccgcgtgccgagccagcgtctgttcacggtcatcggcaccttcgccgccaacagcgaagtcgatggctatcagatgctgaccaacatcgacgacgcctcccgtctgatgcgctatccgctggggaatatcaccggctggcgcctgtggctggataaaccgctgcaggtcgacaccctgagtcagcagacgctgccgccgggaactcagtggcaggactggcgcgagcgcaagggcgaactgttccaggcggtgcgcatggagaaaaatatgatgggcctgctgctgagcctgatcgtcgccgtcgcggccttcaacattattacctcgctggggatgatggtgatggagaagcagggcgaagtggcgatcctccagacccaggggctgacgccgcggcagattatggccgtctttatggtgcagggggccagcgccgggatcgtcggcgcgctgctgggagcggtgcttggcgccctgctggccagccagctgaataatttaatgccgatcatcggcgccttccttgacggcgcggcgctgccggtggcgattgagccgctgcaggtcattgttatcgccctggtggcgatggtgctggccctgttgtctacgttgtatccttcctggcgcgctgccgccacccaacccgctgaggctttacgttatgaataa

SEQ ID NO: 269998 - DNA, 702 bp, Klebsiella pneumoniae
atgaataagatcctgctgcaatgcgacaacctgtgcaaacgctatcaggaaggcaatgtgcaaaccgatgtcctgcacaatgtcagcttcagcattggtgaaggcgagatgatggctatcgtcggcacctccggctctggcaaaagtacgctgctgcatctgctcggcggcctggatacgcccacctctggcgacgtgattttctccggtcagccgatgagcaagctctccaccgccgcgcgcgccgacctgcgtaaccgcgagctgggctttatctatcagttccaccatctgctgccggactttagcgcactggaaaacgtggcgatgccgctgctgattggcaaaaagaagccggcggatattgaacgccaggcgaaagcgatgctgcaggcggtcgggcttgaacaccgcagccatcaccgtccgtcggagctctccggcggcgagcgccagcgggtggcgattgcccgcgcgctggtgaataaaccgcggctggtgctggcggatgagccaaccggtaacctcgacgctcgcaacgccgatagcatcttccagctgctgggcgaactgaacgtcgcgcagcgcaccgcgtttctggtggtgacccacgacctgcagctggcgaagcgcatgagccgccagctggagatgcgcgatggccgtctgaccgccgacctgaccctaatgggggccgagtaa

SEQ ID NO: 269999 - DNA, 1245 bp, Klebsiella pneumoniae
atggcgtctccgttatcgttactgattgcattgcgtttcagccgcggccggcggcgcggcggcatggtgtcgctgatctcggtgatctccaccatcggcattgcgctgggggtggcggtgctgatcgtcggcctcagcgcgatgaacggctttgagcgcgagctgaataaccgcgtgctggcggtggtaccgcacggcgaaatcgaacccgtgaatcagccgtggaataactggcaggaagcgctggcgaaggtgcagaaggtgaaggggattgtcgcggcagcaccctatattaacttcaccggcctggtggagagcggcagcaatatgcgcgccatccaggtgaaaggcgtcgacccgcagcaggagagccagctcagcgcgctgcctacctttgtgcagaataacgcgtgggccggattcaaggctggcgaacagcaggtgattctgggtaaaggagtcgccgatgccctgcacgtgaagcagggggactgggtgtcgatcatgatccctaatgccgacgccgaccatcagctgctgcagccaaaacgcgtcaggctgcatgtgaccggaattttacagctgagcggccagctcgatcatagttttgccatgatcccgatgcaggatgcgcagcagtacttggagatgggcggcagcgtgaccggcatcgccatcaaggtcaccgacgttttccatgctaacaagctggtacgcgacgccggcgaggtgaccaacagctacgtctacatcaagagctggatcggcacctatggctatatgtatcgcgacatccagatgatccgcgccattatgtacctggcgatggtgctggtgatcggcgtggcctgctttaacatcgtctcgacgctggtgatggcggtcaaagacaaaagcggcgatattgcggtgctgcgcacgcttggcgcaaaagacggcttaattcgcgcgattttcgtgtggtatggtttattagccggatcggtaggcagcctgtttggggtggtgatcggcgtgatctgcgcgttgaacctgacgtcgatcatcaacggcatcgaatacctgattgggcataaattcctctccggcgacatctattttattgacttcctgccgtcagaattgcactggctggacgtcctttatgtgctggtgacagcactgttgctgagtttgctggccagctggtatcccgcccgccgcgccagccgcatcgacccggcgagggtgctgagtggccagtaa

SEQ ID NO: 270000 - DNA, 912 bp, Klebsiella pneumoniae
atgtattatggatttgacattggcggcagcaaaatagcgctgggcgtatttaatcaggagcggcgactgcagtgggaaaaacgcgtcgccacgccgaaaagtagttatgaggattttctccaggcggtagaggcgctggtccgcgaggccgatgagcgcttcgaccagcagggttcggtcgggatcggtattccgggaatgccggaaacggcggacggcacgctgtatgccgctaacgtgccagccgccagcggccggccgctgcgcgctgacctcagcgcgcggttggggcgcgatgtgcgtctcgataatgacgccaactgtttcgcgctgtcggaagcgtgggacgatgagtttacgcaatacccgctggtgatgggattgatcctcggcaccggcgtgggcggcggcttggtgttgaacggtaaatcgattaccggacatagctatatcaccggcgagttcggtcatattcgcctgccggtggatgccctggaggtggttgggcgcgattttccgctgctgcgctgcggctgcggccagctgggctgtattgaaaattatctctccggtcgcggtttcgcctggctgtacgaacatttttatcagcaaccgctctcctcgccggagattgtggcgcagtggcagcaacacgatccgcgcgcgcaggcgcacgttgagcgctatctcgatctgctggcggtgtgtctggggaatatactgaccattgtcgacccggatttgctggtgctcggcggtggattatctaactttacggccattagcgaagggctggcgcaacgattgccgcgccatcttctgccggtcgccagggttccgcgcattgagcgcgcgcgccacggcgatgccgggggaatgcgcggtgcggccttccttcacctgacccattaa

SEQ ID NO: 270001 - DNA, 831 bp, Klebsiella pneumoniae; identical to SEQ ID NO: 138298

SEQ ID NO: 270002 - DNA, 963 bp, Klebsiella pneumoniae; identical to SEQ ID NO: 138296

SEQ ID NO: 270003 - DNA, 798 bp, Klebsiella pneumoniae
atgatgaccccgatatggttaggaaccagctggaaaatgaacaagccgctgtcccaggccatggcctggtgcgaaacgctggcagcgcggatgccggagggctgtcaccccgctattcagcccttcgtcattccccccttcaccgcgatccaacccgtcagccattttctgcaaacgcatcagttaccgcttctgaccggcgcgcagaatatgcatgaagcggatcagggcgcctggaccggggaaatctcggcggccatgttggcagaaaccggcgccacgcttgttgagctgggacattcagaacgacgtgccgcctttaatgaaagcgatgccgcgattaatcgaaaagtgcatagcgccttaggtcatggcctgcgcccgctgatctgtattggcgatagcgccgaggagaaacgctggcaggtgtcgcgtgaaagcgtggtgcggcagatgaagatcgccctgtatggcctgagccaccagcaggcgctgcggaccctgattgcgtatgaaccggtgtgggccattggcgaacatggtacgcccgcctcaccgcaggaggcgggtgtcattcatcaggcgctacgtcaggcgctttgcgagctgtttggtcacgagacgggaacccgtatcccgctgctctatggcggcagcgtaacgctgcaaaacgcggtggaattgctgcgccagcaggagatcaatgggttgtttatcggccgcgcggcctgggacgcgcaaggctattgcgacattgttcaacgcgttacacaggaatttattttgcaggcgcagtaa

SEQ ID NO: 270004 - DNA, 1008 bp, Klebsiella pneumoniae; identical to SEQ ID NO: 138294

SEQ ID NO: 270005 - DNA, 507 bp, Klebsiella pneumoniae
atgaaaaaggttcgtttgattaatgcggcgttggctgctgttttacttacatcttttgctgcacacgctcaatggctcaccaaagtggatgacgacctgtttaccggagggaaaaaagctttgatgattggtgacttatcatcatcaaactctggtctgatttttgactgcacgaaaaataaattatctgttgcgtatgtagaaactgacaaatcatctgattcagtccctgctatcgcaatggatttgattatcaaagtcgatggcaacccagctaataagcttgaagcgtcactatcacgccgaaatgcccaagccattgaagtaagtactgatgacgcagagaaaataactgcagtgcttaagcagttacaaaacgccaagtctaaagttttggttggtatacagactcaagacggcggtaatcaatcctcgttctcgggcaatgtatccggctctaccgctgcgacaaatagctttataaaagcctgtgagatatctctttaa

SEQ ID NO: 270006 - DNA, 966 bp, Klebsiella pneumoniae; identical to SEQ ID NO: 207018

SEQ ID NO: 270007 - DNA, 567 bp, Klebsiella pneumoniae; identical to SEQ ID NO: 247093

SEQ ID NO: 270008 - DNA, 492 bp, Klebsiella pneumoniae
atgaaagtcactgaacccagactgaatacgctgatcgataacctgaacaccctgatttgtgaggacagcctgctcacgcgcaaggagcgtgaaacgctggtactggccgtcgccgccatcggcgccatgaaagcgcgcgtcggcatgaaaaagcccgcgataccggcatcgtcgaaaccgaaggaagagaaacaggcacctgtacctgacccacgctttccgaatgcccgccaggcctgggtggctgaagaggaaactttattactggatgcgctcgatggcgtcccgaatgatgatattggtaagcatctgttctggctttccgagaaactgggcagaacgcctttcagtgttgctttccagatcgcggcaatcagggagctgcaggacggctgggaggagcagttcagggagatttcggataacattcgcttgtccggcctgagcatcagtgattatcttaagcagaacggcacggacctgaacgcctga

SEQ ID NO: 270009 - DNA, 228 bp, Klebsiella pneumoniae; identical to SEQ ID NO: 197522

SEQ ID NO: 270010 - DNA, 1098 bp, Klebsiella pneumoniae
atggcaatatttcatttaagctttaaagttttgacacgcacaacaaaaacaggaaaaagcaaaagctcgctttatcttgctgcttataattcaaggtcaaaactaaaagacgagttaacaggtttaacttttgattacaccaaaaaaaacgatttatataaaagtggtattcttttaccagaagaagcacccgaaaaattctataaccgggcgacattgtggggggaggtcgagaaatcagaaaaacgaaaggacagtcagatctgtcgccacgccatcatcgccctccccgccgaattaaacggcgaacaaaacgaggagctattaaaaaaatatttaaaaaataattttgtaaaaaggggcatgtgcgccgattacgccatacacgatataaacaaaaaaccgcacgcgcatataatgctaactatgcggaagtgtgaaaatggcggatttagtaaaaaaaaggcgcgggagtggaacgatccaaaattggcagaagtatggcgtagacagtggtcagtgttggttaataaaacattaaaagaaaacgggcacaataacacgattacacatttaagctttttacggcaaaaagagttagcaatagcaaaagcacgcgaagcgctggaaaataacgacattaaaaaagcggaagaactaacaaccttagctaaacatttagcaactaaaaagcccgttaaacgcaagccgacagttaaatatttaaaagataaagcacgtaaaaaaaacaaaaaccccgaattgcgccagaggttaaaacaacaacaagaacaaaaagaagagaatataaaaaataataaaagcgtaggattgttttttagaaatattctattaaaactaaaaggagggagtgacaaaaaaaacaaaacggaaaagatgcaaaaaatgacagaagccgattttttaaaaaatatgaaaacagacgaaaaagaggccgaagatttagaattaaataaatatatagataaggagttagagaatgagcttaataagaaaaatgacattacacacacacccaagagggatcgaattggaaacaggaagaaaaaggataataagccacagggacgaaaataa

SEQ ID NO: 270011 - DNA, 237 bp, Klebsiella pneumoniae
atgacggcgggggcaacctttgcgaagcattgggaagccttgcgccgtgcggtgcgcgttagcgttccgcttgtcgcttgcgacaaagggcgaagccctaaagcctcgcagagaccgcacgttccccgaaggggaatgtataagcgggcatttatcactaacgttctaaatgtggcttactttgtgcgcagctaccgccttttttattatttaataaaaccttttaaaaaaaagtaa

SEQ ID NO: 270012 - DNA, 369 bp, Klebsiella pneumoniae
atggaaaaaacagaaattgatatattggcagaagaattgaaagaattttattttgatgcgctgggtgaaaataacggtcgtgtttttgcttatcgagcaacctataaagtgaaagggtgggagcaaatagaacaaaaagcttttagaaatgcgttttttaaatttttcaaaacagatgcgcaattaaggaaaaccaaagatataaaaagcgattatttccaactggaaggcataaaggataaatttaatagatattattttccttcattttgcgttgataaaaaagaatatgaagcaagaggtgctgaatatttaaaagaggttgaggaatactttaaaaaaataataactttggcggctataaaatga

SEQ ID NO: 270013 - DNA, 1176 bp, Klebsiella pneumoniae
atgataggacttatttttttattagcagtatttttatctgttgttatctcgttagtgattataaagtatatttctaatgaattaggtatagaactaatcaattcgggccgctttacagcaattgatgggttaagagcatatttatcattattcgttttttttcatcacttttttattttttataaatggaaagaatctggtaaatgggaaaagccagaaattttatttattgatgatttagggcaggtttccgtcgctatttttttcataattactggctttttgtttataggaaagatcacttcaggtagacattttgattttttttctgtctatatttctagattttttagaataatgcccctttaccttcttgttgttatgattactttgttttattcatttttgcttactggtctttctattcaaataccgcatagtgagcttttaaaagatatcgttaggtggttgctttttgttggtgattctgtaaatggctatacagatgcgaagagaataacggcaggtgtgacatggacgttaaagtatgagtggctattttatttttctttgccactcctgtttcttattttaaaaaataaagttgctacaacattaattataatcgtctgtatgctccttcttattaataatttcaagttccattctattattgactctagatattttatcttctttatgattggtggcattagtaactatatctgtaagttacttgagaataatataaaactcatagagattcttcgcaacagattaatttccataattttaatggtcttgttaatctatgtctttttctcaggggtaggtatatttaatatttttagcataatcattttgctgctattctttattgcaattgtttgtggaaataatctttttggtgctttaactttaaaaggagcaaggttgcttggtgaaataagttatagtatttatttaattcacggttgtgttatcttttcaatttttatattaatgaataaattctctggcttatctttgtctgaatatttaattcttatgccttttgtcaccattgctgtggtatttatttcttcactcacatatagatttatagaggcaccctgtataaatataggtaaaaaaatccaaaatatatataggttcaatggaaaaaaagcattgtaa

SEQ ID NO: 270014 - DNA, 609 bp, Klebsiella pneumoniae; identical to SEQ ID NO: 90098

SEQ ID NO: 270015 - DNA, 183 bp, Klebsiella pneumoniae; identical to SEQ ID NO: 123813

SEQ ID NO: 270016 - DNA, 1242 bp, Klebsiella pneumoniae
atgagcagctcacttcctgacgatatcaatgcactgaaacgtctccttgccgaacaggaggcgctgaaccgtgccctgctggaaaagctgaacgagcgtgaacgcgaaatagaccatctgcaggcacagttggataagctgcgccggatgaacttcggcagccgctccgaaaaagtctcccgtcgtatcgcacagatggaagctgacctgaaggcacttcagaaagaaagtgatacccttaccggtcgggttgacgacccggccgtgcagcgcccgctgcgtcaaacccgcacccgcaaaccgttccccgaatcactcccctgcgatgaaaaacgactactgccggcagcgtcatgctgcccggaatgtggaggctcgctgagctatctgggtgaggatgcagccgaacagctggagctgatgcgcaacgccttccgggttatccggactgtacgtgaaaagcatgcctgtactcagtgcgatgccatcgtgcaggcccccgcgccttcacggcccatcgagcggggtatcgcaggaccggggctgctggcccgcgtgctgatctcaaagtatgcagagcacaccccgctgtaccgccagtctgaaatatacggccgccagggcgtggagctggatgcatacgccgggttcaacgagctgtaccgggatggtcggataacggaagccgcctgttgggctcacgcccgccgtaaaatccacgatgtgcacgttcgcaccccgtcagccctgacggaggaagcgctgaaacggatcggcgaactgtacgccatcgaggcagagataaggggaatgacggcggagcagcgccttgccgaacgtcagttgaaaacgaaaccgctgctgaaatccctggaaagctggctgcgtgaaaagatgaaaaccctgtcgcgacactcagaactggcgaaagcgatcgcatacgccctgaaccagtggccggcgctgacgtactatgcagatgatggctgggctgaggcggacaataacatcgctgaaaatgcgctgcggatggtcagtctgggccgcaaaaactacctgttcttcggttcggatcatggaggagagcggggagcgctgctgtacaacctgatcgggacgtgcaaactgaacggagtggagccagaaagctacctccgctatgtccttgacgtcatagccgactggccgataaaccgggtcggcgaactgctcccctggcgcgtagcactgccgactgaataa

SEQ ID NO: 270017 - DNA, 555 bp, Klebsiella pneumoniae
atgaatgggaattattgtgctttttatgttgcagagcctttcaatgaaggtgctttgggtgctcatgcaacgaaagactttgtctactataacactttgagaatgtggaagggggctgattccggattcccttttagtaactcgcacgacactacatataatgttcgtgacggcagtaactgggaacaaacgttaatgcctcgcttgagacagcgtttacggaattctaaaaatataattttattcctaagtgaaagaactgtaaactctcgagccttaagagaagagattgattatggtattaattcattagggttgcctgtaattgttatttatccagactatgacacaaaagaaagcttactaacaaataacgtgcttaagcaatctgttaagaacttatgggctaaaatccctacttttagagattccatgcacttagttccgactctgcacatccctatgaataaagcacttattagaaaatcgctcgcagatagtgattttatggtgagaaccaaaacttctccggatatatatagatactctgcataa

SEQ ID NO: 270018 - DNA, 837 bp, Klebsiella pneumoniae
atggctaaggttagtcttttcgataaacaagttttcaacgagtttaagggatatgcatctctactatttggttttattggtgccgtagttatttttgttgatattcctgcaaagcaaaaaattgcagcgggcatagcttgtatcctagtgcttttcgtcggctatctttggttgtggttcagagcaaatggcttgagggaaatcaatctgactatagaggaaagtacagttgttattaaaacaggggatatctttaagcaggaaggtttgaaagttatagcttttaatgaatactttgacactcaagttgatgaacgaatcattgctcaagccagccttaatggtaaattcattagagaatactgtgattgctctgttagtgaattagatgcatatatagaaaattatcgatttgattcggatgaaataaaagaaatcaatgcggatcggcctgaaggtaaaaaacaaaaatttgaaattggtaccatatgcgtctaccatgattacatacttaccgcgctatctaaattcaacagacacaatgaagcgtatctcaccatgcccgagtatcttgggtttttaataaatttttgggacaaagtgaatcgtgtttacgctcagaaaagcgtttctgtaccaatctttgggtccgggctcaccagaattaaaggtcataaaattatcgatgagcaagatctcctaaagatcatgctttggacttttaggataagcgagatgcgatttaaacaccctgcgaaattgacaataatgatccatgaagggaagattgataaagtcaatcttttagaattaaagactgcaagaaatggcttgtag

SEQ ID NO: 270019 - DNA, 2910 bp, Klebsiella pneumoniae
atgacacttgtcaagtcacctaaaaaacttatcgaagtagcgctaccattagacgatatcaatgccgcttgcgcccatgaaaagatgcctggtattggcccccatcccagaggtattcacttatggtgggctcgtcgcccgttagctgctgcaagggctgtcatctttgctcagatggtaaatgaccctggttaccagcaaggtgaaggctttcgatatggtgttaacaagcaagaagccgccaaaaaacgtgaatatttattcaatatcatacgtaaactggttaagtgggaaaacattaataatgaagaagtgttaagcgaagctcgcggagccatttgggaaagttggcgtgatatttgcttactaaacaaagatcatccacaagctaaagagctatttaacccagaaaaacttccgggttttcatgacccatttgcaggcggcggggccttgccattagaagctcagcgattaggcttagaatcctatgcatctgacttaaacccagttgcagtaacgattaataaggcgatgattgaaattccacctaagtttgtcaatacagctccggttggacctacacctattagtagtgagggtaacaaaaaaaatacaaatgctctgagtgtatttgaagagtggtatggcacagaagggttggcagaagacgtgcgccgttacggtgcgtgggttcgaaatgaagcacagaaacgaatcggccatctttatcctaaggtattaataacaaaggaaatggttgccagccgtcccgacctacaaccttatttggatgaagagctcacagtcgttgcttggctgtgggctcgtacagtcaaaagccctaaccctgcgttttcccatgtagatgtacccttggcatccagttttattttatcttctaagactggtaaagaagcttatgttaagcctgtagttgagggggatagctattatttcaccgtcaaaacaggtttataccctgaatcagcaaaattggggacaactgctggtaaaagagctgcttttatttgtttgctatcaggttcacctattgactacaaatatattcgtagtgaaggtagtgctggacggatggggcaaaaattaatggccattgtagctgaaggtaaaaaaggtcgcatatatatttctcctgagcaatcccatagtgatatagcaaagcaagcaaagcctgaatggtcacctgcaatgtcattacctaacaacccccgagatttcaaaactccaaattatggtctggacaagttcggtgatctttttacccctcgtcagttagtagcattgtcgactttttcggagctagttgtagaggcgatagaacattgtcgtaatgatgctattatttctggtatgacagatgatggtatcagtttagatgctggaggtattggagcgactgcatatgctcaggcagttggcgtatatcttgcgtttgtagttgatcgttgtgccgatttctcaaatacttgtaccagatgggttcctggtaatcaaaaggtcatgaacttgtatggtaaacaagcgatagcaatgacatgggattttccagaggcaggagtacttgaaaatgtggttggtggttttttaccagctgctaactttattgcagactgtataactaaacttcccaatccggaaattaatggtttcgtatttcaacaagatgctcagactcaaaatataagcactaataaagtagtatcatgtgatcctccctattatgataatattggatatgctgatttatccgattttttctatgtttggtcgcgcaaatcactacgcccaatatttccaaatctttacgcatcaatagctgttcctaaggcagaagagttagttgcaaccccttatcggcatggcggtaaagaaggggcggaagcatttttccttgcaggtatgagtcaagcgattcatcagttggctgagaaggcacatccagctttccctgtcacaatttattatgcctttaagcaatccgaaaccaaagtagatggcacttcaagtgctggctgggagacgtttttacaagctgtaatcgatgcagggttcgccattagcggcacttggccgatgcgtagtgaacaatcagaacgattaatcggtaaaggtacgaatgctttagcctctagcgtagttctcgtatgcaataaacggaagattagcgctgaaacaattagtcgccgacagtttatccgtgaactaaacgcaacactaccagaagcactggatgaaatgacccaagggggggttaactctcctgtagcgccagtcgacctttcacaagccattattggtccaggaatgggtatctttagcaagtacacctcagtcttagaagcagatggcagcaaaatgtccgttaaaacagccctgcaattgataaatcgtttccttgccgaagatgatttcgatcatgatactcagttctgcttgagttggtttgaacaagagggctggaatacaggtaagtttggggaggctgatgtacttgcccgagccaagggaaccagtgtagccggattagttgacgcaggggtaatccatgctggtcaaggtgtattacgcctactgaaatgggcagaaatgccggatgattggtctccagagcacgatagccgcaccccggtttgggaagcgctacatcaattaattcgggtgttgaacaacaaaggagccagtgctgctggtacaatgttgggacgaatccccaacaaaagtgatgcaattcgttccttggcctatcgtctgtataccctttgcgagcgcaagggatgggctagcgatgctcgggcgtataatgaattagtgacatcatgggattctatgcaatcagctatgactgaggttggtaagtctggcgatcagcaatctcttgatttctaa

SEQ ID NO: 270020 - DNA, 261 bp, Klebsiella pneumoniae
atgccccaaaaaaatatcgttaatgtcgccagctatgttcaagagctggcaaaagaaaacaatgttacagctaaacgtgatgttatgagccgcatggcagtgaccattactgcgcttactggtgactttgttgagctggataaaatcgagcaattgctggtaaaccttaagaagaaaggtattctgagcaaaactgaaatactacaacttcatggccgctatatctgggaagaacgactttttaagttgttagatttctga

SEQ ID NO: 270021 - DNA, 639 bp, Klebsiella pneumoniae
atgtatgctctggcggatgtgaacagcttttattgcagtgttgagaaatgcttcagacccgatttacgcgataaaccagtggtcgtcctttctaacaacgacggctgcgttatagctcgttgtaaactggccaaaaaattcggcattcctatgggtttaccctggtttaagttgcgtgagcagcgcttcccggagcccgtgattgccttctccagtaactacgagctgtatgccagcatgagcgccagagtacatttctgcctggaggaattatcatcccgtgtcgaagagtattccatcgatgagtcttttatttgggctggtgggattgataactgcatgacgtttgaggaatacggacatcagctaagggatcatgttttccgctgcactggactgacgataggggtaggcctggcccctacaaaaacccttactaaagcctgccagtattccagtaagacctggccccagttcggaggggtactcgcactgactgcaggccagcgtaatcggatagataagatgctttctctgatgccggtagaggaggtgtgggggggtggtggacgaaccacaagtaagcttcatgcaatgggtgttaccaacggtgcaaaactgatccaccccagcggttga

SEQ ID NO: 270022 - DNA, 669 bp, Klebsiella pneumoniae
atggccttaataaaatgtcatgaatgcgctaaagaagttagcgatactgctacatcttgtcctaactgcggtgcaccaatttctagctcacagcaaacgagtcaacttaaaaatgaacaggaaccaagaaaggttagcttccttcttttatttggaataatagttttcccaatcctttttgtatggttcttattcagaaagggctattcaaaaaaagcacgaattatcggtattgcttatttggttattagtatcattttgcttggcggcagtagtgaagataattcttatgacgatacagaaacagaatcagtttcatctacctccccctcaaatggaagaccagacgtcagttccctcgctgagttttcagcaaaagaaatacttgatgcttacagtgctaacactgtcgcagcagacaagaaatttaaaggtaaatggttaattattagcggtaaagtcggcaatattaatactgatatcatagactctgcatatgttgagttttcggtaaataactctttcaattctccacaggccactttcattgaaagtgaagaagataaattagccaacttgcgtcaggggcagtttgttaaagctgtctgcataggaaatggtgacattgtaaaaaccccaatgcttaaaaattgcacactggttgagtga

SEQ ID NO: 270023 - DNA, 294 bp, Klebsiella pneumoniae
atgctaagcgataaaatcagagaactgaggagcatgcgtggactttcattggaacagctcgccaatatggtaggttcaaccaaaagctacatttgggaattagaaaagaaacccgagataaaaccgtctgccgaacttgtttctaaacttgctcaagcgttaaatgttacaatggactccctgatggatgagagtaaagaaaatgaccgagatgtcgttttctttagagaatacaaaaatctatcagaagaaactaaagtacaattgatgagtatattgcaagcaataaaataa

SEQ ID NO: 270024 - DNA, 210 bp, Klebsiella pneumoniae
atgacggatggctggccgctttatgaatcacgcctgaagggagaactgcacgttatcagcaagcgttacactcagcgcattgagcgacataacctgaatctgagacaacatctggcaaggctgggacggaagtcactgtcgttctcaaaatcggtggagctgcatgacaaggtcatcgggcattatctgaacataaaacactatcagtaa

SEQ ID NO: 270025 - DNA, 723 bp, Klebsiella pneumoniae
gtgaacaatgcggaggctgtaatatttacaagtgaagaggaaaaaatactagcacgtcagtcattcccactatatgaaccaaaagaatttgtaactgcatacggaacttctggcagtattgtcgataaagagattgcaaggagtgcatttaatgaaaaattcccttcgctaaaaggtaaaaaaatacttctttatatggggagaattcatgaaaaaaaaggatgtgatatactaataaattcatatgcaaaaattagtaaagaacataatgactatcatttgttcattgctgggccggatacgtctgcatacgcaaaaactctgaaagatcttgtgtcctctttaaatttaaatgacaaagttacttggggtggaatgcttagcggtgatgtaaaatggggcgcttattattcaagtgagattttttgcttagcatcacaccaagaaaactttggaatagtcgttgcggaagccttatcatgtgaggttcctgttgttactactacgaaagtcaatatctggcgagaaatagaacgcgccgatgctggcatgattgcaatagataatgatgattcttttactgaatgcttaaatgagtttattaaaaaatacgaaaacgatcgtgagagattaagagggaatgccttgagatgctttaaggaaaactttgacataaaacttgtagcgacatcatttaacaacttaatatcctcagaacgataa

SEQ ID NO: 270026 - DNA, 360 bp, Klebsiella pneumoniae
atgtcgcataactcagctccgtctaataacaaactgctgattgcgaatctcgacggcggtctgacgggatctgctgtactgaaatcgaccgcatcagcgaaaaccggcacggacatggtcgcggacacggcctattacgatcatatcgtgtggggatcgccaagtggtttcggcagtctgctgaataacctgtgccgctcgtacgtgctgtaccgcctgcacattgtcgatctgacagcggcaggcatgacgatggctgaagcgacggcggcagagcaggctgttttcagccgccgctttagcgctggtggaaaatattacggcgacacaatcccaacaaatccttctgcatttccgtag

SEQ ID NO: 270027 - DNA, 360 bp, Klebsiella pneumoniae; identical to SEQ ID NO: 270026

SEQ ID NO: 270028 - DNA, 576 bp, Klebsiella pneumoniae
atgaacaatacaaacattggcgatagagtagaaaaagctctcaatgattatatttctgaggatataacatcagccctcttaaatatattcccaatcttagatttgacagcaaaaaaagaatatggcggaggtgttgggtctagaataaagtcttttttgcggaagaacgaagctttaataagttatatatccactgggttagtctttaaactgccaacatttatcaacctcagccacgacaagcctaaaaaggagaggtttgaagacgtaatatacaataaaataagaaacaacattgtgcatgaaggaactgtaaatgaaatgatttcattccacaacaacaatgatttatttatatctccagatagatgggggctaaacaacaatcatgtattagcatttattctttgcgttattttgtcagagaagaatagcgatgagtttattaagaacaacccggatattaaacttcgctttgggacttttaaaatcaatgacctttgggggaaaagagagtcttttatcgaatttatagtatttagcgatagaggtttaaaatacgaagatttcaattaa

SEQ ID NO: 270029 - DNA, 2193 bp, Klebsiella pneumoniae
atgtcggtacctaaccaaatcccttacaacatctatacggccaacggtcaaacaaccgtatttacttacgaattctacatcattagcgccagtgatttagaggtaagtatcaatggttccgttgtcagcggctattccgtatccggcgttggtaacaaagacggcggcgatattacgtttctgacgccgccggcaaacggcgtggtggttatgctcgaacgagtggtaccgacattccgtctcaccgattaccaggataacggcgatctgctggcggatactgtcaataaagattttgaccgtatctggatggctatccagcgcgcgttaatcgatcttgggcttgcacttactcgcccgttatttggagggccgtttgatgcgaagggataccggatttctaatctggctgatccggttaatgaccaagatgcggcgaataaaagatttgttgctgagaatggtaaagtgaatttagcacgcacattgcgtgtaccagaaacagttatatcatcgctaccaacggctctctatagaaagaataagatcctagcctttaataatgaaggcaaccccataaccgtactacctgaatcaggatcggctgcggatgtattaatcgaactcgcttcaagtgcggtacctggcacttcgttggttatgcactctaacggtcagactatcgagaaacatattgatacgttaaatcgccgaaccagttttgtaatgccggaagattttaggggaacggacacccagcaacttttagctgccatcagttatgcaaagacaaacggtatcgggcgcattgaacttatcgcaggaaaaacctacacgcttacaggaacttctggtcttgaaattgaccttggatatttttcgtttggttgtatatttggatgcgccactattgacgctactaactttactggcgatgctgctgtttgggttcactcctctgctccgtatctggagggtaaccggatccactcaaataagctcaagggaatagaggttaaaggcacgatccgtggaactggacaatccgggattattattggaaataaaaacaataatgccaacggcacatacaacggtgactgtcatatcgaggattgtagctttgaaacgttcgataaagtactcttagcaactaatagcacatggcgatataaattcataaactgcggatttacaaacgaagccatgggcggcactcacattatgcacttccctgcaggtttaagtgattctggggaaagcatgggttttattaactgtaagatctatgataccaagcgtgcgttactttctattgattgtgcgaattttgcaattgcgatgccgggtacatcaatactaaactgcccgatagaaataaatggtgctggctcgttattgatgcttgattcagccgcaaacatcgaaaatccaggggctacggcatggtatcgttatgccaaagtcactggtgtctcagctcggtttttactgaatggctgtactctagtatgtaatcagccttctctgcaaactcaacctatatttgaagtaacaccaaatgcttttatcgacttcagtcatgttaaatctccagggaataattatccgtttcagaacggagttgaaggattcagaacatttgtagaaggggatggctatgtgattgctacggcttctatttctgatatagcttctggagccgggaatataccactgcataaatcacttaacccaacgcgtaacttcggatttggaactggagatctttcatcatggtctttcaacaatcaaggatcagttagccagacatgcgttgtagatgcggcatataaaaagacagggtcatatggagctcgcatgacttcaatagggtcattaagttgctatctgactcagaatgtgaaagttaccgggcatacatattttactacgtcacttattgtcagaactgtaaccccaggatctggaaccacagcaggtcagcttactgttactttttacgacagggcaggagtaaaaatacaagatggaccatccagcacgttttccaattctgttacagattgggtatctgttggtcagtttgtacaggggagagttctgcagagtgcagaatattgcgaagtttcagtgcgatgccgagagggtgctgtaatagatgttgatagctttatcattaatttcacttaa

SEQ ID NO: 270030 - DNA, 267 bp, Klebsiella pneumoniae
atgctcgtctggctttacgtcgcggagctttcttgccttaccacttttgcaccttatcaggacgtcaccatcatcggggagaaggactcctgcatcgttcttgtcaaccacaaccccaaatcccccccgcaaattactgtatataaaaacagtgtttatactatcataactcccccttcgcaaacagaagcgctccacaagcgattgtttttcgcacgaatcgggatggacaaacatcatttcacctgcaatagtagagctagttaa

SEQ ID NO: 270031 - DNA, 150 bp, Klebsiella pneumoniae
atgaagcgattttttaaaccagacctagaacattcaagccggcgcacactgctgcttttcgcgctggcgtggaattttgtggcgctggccgccgcaatcggggtagccggtttaggtatttacctgatcaaccgatggatgggcgcatga

SEQ ID NO: 270032 - DNA, 753 bp, Klebsiella pneumoniae
atgattcacttccacggagggccaatcacgccagatacctgtgcgttgaaagcgtggaaggggcgccatgcgttcattagctttgcaaacgctgggcagttagcactggccagcgaggttactcagtcatttgctcaggataacggcgcattcagtttctggacgaaaaaacgcgttgtggactggaacgagtattaccggttcgtcgagcgttgggctaatcaccctcggttctcattcgccattatcccggacgttatcggcggtagtagcgaagaaaacgatgcgttgatagcagagtggccgcacggaaagttcattggggcgccagtgtggcacatgaacgaaccagacgagcggtttattcaactctgcaatgagttcccccgcgtggcaatcggcagcatgggcgaatacgacgcaaagcgcccgcgccgctgtgtggctcgcctgcgtgacttaatccggcatgttgtggatgagaacggctacccgatctgcaaactgcacggcctacgtatgctcaatgccgacattttccgccatataccgctgtcatcagctgatagcacaaacgtagcaagaaatatcggtatcgataaagcatggcaaaagtctgcctatgcgccagccagtaaagaaacgcgcgccgctgtacttgtcgagcgtatcgagtccatgaacagcgccagtgcgctcaactataacgccgagcgcgaccgctttatgccgcaattggcctttgagatttag

SEQ ID NO: 270033 - DNA, 153 bp, Klebsiella pneumoniae
atgatctgcagggacgagtcgcttaacgcggatgcgaaagcgaaagcgaaagcgaaagcgaaagcgaaagcgaaagcgaaagcgaaatcgatgaagtatttaattagtcacaaaaaacagagccacgttataacgcggctctgctactcctaa

SEQ ID NO: 270034 - DNA, 672 bp, Klebsiella pneumoniae
atgcgtcatctgtcagcttatctgcctgggaccatggtcccacctgcgtcgtcggtcagcttatctgcctgggaccacggtcccacctgcgtcatctgtcagcttatctgcctgggaccacggtcccacctgcatcgccggtcaggttatctccctgggaccacggtcccacctgtatcgccggtcaggttatctccctgggaccacggtcccacctgcatcgtcggtcaggttatctccctgggaccatggtcccacctgcgtcgtcggtcagcttatctgcctgggaccacggtcccacctgcgtcatctgtcagcttatctgcctgggaccacggtcccacctgcatcgccggtcaggttatctccctgggaccacggtcccacctgtatcgccggtcaggttatctccctgggaccacggtcccacctgcatcgtcggtcaggttatctccctgggaccacggtcccacctgcatcgtcggtcaggttatctccctgggaccatggtcccacctgcgtcgtcggtcagcttatctgcctgggaccacggtcccacctgcgtcatctgtcagcttatctgcctgggaccacggtcccacctgtatcgccggtcaggttatctccctgggaccaaggtcccacctgcatcgtcggcacattattagttag

SEQ ID NO: 270035 - DNA, 1566 bp, Klebsiella pneumoniae
atggacgcaaatgatttaaaagaagctttaatcagaatcttcaaaacaagaaattctggcccattcctatttgttggttctggtttctctcggcggtatttaggaatcaaagattggaaagggcttttggataattattgtgtttcaggaaaaccatttgagtattatctcgcagcaggggattctacttatcctacagcagctagactcattgctgaagactttaatactacatggtggagtgacgcaaaatatgctgggagtcgtgaaagatatagtaagaaggttaccgataatacatccgcgttacgttttgaaatctgtgattatctcgctacttcattagaagtcccgatcaaggatagcgagcatcaggacgaaattgaaatactttcaaggctcaatgttgatggaataataacaaccaactgggactgttttcttgagcagcttttcccagactataaagtttatactggtcagaatgagttattgttttccaatccgcaatcaatagcagaaatatataaaatacacggtagtgcacataagcctaaaagtcttatcttaactgatcatgactacaatgaatttaataacaaaaatccttacctagcagcaaagctgataacgatatttgtggagcaccctgttgtttttataggctattcactttctgataaaaacattactgatttacttggtgcgatttcaatatgtattggaaaggataatatttcacagttacgcaataacttaatattcattgatagagaggaaggactcaccgactattcaatatctgaaacttttacaacgatcgaaagaacacagataccaataacattagttagaactgatgatttaaatcctgtttatgaagctattgagacaaataaaagaaaaatcccagcccgtattcttcgatattgcaaagagcagttatatgaggtagttaagtcgaactcaacagaatcaaaaatttatgtagttgacatcgatgaggttgaaaaacatgatgatgtagagtttgttgtcggcgttggtgttgctgaggctcgaaaaaaagaagaagagattggcaagctaggttatacacaaataaacaatataaatctttttcacgaccttttacatgaggataattcatatgatgcaaatagcattttacagaatgttattcctaatgcgggtcgattctctccgaatataatcgtttttaaatacctaaaagaaataggcattgttgatgaagcacaatatagagcatctaaatataatttggataaatgggttttaagaaatgatacaagttatcaatgtaaaggatattttaggacgtttgtaagaaaatttaaggataaagatactagatatattatcgagcataccacaccagaagtagcagcaatccatctgccttttctgatgaataagttagatctgaaattagttaaagagtttttaattaataatgaagagaaactgaatcctgataaatcaacttatgctagttattttaaaaagttagcttgcttatatgataagctattacatggttggtaa

SEQ ID NO: 270036 - DNA, 1218 bp, Klebsiella pneumoniae
atgaaatcttatattaaaacaaccattcaaaactcattatattataacacgcctaacaatctcagatcttattgggctggtatttatctatccgtactagaatcaatggtttatcaaaacaacatcaagactgggtttcataaattagcaaaagaaaaaaaaccattaacacttgcatcactaaaaggaaatacagatattactgatttaaactatatatttaatacaacattaaaaaatcatagctttgagtatttattgagaaatttatttaatggtgggttttgtgattcgctctttgagtcaattgtgttttctatcgctgatcattatgacttcgaggcacacaataacttgcgttattatcttttcggccaagactccataactgatgatttaccgcttgataattttaactataaaataccaacccataatggttggataaaagacaaatccaaaattaaagaaatgatcaggcattgtgatgttgggatagagttatttaaaccattctcgcaagaaagaatattaatccttggcgaagtggaaggtcttaatggtcaaaaacttctaactgaaagctactggataaatgataaaaaagctttgtctgacaatcgatactatcattttggtattggaattactcctacaaacgtcgatcttaaaactgccaatgaaataccaaagcatcagataaacaaacaccttttgtcaatctcaaaatatcaaatcaccgtttacactttcgatcaaataaccaatctacctaaagatatagaatatgcaatagaagatattaaaaaaatattctccgatgggaaatcacaaccagtaaactctttattcaacaatgatttttatacgagcctgaaggatatcactcaactaattattgactattggaatgaagacattagaaaccttctatttattttacgaggaatctgtggtgacactaacaatagtgataataatttaacaacgatttcccttagtattcaacatataggcgaaggttttggcattacatgcaaacatggcttttatatgaccttccctccccttactgcaactgaacgtctcataaatctctcaaaaacgtatgagaaaagtaatagaagagataaaaaagcaaacgacaccaatgagaacattgaaataagttctatattcacaggaaatataaccctacctcaggaaaggaaaaaataa

SEQ ID NO: 270037 - DNA, 489 bp, Klebsiella pneumoniae
atgagcgaaatgacgcaaactgtggctggcgctacccagccgcaaagcgatgatgcaagccgcatcaccgcccgcgatttacgcagcgtgttctggcgctcctttacgctacagggctcctggaactacgagcgccagcagcatatgggctatgccttcgcaatgtcgccagccctgaagcgcatctatcaggacccaacggagctggggcgcgccctgcagcgtcatctggtgctgtttaacaccacgccccatctctcgacctttatcttcggcctgtcgattgccatggaagaagagaaccagcgtaacccagaatttaatgaggagtcgataaacgcgattaaaaccagcctgatggggccgctggcgggcatcggcgactccatattctgggggatcattaaaggttatcgccgccgggatgggtatctatttcgcccagcagggcagcctgctgggaccgatactggcgctgttagtttataa

SEQ ID NO: 270038 - DNA, 720 bp, Klebsiella pneumoniae; identical to SEQ ID NO: 16816

SEQ ID NO: 270039 - DNA, 342 bp, Klebsiella pneumoniae; identical to SEQ ID NO: 16817

SEQ ID NO: 270040 - DNA, 792 bp, Klebsiella pneumoniae; identical to SEQ ID NO: 16818

SEQ ID NO: 270041 - DNA, 1266 bp, Klebsiella pneumoniae; identical to SEQ ID NO: 16819

SEQ ID NO: 270042 - DNA, 441 bp, Klebsiella pneumoniae; identical to SEQ ID NO: 16820

SEQ ID NO: 270043 - DNA, 426 bp, Klebsiella pneumoniae; identical to SEQ ID NO: 16821

SEQ ID NO: 270044 - DNA, 336 bp, Klebsiella pneumoniae; identical to SEQ ID NO: 133262

SEQ ID NO: 270045 - DNA, 240 bp, Klebsiella pneumoniae; identical to SEQ ID NO: 16823

SEQ ID NO: 270046 - DNA, 549 bp, Klebsiella pneumoniae; identical to SEQ ID NO: 16825

SEQ ID NO: 270047 - DNA, 297 bp, Klebsiella pneumoniae; identical to SEQ ID NO: 16826

SEQ ID NO: 270048 - DNA, 360 bp, Klebsiella pneumoniae
atgagtaaggggaataaaatgcttattaatcggatagcggttatcgggcttgcagttgtctcagccgctacgcaggcaggtgtgccgccggttaagtttttttaccgggatacagtcccggtaagcattacgctggacgaacccgcaacggggtgcagcatggccggtgtgattgttcatccagtggatcggccagcggcaaaagtggcatggtttagcgagaggatttgcggtaaaaaacgttacccggttagctttatcagtgatgaaattagcgccccgcataacgtgatccataaaggggaaaagtttcacgttaccccggctcaggtcaatctcctggacgcgcaaaacctctaa

SEQ ID NO: 270049 - DNA, 285 bp, Klebsiella pneumoniae; identical to SEQ ID NO: 16828

SEQ ID NO: 270050 - DNA, 333 bp, Klebsiella pneumoniae; identical to SEQ ID NO: 16829

SEQ ID NO: 270051 - DNA, 507 bp, Klebsiella pneumoniae; identical to SEQ ID NO: 136915

SEQ ID NO: 270052 - DNA, 216 bp, Klebsiella pneumoniae; identical to SEQ ID NO: 136916

SEQ ID NO: 270053 - DNA, 915 bp, Klebsiella pneumoniae
atgcaagatgaaaaaccgccaatgaagaagttacccacctccatgttgccagaagagacggctccacgtccggagttcccggagcaagaacaaaccccgccgggtctggatgcggaaatggagccatccccggaccacggtgaaaccagctacaccggctccgggcgactggccggtaagaaagcgttaattaccggcggcgactccggtattggccgtgcggtggcgatcgcctttgcccgcgaaggcgccgacgtcgcgataaactatctgcccgaagagcaaaaggatgcggatgaagttatcgccctgatcaaagccgaagggcgcaccgcggtcgccctcccgggtgatattcgctcagaatccttctgccagtcgctggtggccgacgcggtggaacagctgggaggtctgagcatcctggttaataacgccgggcgtcagcaatactgtgaaacccttgaggaactcactaccgaagatttcgacgctaccttcaaaaccaacgtctacgcgccgttctggatcacccgcgccgcactgcctcaccttcaggccggaagcgcgattatcaataccacctcggtgcaggcgtataaacccagcccgatcctgctcgattatgcgcagaccaaagcctgtctcgcgatcttcactaaatcgctggctaaacaggtggcgaaacgaggcattcgcgtaaacgccgtagcgcctggcccttactggacggtgctgcaatccagcggcggccagccggacgagaaggtgaaacagtttggcaaagacacgccgatggggcgcccggggcaaccggtagagatcgccccgctgtatgtcaccctggcatccgatgcctgctcatatacctccggacaggtgtggtgttctgacggcggggatggtgtggtctaa

SEQ ID NO: 270054 - DNA, 246 bp, Klebsiella pneumoniae; identical to SEQ ID NO: 136918

SEQ ID NO: 270055 - DNA, 894 bp, Klebsiella pneumoniae; identical to SEQ ID NO: 210998

SEQ ID NO: 270056 - DNA, 852 bp, Klebsiella pneumoniae; identical to SEQ ID NO: 210997

SEQ ID NO: 270057 - DNA, 141 bp, Klebsiella pneumoniae; identical to SEQ ID NO: 136841

SEQ ID NO: 270058 - DNA, 1698 bp, Klebsiella pneumoniae; identical to SEQ ID NO: 210995

SEQ ID NO: 270059 - DNA, 708 bp, Klebsiella pneumoniae; identical to SEQ ID NO: 210994

SEQ ID NO: 270060 - DNA, 1716 bp, Klebsiella pneumoniae; identical to SEQ ID NO: 210993

SEQ ID NO: 270061 - DNA, 954 bp, Klebsiella pneumoniae; identical to SEQ ID NO: 210992

SEQ ID NO: 270062 - DNA, 600 bp, Klebsiella pneumoniae; identical to SEQ ID NO: 136847

SEQ ID NO: 270063 - DNA, 1011 bp, Klebsiella pneumoniae; identical to SEQ ID NO: 210990

SEQ ID NO: 270064 - DNA, 1623 bp, Klebsiella pneumoniae; identical to SEQ ID NO: 210989

SEQ ID NO: 270065 - DNA, 945 bp, Klebsiella pneumoniae; identical to SEQ ID NO: 210988

SEQ ID NO: 270066 - DNA, 849 bp, Klebsiella pneumoniae; identical to SEQ ID NO: 210987

SEQ ID NO: 270067 - DNA, 1617 bp, Klebsiella pneumoniae; identical to SEQ ID NO: 210986

SEQ ID NO: 270068 - DNA, 987 bp, Klebsiella pneumoniae; identical to SEQ ID NO: 210985

SEQ ID NO: 270069 - DNA, 1092 bp, Klebsiella pneumoniae; identical to SEQ ID NO: 210984

SEQ ID NO: 270070 - DNA, 1155 bp, Klebsiella pneumoniae; identical to SEQ ID NO: 210983

SEQ ID NO: 270071 - DNA, 441 bp, Klebsiella pneumoniae; identical to SEQ ID NO: 136857

SEQ ID NO: 270072 - DNA, 819 bp, Klebsiella pneumoniae; identical to SEQ ID NO: 210981

SEQ ID NO: 270073 - DNA, 657 bp, Klebsiella pneumoniae; identical to SEQ ID NO: 210980

SEQ ID NO: 270074 - DNA, 885 bp, Klebsiella pneumoniae; identical to SEQ ID NO: 210979

SEQ ID NO: 270075 - DNA, 2412 bp, Klebsiella pneumoniae
atgaccaaccactgggtggatatcaaaaacgccaacgtcgtggtggtgatgggcggtaacgccgccgaagcccatccggtgggtttccgctgggcgatggaggcgaaaaacaataacgacgccacgctgatcgtcgtcgacccgcgctttacgcgtaccgcgtcggtggccgatatctatgcgccgattcgttccggtaccgacattaccttcctgtcgggcgtgctgctgtacctgatcgaaaacaataagatcaatgccgagtacgttaagcattacaccaatgccagcctgctggtgcgggatgattttgccttcgaagaggggctgttcagcggctacgatgcggaaaaacgccagtacgataaatcgtcctggaactaccagttcgatgaaaacggctacgccaaacgcgatgaaacgctcacccacccgcgctgcgtgtggaatctgctgaagcagcacgtttcccgttacacgcccgaggtggtcgaaaacatctgcggtacgccgaaagcggacttccttaaagtgtgcgacgtgctggcctcaaccagcgccgcggaccgcaccaccaccttcctgtatgccctgggctggacgcagcacaccgtcggcgcgcagaacatccgtaccatggcgatgatccagctgctgctcggcaatatggggatggccggcggcggcgtcaacgccctgcgcggccactcaaatattcaggggctgaccgatttgggcctgctgtcgaccagtctgccgggctatttgacgctgccatcggacaaacagaccgatttgcaaagctacctcagcgccaacacgccgaaggcgaccctgcccgagcaggtgaactactggagcaactacccgaaattcttcgttagcctgatgaaatccttctacggcgaggcggcgcaaaaagagaacgactggggctttgagtggttaccgaagtgggaccaggcttacgacgttatcaaatacttcaatatgatggataacggcaacgtcaccggctatatctgccaggggtttaacccggttgcctccttcccggacaaaaacaaagtggttcgcagcctcagcaagctgaaatatatggtggttatcgacccgctggtgaccgaaacctcgaccttctggcagaaccacggcgagtctaatgatgtcgacccgtcggcgattcagaccgaagtcttccgtctgccgtcgacctgctttgccgaagaggacggttcgatcgccaactccggccgctggctgcagtggcactggaaaggtcaggatgccccaggtgaagcgcgcaatgatggcgaaatccttgccgggatttaccatcgcctgcgcgaactgtaccgcaccgaaggcgggaagggcgcggaacccctgctgaagatgagctggcgctacaagcagccggaccatccggaatcggaagaggtggcaaaagagaacaacggctacgcgctggcggatctctacgatcaaaatggcactttgctggcgaaaaaaggccaactgctcaatagcttcgcgctgctgcgcgatgacggcagcaccgcgtcgtcttgctggatctataccggcagctggaccgagcagggtaaccagatggcgaatcgtgataacgccgatccttcgggcctgggcaatacgctgggatgggcctgggcgtggccgctcaatcgtcgggtgctgtacaaccgcgcttcggccgatatcaacggcaagccctgggatgcgaagcggatgctgatccagtggaacggcaacaagtgggtcgggaatgatattccggacttcaataccgcgccgccagggagcaacaccgggccgtttatcatgcagcaggaggggctgggtcgcctgtttgcgctcgataaactggcggaagggccgttcccggagcactacgagccgatggaaaccccgcttggcactaacccgctgcacccgaaggtggtctctagcccggtggtgcggttgtatgaagaggacgccattcgcttaggtaagaaggataaattcccgtatgtcgggaccacctatcgtctgaccgagcatttccacacctggaccaagcatgcgttgctcaattccatcgcgcagccggaacagtttgtcgaaatcagcgaagggctggcgaaaagcaaaggtatcgctaacggcgattgggtgaaagtcagcagcaagcgcggcttcattcgcgcggttgccgtggtgacccgccgactgcgcacgctgaacgtcaacggccagcaggtggagaccgtcgggatcccgctgcactggggttttgaaggcgtggcccgcaaaggctacatcgccaacaccctgacgcctaacgttggcgattccaactcgcaaacgccggagtacaaggcgttcctggtcaacatcgagaaagcgtaa

SEQ ID NO: 270076 - DNA, 588 bp, Klebsiella pneumoniae; identical to SEQ ID NO: 210977

SEQ ID NO: 270077 - DNA, 879 bp, Klebsiella pneumoniae; identical to SEQ ID NO: 210976

SEQ ID NO: 270078 - DNA, 774 bp, Klebsiella pneumoniae; identical to SEQ ID NO: 210975

SEQ ID NO: 270079 - DNA, 1017 bp, Klebsiella pneumoniae; identical to SEQ ID NO: 266236

SEQ ID NO: 270080 - DNA, 1383 bp, Klebsiella pneumoniae; identical to SEQ ID NO: 210972

SEQ ID NO: 270081 - DNA, 927 bp, Klebsiella pneumoniae; identical to SEQ ID NO: 210971

SEQ ID NO: 270082 - DNA, 291 bp, Klebsiella pneumoniae; identical to SEQ ID NO: 137544

SEQ ID NO: 270083 - DNA, 1119 bp, Klebsiella pneumoniae; identical to SEQ ID NO: 266231

SEQ ID NO: 270084 - DNA, 798 bp, Klebsiella pneumoniae; identical to SEQ ID NO: 210968

SEQ ID NO: 270085 - DNA, 1500 bp, Klebsiella pneumoniae; identical to SEQ ID NO: 210967

SEQ ID NO: 270086 - DNA, 537 bp, Klebsiella pneumoniae; identical to SEQ ID NO: 210966

SEQ ID NO: 270087 - DNA, 3741 bp, Klebsiella pneumoniae; identical to SEQ ID NO: 210964

SEQ ID NO: 270088 - DNA, 1545 bp, Klebsiella pneumoniae; identical to SEQ ID NO: 210963

SEQ ID NO: 270089 - DNA, 696 bp, Klebsiella pneumoniae; identical to SEQ ID NO: 210962

SEQ ID NO: 270090 - DNA, 681 bp, Klebsiella pneumoniae; identical to SEQ ID NO: 210961

SEQ ID NO: 270091 - DNA, 846 bp, Klebsiella pneumoniae; identical to SEQ ID NO: 210960

SEQ ID NO: 270092 - DNA, 1656 bp, Klebsiella pneumoniae; identical to SEQ ID NO: 210959

SEQ ID NO: 270093 - DNA, 969 bp, Klebsiella pneumoniae; identical to SEQ ID NO: 210958

SEQ ID NO: 270094 - DNA, 702 bp, Klebsiella pneumoniae; identical to SEQ ID NO: 210957

SEQ ID NO: 270095 - DNA, 582 bp, Klebsiella pneumoniae; identical to SEQ ID NO: 210956

SEQ ID NO: 270096 - DNA, 825 bp, Klebsiella pneumoniae; identical to SEQ ID NO: 210955

SEQ ID NO: 270097 - DNA, 1569 bp, Klebsiella pneumoniae; identical to SEQ ID NO: 210954

SEQ ID NO: 270098 - DNA, 1383 bp, Klebsiella pneumoniae; identical to SEQ ID NO: 210953

SEQ ID NO: 270099 - DNA, 228 bp, Klebsiella pneumoniae; identical to SEQ ID NO: 210951

SEQ ID NO: 270100 - DNA, 618 bp, Klebsiella pneumoniae; identical to SEQ ID NO: 210950

SEQ ID NO: 270101 - DNA, 927 bp, Klebsiella pneumoniae; identical to SEQ ID NO: 210947

SEQ ID NO: 270102 - DNA, 510 bp, Klebsiella pneumoniae; identical to SEQ ID NO: 210946

SEQ ID NO: 270103 - DNA, 933 bp, Klebsiella pneumoniae; identical to SEQ ID NO: 210945

SEQ ID NO: 270104 - DNA, 1314 bp, Klebsiella pneumoniae; identical to SEQ ID NO: 210944

SEQ ID NO: 270105 - DNA, 1122 bp, Klebsiella pneumoniae; identical to SEQ ID NO: 210943

SEQ ID NO: 270106 - DNA, 552 bp, Klebsiella pneumoniae; identical to SEQ ID NO: 210941

SEQ ID NO: 270107 - DNA, 888 bp, Klebsiella pneumoniae; identical to SEQ ID NO: 210940

SEQ ID NO: 270108 - DNA, 1455 bp, Klebsiella pneumoniae; identical to SEQ ID NO: 210939

SEQ ID NO: 270109 - DNA, 222 bp, Klebsiella pneumoniae; identical to SEQ ID NO: 135506

SEQ ID NO: 270110 - DNA, 1062 bp, Klebsiella pneumoniae; identical to SEQ ID NO: 210937

SEQ ID NO: 270111 - DNA, 2106 bp, Klebsiella pneumoniae; identical to SEQ ID NO: 210936

SEQ ID NO: 270112 - DNA, 1737 bp, Klebsiella pneumoniae; identical to SEQ ID NO: 210935

SEQ ID NO: 270113 - DNA, 300 bp, Klebsiella pneumoniae; identical to SEQ ID NO: 210934

SEQ ID NO: 270114 - DNA, 936 bp, Klebsiella pneumoniae; identical to SEQ ID NO: 210933

SEQ ID NO: 270115 - DNA, 1038 bp, Klebsiella pneumoniae; identical to SEQ ID NO: 210932

SEQ ID NO: 270116 - DNA, 582 bp, Klebsiella pneumoniae; identical to SEQ ID NO: 210931

SEQ ID NO: 270117 - DNA, 519 bp, Klebsiella pneumoniae; identical to SEQ ID NO: 210930

SEQ ID NO: 270118 - DNA, 450 bp, Klebsiella pneumoniae; identical to SEQ ID NO: 266191

SEQ ID NO: 270119 - DNA, 234 bp, Klebsiella pneumoniae; identical to SEQ ID NO: 210928

SEQ ID NO: 270120 - DNA, 1599 bp, Klebsiella pneumoniae; identical to SEQ ID NO: 210927

SEQ ID NO: 270121 - DNA, 750 bp, Klebsiella pneumoniae; identical to SEQ ID NO: 210925

SEQ ID NO: 270122 - DNA, 174 bp, Klebsiella pneumoniae; identical to SEQ ID NO: 138629

SEQ ID NO: 270123 - DNA, 123 bp, Klebsiella pneumoniae
atgtccggaatcatcacgctggtcatcgcgctaatcctgctggtcgcggcggtgtataatcttatctcctacattcgtgaccggcgcagcgccagtctgcccagcaaaaaaaccaagcgctga

SEQ ID NO: 270124 - DNA, 1428 bp, Klebsiella pneumoniae; identical to SEQ ID NO: 210922

SEQ ID NO: 270125 - DNA, 807 bp, Klebsiella pneumoniae; identical to SEQ ID NO: 210921

SEQ ID NO: 270126 - DNA, 930 bp, Klebsiella pneumoniae; identical to SEQ ID NO: 210920

SEQ ID NO: 270127 - DNA, 1014 bp, Klebsiella pneumoniae; identical to SEQ ID NO: 210919

SEQ ID NO: 270128 - DNA, 1146 bp, Klebsiella pneumoniae; identical to SEQ ID NO: 210918

SEQ ID NO: 270129 - DNA, 1413 bp, Klebsiella pneumoniae; identical to SEQ ID NO: 210917

SEQ ID NO: 270130 - DNA, 1398 bp, Klebsiella pneumoniae; identical to SEQ ID NO: 210916

SEQ ID NO: 270131 - DNA, 1011 bp, Klebsiella pneumoniae; identical to SEQ ID NO: 210915

SEQ ID NO: 270132 - DNA, 126 bp, Klebsiella pneumoniae; identical to SEQ ID NO: 135293

SEQ ID NO: 270133 - DNA, 285 bp, Klebsiella pneumoniae; identical to SEQ ID NO: 210913

SEQ ID NO: 270134 - DNA, 231 bp, Klebsiella pneumoniae; identical to SEQ ID NO: 210912

SEQ ID NO: 270135 - DNA, 1962 bp, Klebsiella pneumoniae; identical to SEQ ID NO: 210911

SEQ ID NO: 270136 - DNA, 570 bp, Klebsiella pneumoniae; identical to SEQ ID NO: 135289

SEQ ID NO: 270137 - DNA, 1167 bp, Klebsiella pneumoniae; identical to SEQ ID NO: 210909

SEQ ID NO: 270138 - DNA, 870 bp, Klebsiella pneumoniae; identical to SEQ ID NO: 210908

SEQ ID NO: 270139 - DNA, 897 bp, Klebsiella pneumoniae; identical to SEQ ID NO: 210907

SEQ ID NO: 270140 - DNA, 669 bp, Klebsiella pneumoniae; identical to SEQ ID NO: 210906

SEQ ID NO: 270141 - DNA, 597 bp, Klebsiella pneumoniae; identical to SEQ ID NO: 210905

SEQ ID NO: 270142 - DNA, 1005 bp, Klebsiella pneumoniae; identical to SEQ ID NO: 210904

SEQ ID NO: 270143 - DNA, 981 bp, Klebsiella pneumoniae; identical to SEQ ID NO: 210903

SEQ ID NO: 270144 - DNA, 579 bp, Klebsiella pneumoniae; identical to SEQ ID NO: 210902

SEQ ID NO: 270145 - DNA, 1845 bp, Klebsiella pneumoniae; identical to SEQ ID NO: 210901

SEQ ID NO: 270146 - DNA, 1089 bp, Klebsiella pneumoniae; identical to SEQ ID NO: 210900

SEQ ID NO: 270147 - DNA, 1506 bp, Klebsiella pneumoniae; identical to SEQ ID NO: 210899

SEQ ID NO: 270148 - DNA, 1344 bp, Klebsiella pneumoniae; identical to SEQ ID NO: 210898

SEQ ID NO: 270149 - DNA, 741 bp, Klebsiella pneumoniae; identical to SEQ ID NO: 210897

SEQ ID NO: 270150 - DNA, 924 bp, Klebsiella pneumoniae; identical to SEQ ID NO: 210895

SEQ ID NO: 270151 - DNA, 1119 bp, Klebsiella pneumoniae; identical to SEQ ID NO: 210893

SEQ ID NO: 270152 - DNA, 276 bp, Klebsiella pneumoniae; identical to SEQ ID NO: 135271

SEQ ID NO: 270153 - DNA, 528 bp, Klebsiella pneumoniae; identical to SEQ ID NO: 210891

SEQ ID NO: 270154 - DNA, 363 bp, Klebsiella pneumoniae; identical to SEQ ID NO: 210890

SEQ ID NO: 270155 - DNA, 186 bp, Klebsiella pneumoniae; identical to SEQ ID NO: 210889

SEQ ID NO: 270156 - DNA, 465 bp, Klebsiella pneumoniae; identical to SEQ ID NO: 210888

SEQ ID NO: 270157 - DNA, 894 bp, Klebsiella pneumoniae
atggaaaataacattatagttatttcagttactgtatgcttactggtcgggtgcgatcagggaaatgctgccaggagtgaaaaagcggctaaagagcttgtgggtaagtcgctctctaacatgattcccgttcagggcggtgagtttttaatgggcgattttggaccgttagtcggtgaaaaactgcctttcagcataaaccaggatgacaaggtattacataaggttgtattaagcgatttttcaatatcaaaatacaaagtcaccaatgatgattataataaatatctgcagataacaggagtaaaaaaaccacccattaatattctgctaaaagattacccatcattgcaaaaaagtgattattctgttggcatcacctggcaacaggcaaaagactattgtcagtggttaggtaaggagtctggtaaaaaatttgatttaccaacagaggcgcaatgggaatatgcagcaagatccagagggcaatacattccgtttgcaacgaataatggtgagttcctgcccggtaaaaacatccccagccaggatgagctgagtgaatatactgatggagcaggtattcctatttatccagtggggaaatatcccccaaaccccctgggtctgtatgatatgggacttagtggctcagaatggaccaatgactggtatgcgtcagattattactctcattctccggtaaacgatcctcagggacccgtaaaggggaccgaaaaagtcctccgcgggaatgttggcggtgacagacaatacgctttaaccgtgttcagacaatcagatttgccagttccaaagatcaataaagacgatgattatgaaaaatatggtgttggtccgcagtatgttttccgttgcgtcatcaataaataa

SEQ ID NO: 270158 - DNA, 1323 bp, Klebsiella pneumoniae; identical to SEQ ID NO: 211396

SEQ ID NO: 270159 - DNA, 165 bp, Klebsiella pneumoniae
atgtactcctccaaaggcccggattttgagtacatgcaagcgcgccggcaggagggggtcgatatccacgatgcggtatacggactggcgtgccgcaactttaaagacgaaatggcagagcttgaatcccgaataccggtgaatgacatcgaggataaacagtga

SEQ ID NO: 270160 - DNA, 1032 bp, Klebsiella pneumoniae; identical to SEQ ID NO: 212714

SEQ ID NO: 270161 - DNA, 312 bp, Klebsiella pneumoniae
gtggcgcggaccctcggcgccagccagcgtttcctgatcctgcgggtggcgatccccgccgcgttgccgaacgtctttgtcggcctgtttatggggctcggcgcgtcgttttcggtgctgattgtcgccgaaatggtcggggtgaagtcggggatcggcttttacctccagtgggcccagggctgggcggcctatcctaatatgtatgccgcgctgctggtgatggccttgttatgctccggcctgataagcggattatttatgctgcgtgaccgtctgctgagctggcagcgaggagggatgcaatggtaa

SEQ ID NO: 270162 - DNA, 861 bp, Klebsiella pneumoniae; identical to SEQ ID NO: 25304

SEQ ID NO: 270163 - DNA, 204 bp, Klebsiella pneumoniae
atgttgctattaacgaacgaggtgcaggaagtgcagatgtttttcgtactggtccagtatgtcattaatcagctgctcctggttccagcccatcacatcataattttgaccgccttctttgagatatacctcagcgcgataatatctatgttgttcagtctgctgctcattattatccatcgcggcgagcgcgaaggtcggtga

SEQ ID NO: 270164 - DNA, 2442 bp, Klebsiella pneumoniae
atgtccgaaataaccgaaacccataccgcctgggtcccgccgccgtttccgccgcagggacgtctgccgggccgggcgctgcaggttgggcagaactgccatcagcagaacagcgacgagcggcgctatcaccaggaactgtgcctggctgccggacgtcgcgtggagccgccgtgctgcaagacgctgcacatcagcctgtttttcgacggtaccggcaataacttaaatcatgacttttttatcgcgaagccgaaacatccgaccaatatcgcccggctgtttcgggcgactattggaacgggaacggctggcggggtgccgtctgacgatcagagcaagctgtttgatgatgacgccgagggggacgggaaatattttaaattctatatgcccggcgtgggcacccccttcccggaagtgaatgacccggactattccaccatgggtctggtgggggcagttaagggggaggatcggattaactgggcgctgctgcgcataatcgatgtgctgatgtttagtgccaccgaaaaatggctgaccaccacagagagtcgtcgttcactgaaagaaatgagcaccagctggaaccggctgtggtttggcggcagccataaccgctatgaagagttcactcgcttgctgaatggtcttgccccgaaactgatgccgatgctgattcagcctgagccgggcaagccgaaactgacaggcatcaagctgtatgtctatggtttttcccgcggcgcggcagcggcgcgcacctttgtgcgctggctgagcgaactgctgcccccgccggcggcggaaggtgaaaaaccgccgcagtgcctgcagacaggcgggatgcagctgcccgtcagcgtggagtttctcgggctgctggatacggtggcctccgtcggggtggcgcatgtggtgccggttgccgacgggcatatgtcctgggcagacggcacgatggagctgccggatgatgaaacctatggcgggctgataaaaaaatgtgttcacctggtctccgggcatgagcagcgtctctgctttccgctggactctgtgcgccgggcaaacggcaaatacccgccctgtgccattgaggtggtttacccgggaatgcactcggatattggtggaggatatccgccgggggagcaggggaaggggaatgctgaacatgatgggcatttgttgtctcaaatagtgttacatgacatgtattcagcagcgtttaactgtggcgctccgttaaaggttcctaaacaggcgttgcctgaaaaatttaagtcacaaagttggagagtcattcctcttgatctagattctcagttctttgtatctgaagttttaagtgcacgcttcaacgcctggcgcgaacttaccctgggccaaaccacgccgaaaacgttcgatcccgaagcagcctctcactacgaaccacctgccgccggcggcagtctggaaaccgtcattgctgagcagatggcctggatcaccgcctggcgcatcgaccgctatgccagaggctcgatgctgaaaacgcccttctatcagcgcgccacgaataccgaagcgctgcctgccgcacggaaggcggcagaagtgattcgtgataaagaacaggagaaggtgctcagtgctcgccagaaccagatagcaaaccagtctcctgacaggatggacgagctggttctgcagccgggcgtgaaggattttgacccaaagatggatcaaacccagctgttcgacgcggcgaaggagttcggaaaggattaccacgacggttaccgtattccggataacctggcgcagctggtgctggataccgtgctgcagccggtgattttcgttctcaataccgatgatgaagcgcaggaataccggcgcatgaagcgtgacggagaagcccgggtggccgtcctctttcccgatgccggggaggccagcaacgcggagcagcctgccgggctggtgagggcgctgtttgatgaccaggtgcatgactcacgcgcctggtttatgtatgccgcgctcggcacgcgcgagatgtggaccggttacttccgctaccggatgatttacttcagcgagcgctgcagtaaaccgctctcgccgctggtgctcgccggagacctggtgggttttgcgaccgtgaccgcgggtgtcgtgctcagtttccggcaaaagcgcctgaccagcaagctggccgggctggctgcgacaggcgccgtgcgctcgctggaggtggcggtgctggaccagataaccggggaagcgctgccggagctgcccggaggggagcagctgcgggcatttacccacgagccgggaaccgttgtcgcacagcaaaaggcgcggaaagcggacgagcagctggcgcgggggcaagccgcgctgccggccagctggctggaggacgttctgacgacaacggtctga

SEQ ID NO: 270165 - DNA, 258 bp, Klebsiella pneumoniae
atgaataaagtcattcgcaaaggcgataccctgcgggagtatgggggcagggtgctgatggggcattatcagtgttttgggctggggttcgcctgcaagggcgacccggtcaagtgtaacaaacacggtatgacgaccattgctgaaggcagcgcacgaaccacgattgatggccagccggttgcgctgcacggtcatcgctgcgcctgcggctgcacgctggtcagctctaacccagactgcggggttgatcagtga

SEQ ID NO: 270166 - DNA, 1140 bp, Klebsiella pneumoniae
gtgaggccggtaccggagtatcccccgtacagagacgcgcgaccgcctggtacggccaggtggctatcggcttcggccctgctggtcctgcttagcggcggggtcagcgctttacttccctcgtcagaagggaaaagcgccctggccgccaccgggatcctgttggctctggtgctggcaggtaccggctggttgatccggctgctgtactaccgcatgagcgtgcataacgccaggttctatgaccaactggtggcatacgaacaacagcaatggtgggcggagcatcggcagccgatcgggctacaggaaggtctgttactggggcccatgggcaaaacgaccactgactggctgcgggtgctaagccgtcaccagcgtccgccagaggaagagaacgagggcggcggcagggcgctgcgagcgccatacctttcagtttctgaggctatcgcccgcgaaaaacggctggcggaactactggtgatggaatggcaacgacagcgcagtgaaagaacgcttacgccgccgctgcgttgctactggcagggaacggagctcgcctggcaggcgtttcgtgcacagatgaccctcactgttgcgcagatgacactaccatcacgcccggatgcctggcgtggggaggccagcctcgcggagatagcacacgctctggcggaagctgacccccatgacactgtgcttatcgccggatgtcaggtggttgtcgcccagacgggggcggtgcaacccgccggagagtctgcagtactgtggctcgccggacgggacggtccggtgcacctgaccaggggagaaatctattgcgcagaaaaaggggaggccctgactgctgtagccgctcgtgtgctggagcagaacgaactgagcggccccccggaagcctgtgcgctgttttttcagccggggctggaagcgctggcgcacagcggttgggatatcaacctgtatcgccaggatgcctgttggggagacatcggcgagatggaaggcttgaccgtcctgtcgctggcggcgatctacgccgcgcactaccaacaaccgtgtggctggctagcccgcgatcccttgaataccctcgcaattggaattgtaaaacctgatggacaacgtcaataa

SEQ ID NO: 270167 - DNA, 1593 bp, Klebsiella pneumoniae
atgagtattttacaaaatttggttgccgccagtcagttggatgaaagcgtactgcgccagcaggcccggtcacgtcaggcgcagtggcagtcctggcttgcgccaatcagtgacgcccaaccaaccggggacgatccgggctatgacgatgattttcagcgtatccgcgatgaggtcaataagatctccggcgtcgataccgaactgatttgccagctggcagaaaaactgctgactcagacctgcaaggatctgcgcgtgatcaccttttacgtgtgggcgcgtctgcagcgggatggtgaaaccggtctggcggagggcgttacgctgctggcggcaatgcttgagcggtttggggctatgctccatccacagcgtgaacgtagctgtaaatcagcgctggaatggcttggcagtcgccggatgtcggacagtctgtctctttatccggaagtcgacatgaccactatgcaggtcattatcggggcgttattgctggcggaagccactttttccggcttggctgaagcatctcgccccgatctttccgggctatatcagatactggagaaccgcctggtgcaaagcggcggagcccacagtctggtgccgcagaccagccgcgaagaacacgatctgctaccccaacatacggacaccgcaccggtaatgcataccgtcacgtcaggtcgtgatttgctcgatcaggctaaggtgctggcgaaatatctgcgtgagtgtcccggcggatggctggcaggtcatcatctgatgaagagtgtgcgttgggatacgttaacggagttaccgccgctggatgcctccggccggacacggctattgcctcccaagcctgagagtaaagcccatcttaagcgtttgtatttacagaaaagctggtcggaactgctggagcatacggacacgctgttggcgcaaggcgtcaaccatctgtggctggatgtgcagtggtacgcctggcaggcgttgctgaaactggatgctgacagtgtacgggccgatatcctgtgccgggatatgaaagggctgctggctcgtctgccggggctggaaaccctggcgtttaacgatggtacgccattcgccgatgaagtgacgctcaactggcttaacgaacgtgtcctggatgagatggccggatggcaagatgagccggtaatggcggcgaccagcgctgatgaggtgctgtcgctggagccagaagtgctcacccgcgcggacgataaaggtattgagtcggcgctgaactggttacaggcgcagccgggctataccaccagccgcaatcggtggctgatgcgcttactgatggcgcgggtcagcgagcagtacggaaaaaatgaaatggcgctgcatctgctggcggaactcgacagccgcgcccgggaaatgacgctcgaacaatggaagccggagcttatctttgaggtcaaagcccgccgactccggctgctcagaggcaaggccgggcgcagtgaggcagaaaaaaatcgcttgctgccagaaatggagtcattgcttgccgggctcatcgctctggatcctgctcgcgccgcggtgctgtgcgcataa

SEQ ID NO: 270168 - DNA, 1755 bp, Klebsiella pneumoniae
atggacgatttaaccctgcgttattacgacgctgaaatgcgctacctgctggaagcgggtgaagagtttgcccgcgctcatcctgagcaggcggcaatgctcaatctcgacaaagcgggcgcccgcgacccctttgtcgagcgcctgtttgaaggttttgccttcctgatgggccgcatgcgcgagaaactcgatgacgatctgcctgagctgaccgaaggcgtggtcagtctgctgtggccacattatttacgtaccattccctcgatgtcggtcgtggagttcacccccgactggccggaaatgaaagaatcgatgacgataggcaaaggttttgaagtgctttcccggccgatcggtgaaaagggcacgcgctgccggtacaccaccaccaaagcgatcgctctgcagccgttatccctggagcgcgtccagctggccaccgatacggatggccggtcggtgatcacgctgcgctttacctgcagccagctgacggactggcgccgggtcgatctcagtcatatcccgctgtactgcaacgccgatgcgccgctggcctgcgccatgcacgaggcctttaccctcaatgtggcccggatgtggctgcgcatccccgatgaggtggacagaaggccgctggacgggtatttcagcgcgctgggatttggcgaggatgacggcctctggcctgaagatggccgcagttttcgcggttaccagctgctgctggagtattttaccttccgcgaaaagttcatgttcatcgatctgcgcgggctggagacggtggtttttccggccggactggcgtggtttgaaatcgacgtcgtgctggcggaacgctgggaacatgacttccgcttcagcgaaaagcagctgcgcctgcactgcgtgccagtgatcaacctgtttccgctggagtccgatccgctgaccatcaattacctgcagaccgaatacccgctgcgcccgatgcgcgtgcaggacggccacaccgaaatttacaccgtcgattccgtgatctcctcacaccagcaggtttacgcgccgttctcaagttttcgccacaaaggcggcatgatgcgtcatgacgcggcggactattactatcatacccgggtgcgccgtggcccctccgggctgtacaacacctggcttatcgtcggcggagaagcctttgataatcataccgtaccggaagatgaaagcctgtcgctgaccctcaccggaaccaacggccagctgccgcgtcgcgcgctgcagagcaccgtgctcgatacggtgatgaaaaccacttccgccagtattgcagtgcggaacctctgcgcgccgacgctgccgtgctattcccccgcccaggaccgttttcactggcgggtgctgagccatctgggcagcagttttctttccctgatggataacgcggaggtcctgcgcggcaccctggcgctgtatgaatggaccgacagcgagatgaatcgtcggcgtctggaagccatcctcgacgtgaagcaccgcgcaacagagcgctttgcacagggccatctggtgcgcggcgtgcagattgaagtcaccctcgacagtcacggctttgccggacgtggcgatatatgcctgtttggcgagatgcttagccgcttcttcgcgctctacaccgacatctacttgttcaaccgcctgattatcattctgcaaccaaccggagaacgactggaatgggaagagaagcacagccgccgcattcccggctga

SEQ ID NO: 270169 - DNA, 1086 bp, Klebsiella pneumoniae
atgggaagagaagcacagccgccgcattcccggctgaccccgcggctggaggccgacctgccgcggatcaatttttaccgcttctgccagcttctggaaaaacggcgtcccggccaaccgctgatggggggaaccagccatccggctgacgatccggtgcgtttttacccgcatccgggaatgggatttcccgccagcgaactgaaagccgtggaatacgatgaggccgatgacagcaggccgccggtcatccgcaccacctttatggggttgtacggtgtcgattcgccgctcccgacggcatatctcgatgatatcgcccagcacagggaagggcatgaagcgctgcagggcttactggatatcttcagccatcggatcatgacgcagttttaccgcatctggcggaaatactcctggcccgccacctttgagcccggcggcaccgatcgtctctcgcagtcgctactgggcctggcggggctgggcatccccggcacgacgcagcatatcgcctcgccggcgtcgcgctttctggcgctaaccggcgtgctgcgtcagccgggcaaaacccagcaggggatccaggcgctagtcaccctgctggccccggagaccaccgtcagggtgagcccgtacagcctgcgtccggtggcgatcagccagccgctggggttttacggcgatgacgacttcttcctggacggcaatacgccgctgggtgacgaagcgatggatgccagcagccagctcctcgttgcccttaccaccgacaatcccgcggaggcgcagggctggaagcctgacggcccgctgtttcgggactttctcatcctgctgcgggtatacctcggctggcgattccgggccaacatcaccctgaccgcgccgacccgactgctggctgtcccgccgctgggggacgagccgttctggctcggtatgaacggcgtgctgggcgtgggtgagggcgagagtgagggcgatattcctcagacctttaccaccgagctgggtacctatacgggcctgcagcctgccacctttctacaaggaaaccgacgtgttacgtataagtttgactaa

SEQ ID NO: 270170 - DNA, 543 bp, Klebsiella pneumoniae; identical to SEQ ID NO: 211725

SEQ ID NO: 270171 - DNA, 495 bp, Klebsiella pneumoniae
gtgacagcgagggaacgtttttttaagaaactgcagcaacagcaaaatccgcggcggacagcggccctcgacgggtcggccgccgcggatatcgccaggtttcgtcagcagatggcggcgctggcacagcagataagtcagtggtttgatggaaccggtattgaggtggtgatttcgacccgccatctccacgacctgagtacccttggctacagcctcaacagcggcatctgccgctacgatatcccggccattcgtctgcaaaacggcgagcgcagcgtcaatatcgtgccgcagcagctgttggatggcgtggaaaaggggatcgtgaccctgagtcttgaggcgcccgacggcgcgggctcccgggaggtgttttatctgagcctggccccggaggagggctggatgatccgcaaggcgcaccagtccccggaagcgcggcttatgcttaccgaagatcgcttttttatggcggtcgacagcctggcctga

SEQ ID NO: 270172 - DNA, 714 bp, Klebsiella pneumoniae
atgacagcgtttcacaataaatcagtgctggttttaggcgggagtcggggaattggcgcagcgatcgtcaggcgttttgtcgccgatggcgcgtcggtggtgtttagctattccggttcgccgcaagcggccgagcggctggcggcagagaccggcagcacggcggtgcaggcggacagcgccgatcgcgatgcggtgataagcctggtccgcgacagcggcccgctggacgtgttagtggtcaatgccgggatcgcgcttttcggtgacgctctcgagcaggacagcgatgccgtcgatcgcctgttccacatcaatattcacgccccctaccatgcctccgtcgaagcggcgcgccgcatgccggaaggcgggcgcattattgtcatcggctcagtcaatggcgatcgcatgccagtgccgggaatggcggcctatgcgctcagcaaatcggccctgcaggggctggcgcgcggcctggcgcgggattttggcccgcgcggcatcacggtcaacgtcgtccagcccggcccaattgataccgacgccaacccggagaacggcccgatgaaagagctgatgcacagctttatggccattaagcgccatggccgtccggaagaggtggcgggaatggtggcgtggctggccggtccggaggcgtcgtttgtcactggcgccatgcacaccatcgacggagcgtttggcgcctga

SEQ ID NO: 270173 - DNA, 594 bp, Klebsiella pneumoniae
gtgaccactacaaaaccagggcgcactccgggacgtccccgccagtttgatgcggaacaggccattgaaacggcgcaacgcctcttccacgcgcgaggctacgacgcggtgagcgtggccgatctgacccaggctttcggcatcaaccccccgagcttttatgccgcttttggcagtaagctcgggctgtatacccgcgtcctgcagcgctacagccagaccggggccattcccattgatgccctgctgcgagacgaccagccggtggcggcgtcgctcatcgccgtactgcaggaggcggctcgccgctatgtggccgatccggccgccgccggctgcctggtgctggagggggtacattgtcaggatgctgatgcccgggtggcggcaggcgaatggcatgctgcggcaagagccaaaatccagcagtacatcgcccgccatcgcccgcaggacgcgctgcgggtgactgactatatggatacgctgatgcttggcctgtcggcgaaagcgcgggaaggggatagtctgccgcgtcttctggagaccgtgcggctggcaggcctggcgctggagcgcatcctgccagcctga

SEQ ID NO: 270174 - DNA, 879 bp, Klebsiella pneumoniae
atgcgcgacgctctgttcgatctctgccgccggtttgccgatgctcatgtcgatagcagcggggtggcagttaccccggttcccggtattactctggtgcgggccctgcatcctggtgacctgcaggcggctatcgccaggccgctggtggccatgctgctccaggggcgtaagagcgtgaccaccggcctggccagctttgactatggtccgggcgaggcgatggtgattgccgcggatgttcccactaccagccagatcaccgaggccagtcagcgttttccctattacgcgctggtgctggagctggacctggctatcctgcgcgagctgcaggaggccgggccgtcagggccggatgaggcgccccgcgttggtatcgaaccgatgaacgccgatgtgacggatgccgcttaccggctggcaaggctgtttgatcaaccgggggcgctggcggtgctgggggaaggtctgcggcgggagctgcattactggctgttgcagagtgtccatgggccggccatccgggcgctgggcgccgtagacagccattcggcgcggatccgtcgggcggtggcgatgctgcgccgggattttatgcagccagtcagcgtcgacgcgctggccgacgccgccgggatgagcgtctctgtctttcaccgtcatttccgcgccatgaccacgctgtcgccgctgcagtttcagaagcagttacgcctgatccacgcccgccgcctgatgctggcggaagggatgagtattgcgcaggctgccggggaggtgggctatatcagcgtgtcgcagttcacccgggaatacgctcgcctgtatggcgcgccgccgggccgcgatcgtcgccgggaaaaaatgagcgcctga

SEQ ID NO: 270175 - DNA, 207 bp, Klebsiella pneumoniae
atgaacaagttaattccactgatcgtattgagttgtctgctgcccctggcggcaaatgccagaaccatcaccgccaccggcgataccctggaccatgcggagagcaaaatccgccagcaggccgcccgcgagggcgtgactacctatcgcatcactgaagcgcgaatgggcaacaaagtgcatatcacggcgaaaatcgcggactaa

SEQ ID NO: 270176 - DNA, 930 bp, Klebsiella pneumoniae
atgaaaactgataattttaatcatgcggaaaaggtattggtgctgggagcgggacaactgggcgccgccgttctcgatgcgctggtgcctgcggtaatcgagcgccagggcacggtctcggtcatcgtctcgccggcggcctgggatgaagccggccagctgcggtcggcaaaccatcaggcgctggccgacgccggagccaccttcctcgccgtcgacatcgccggtagcgccatggagacgctggccgatcagtttcgcggattcaccaccgtgattaactgcatggggtttgtcgccggtccggggacacagctgaaaattacccgcgcggtgctggcggccggggtaccccgctattttccctggcagtttggcgtcaattacgatgtggtaggcaaaggcagcggtcagccggtctgggacgagcagtacgatgtccggaccctgctgcgcgcgcagcgggccacggagtgggtcattgtctccaccgggatgtttaccagctttctcttcgaaccagacttcgatgtagtgaatttatccaaccgaacccttcacgcccttggcagctgggatacccaggtgaccgtcacctcaccgacggatattggccgcctgaccacggcgatttatctgcatcagccgcggatcgtcaacgaggtggtgtttgttgccggtgaaacgacctcttaccggcagttggcggataccgtggagcgcgtaacgcagcagacgttcagcaaagccgtccacaccctgcccgccctgctggagcagctgcggacagacccggatgacgccatgctgcgctatcgcgccgccttcgcccggggggatggcgtgtggtggccgatgggcgacacctggaatgcccgccaccagctgccgacccaggacattgccggctggctgcagaccgcgcgctga

SEQ ID NO: 270177 - DNA, 924 bp, Klebsiella pneumoniae
atgaacaaaatcattgaaaatgattttagtcgtatcgatctgaatctgttgacagtcttgatggtgctgtaccgcgaagggagcgtcacccgcaccgcagaggtgctgcatcttggccagccggctatcagcggggcgctgaaacggctgcgcgagatgtttgacgacccgctgttcgtgcgcagcgccagaggcatgctgccgacgccgcgggcgcaagcgctgatgaccgacctgcagccgctgatggaaaacctacattcggcgatgtttggcgtcggagagttcgtcccggcgcgcgcgcagcagctttttcgcatcggcctcagcgactggagcgaacactggctgatgcccccgctgttacccgggctgatgcaggaggcgcccggagtgtcactgcagtcgatagccaccgaccccttccaggttcgccagttgctggaggaggagcgcattgatgtcgcggtgtctgtcaacaaacagagccgtggggagatcgtcagcgagccggtgatgtccatgggagtcaccaccctgtggtcgccgcagcagatcccctgccgcggtccgctgtcggtgagcgactttgtcgcctgggaacatgtgatggtggcctatcgcgaaaccggccacggtgaaattgaccgccagctcgccagccaggggctcgcgcggcgcgtgcgctttgccacgcagaatttctccacctttcccctgctgctgaccaccctgccgctgttcgccaccgtcccgcaggggctggcgcagcgctggcaggcgcagtatgcgctgcgcgcggacgctccgccggtagcgtatccggaatttacgctgtgcattttgcggcacaaacggcgggcgcaggatccggcgctgaactggctggtgacgatgttaaaacaggccatgcgcggccaataa

SEQ ID NO: 270178 - DNA, 867 bp, Klebsiella pneumoniae
atgcaaacttaccagacaggcgatagcctgattttcaaagtgccggagcgcgagatttccctgcagccggcagcgctctatccagaggcgttcccggtagcggaggcggaggccgttattcagccgattgcgctgtcaatccacagctgggtggtgcagaccccctacgatctgattgttatcgataccgccaccggcaatggtcgggagcgcggcggcaatccgctctatcatcaacttaacacgccgtatctggagaatctccgcgccgcgagagtgaacccggaggacgtgaccctggtgctactgactcacctgcataccgaccatgtcggatggaataccgtctggcaggacgatcgctgggtgccgctgtttcccaacgcccgctatctgtgctcggcaaaagagctgtcgcgggtgaaaaacagcgaacgctaccgggcgctgtggcttgacagcctgctgccggtgattgaggccggccagctggagaccgtcgatgtggcgacccggccgcgggtcggcggacggatcgactttattcccacccccggccacagtccggaccatgccgcgctggtcctcgccgccggagatgactacgcctgtttctccggcgatcttctgcattccccgatccagtttgcccatccgcagtggaattcagcgttctgcggcgatccccggcaggcggaagtctcgcgacgggagatgatggcgtggggggcaagccatcatgctcaatggttcaccgggcattttgccgggccttcctgcggctggctggagaaggataagcaaggtgactatcgctggcgagaggccgggaaacaggctgcagataaggggaacagtgatgaataa

SEQ ID NO: 270179 - DNA, 912 bp, Klebsiella pneumoniae
atgaataatgcgcaaaccgtgttggtttttggcgccaccggtcagcagggcggctcggtggcgcgggcgctgctgcaccgcggctggcgggttcgggcgctggtcagggatcctttctccgccggggccgctgcgctggcggcgcggggagccgagctggtcgtgggtacctttgaagaccgggcggcaatgcggtcggcgatggcaggggtcgacggcgtcttcagcgtccagcccagttcgccgggagggacggtgaccgatgagcaggaggtacgctacgggataaccatcgccgatctcgccgtcgagtgcggggtgaagcatctggtgtacagctccggcagcgcgacgggggagacgccgaccggcgtagcgcattatgacaccaaagcggaaattgaacggcatattcgccgcctgccgctggcggcgaccatcgtgcggcccgccacctttatggagctgctggtgatgcctggttttggccttgatgaaggtcgttttcaattttttatgttgccggaggggagaatgcaggtgctggcggtggaggatatcggccatcttgtcgcggcggtttttgccgcgccggcgcggtttgccggcaagacgttcgagatcgccagcgacagcgtgaccggtcgtcagctggaggtgttattctccgcggcggcgggacggccgatcccctattcgcgattttccgacgaggtgctggccgccagtccttttctgcacaagctgaccgggctggtggacgacgggcggctggccgggcacgccgacctcgacgccctgcgccagctgcacccgcagctgcacaccttcgccggctggctggcaggccccggccgtcccgccttcaagcgggcgctgaccagcggggctcgctgggcgtttgatcgttaa

SEQ ID NO: 270180 - DNA, 549 bp, Klebsiella pneumoniae
atgagagctgatgccagaaaaaattatgacctgttgatcgaggtggcccgggacgtctttgtggagcaaggcgctgaggcctcgctgcgcgatatcgcccgccgggcgggcgtcggaatgggaaccctctatcgccactttcccaaccgcgacagcctgctggaagccctgctccgcagccgctttgcggcgctaaccgcccgggctgagtcgcttctgctcgccgccgatcctgccgcggcgctgctggagtggctggccgagagcgtggcgtttacccatcagcatcgcgggatcatcgccccgctgatgagcgccatcgacgatcctgagtccgccctgcatagcgcctgcgttgccctgcgcgccgccggtacgtcgctgcttacccgcgcgcagcaggccgggctggcacggccagatctcagcggagaggagctgttcgatctgatcgccgcgcttgcctggctgcgggagcaaccgtcccatgccccgcgcgcagagcggattttagcggtgctggccgacgcgatcctgactgccggctag

SEQ ID NO: 270181 - DNA, 1035 bp, Klebsiella pneumoniae
atgtcgacgcagatgatgaaggctgttcaacagcacgcctttggcgggccggaagtcctgagctatgaggatgcgcccatgccggtcctgcaggccggtgaagtactggtacaggtgcacgcggtgggcgtgaacccgccggacagctatctgcgcgatggctatcaacagctgcccccggagtggcggcccgaggtccgctttcccttgatcctcgggaccgatctctccggggtggtggtggcgcgggcggatgacgtccgggaggtggcggtcggcgacgaagtgtatgctatggcgcgttttcccgaaggggcggcagggggcagtcgcgcttacgccgagtacgttagcgtgccggtcagcgacctcgctcgcaaacccctaaccctgagccatcagcaggctgccgcggtgccgatgtcgctcctgaccgcctggcagttcatgatcgatcccgggcatgaggtggcgaatccgctgcagccggggccgcatcggccggtgccgctggcgggtaaacgcgtcctggtcaacggcgcggcagggggagtcggtcatttcgccgtgcagctggcgaagtggcagggcgccgaggtgattgccgtcgccgcgggccgccatgaagcctttttacgtcagctcggcgccgatagcgttatcgactatacaaccactgcagtggaggagacggtgcgtgacctggatctggtcattgatgcgccgggcgggccggccagcggccgttttttgcgtaccctgcgacccggcggcgcgctgtacccgatctttccgctcggctttgccggggcggaagaggcgcgacagcgcggagtgacggtctccaccacccaggtacgctccagcggcgcgcagctcgcccggcttgccgacctgctggacgccggggtcatccgggttgcaattgacagcgttttcccccttgcgcaggcgcagatggcgcatgagcgagcagcgcaggggcatcttgagggcaaaatcgtgctgtcggtgatggactcgtcagccgggtaa

SEQ ID NO: 270182 - DNA, 1176 bp, Klebsiella pneumoniae
atgcctgattttactgcttcgccgctggtggacgccctggaagagaatttgttcagcctgctggaaaaactggccgcggaggtcaacaccgaagcgctgccgctgatcgatctttccagcggcagtccggatcaacccaccccgccggaagtgatcgactcgctgcagagcgctattcatcgtcgtgaaaaccatggctacccgtcgttctggggcaaaccacaggtccgcgaggcgatcgcccggttctatcgccggcagtatgatgtggaactcgatccgcacagcgaaatcgccgtgtttcaggggtcgcatatcggtataggcggcatcccgcgggcgctgctcagccccgggcaatacctcatctccaccgatccctgctatccgatttaccgctcggcggcgcttcagtcccaggcggcgttttatggcctgccgctcagggcggagaaccatttcctgccggattttaacgatcttccccgggaagtcgctgacaaggccgggctggtggtgcttaactatccgcataatccaaccggcgccctcgccacgccggcgctgttcgccagcgcgctgcagtttgctcgtcgtcaccaggtgccgatcctccatgattttgcctatgcggccatcggcagcgcggccagcgatgcgccgctgagcctcttctcccagcctgacgcgaaagcatggggagtggaaacctatactttttccaagacctttaatatggccggctggcgcttcggcttcgcggtcggcaacgcctcgattatccgggcgtttaaaaagctgcacacccatagctacagcacggtgtttggcgcgattcaggatgcggcgatcgccgcgctcagcctgccggccgaacggattgcgcagctaacggcggtctatcatcaacgtcgggagtgggttctgcgtcgactggttgcgctgcgctggccggcgcgtgacgcacaaggcactttcttcctctggctcggcgtgccgcccggctaccgttcgcaggagtttgcccgcctgctgctgcaggaagcgcatattctggtggcgccgggcactggttttggcgcagggggagaaggatttattcgcatcagcctgaccgcaggggacgaggcgctgagcaacgcgctggaccgtcttgcccggctggcgctgttttag

SEQ ID NO: 270183 - DNA, 807 bp, Klebsiella pneumoniae; identical to SEQ ID NO: 211710

SEQ ID NO: 270184 - DNA, 1026 bp, Klebsiella pneumoniae
atgaataacgcgatgatagaatttcgccacgtcagtaaaagcttttccaggaaaggacatccggttctggccttgcaggatattaatctcagcattgagcgaggcgatatttttggcattattggctacagcggggcaggaaaaagcaccttattacggctgattaatcgtctggaaacacctggcgagggcgaggtactgttaaacggcgagccgctacaggactgcagcggccagcgcctgcaggccatcaaaaaagatatcggcatgatctttcagaattttaatctgctgaattcgaaaaccgtttttcataacatcgccatcccgcttattttacagaggcgcgacaaggcctttatccaggcgcgggtggcggaactgctggcgttcgtcgatctgagcgacaaaatccacagctaccctaatgagctgtcgggcggacaaaagcagcgggtcggtattgcccgggcgctggccaccaacccgtcggtccttctatgcgatgaagccacctcggcgctcgacccccacactacggtgcagatcttactgcttttgcaggagattaatcgtcggtatggcatcaccatcgtactgatcacccatgagatgtcggtgatccagaaaatctgtcacaaggtggcggtgatgcaggcgggccgtatcgttgaacagggggcggtttttgatctctttgctcagccgcagcatccggtcactgccagtttcgtgcagtcggtggtgcacgaccgcctgccgcagcgggtggcgtcgttcctgcagcgcgataacggcgcccgggctttacgcctcgaatttgtcggcgcgacggcgcagcagccgattattaaccacctgatccgcgagtatgctgtcgaggtgaatatcctgtttgccagcatgtctgaagttcagggccggattctgggatttatgattgtgcagctcctcggcgagcctgacgaaaccgaccgcgccatcacccatctggtcgatgcaggagtgcaaatcacccatgtttga

SEQ ID NO: 270185 - DNA, 669 bp, Klebsiella pneumoniae
atgtttgatcttattgataccgccatcaccggtgagcagtttctgctggcgctgcatgacaccctgattatggtcgccgtctcgctgggctttggcgcgctgatcggcgtaccgttagggattgtgctggtggtttgccgtcccggcggcatcgtggccaacccggtggtgcatcaggcgctgaatccgctgattaacgtgctgcgttcgctgccgtttatcattttgctgattgtgatcctgccctttacccgactgctggtgggcaccactatcggcaccgcgggggccatcgtgccgctgatcgtttttgtcgccccctacattgcccggctggtggagagctcactgctggaggtggatgaggggatcctcgaagccgcggatgctatgggcgcgacccccctgcagacggtctggcactttatgctgccggaggcggcggcatcgctgattctggcccttaccacggcgaccatcggcctgcttggtgcgaccgccatggcaggaacggtgggcggcggcggaattggcgacctggcgatcacctacggctatcagcgtttcgacgcctttgccaccctcaccaccgccctggtgctgattgttattgtccagcttattcagacgctggggacccgcctggctcgccggctgcgtcgcgattaa

SEQ ID NO: 270186 - DNA, 1200 bp, Klebsiella pneumoniae
gtgtttcagaacgttgacgcctatgcgggcgatcctatcctgtcgctgatggaagcctttcaacaggatccccgggcagacaaagttaacctcagcatcgggctgtactataacgagcaggccattattccccagctggaggcggtccgtcaggccgctgaccggctgcagagtcagcagcaaaaggccagcctttatctgccgatggaggggctggcgccctatcgccgcgcggtccagaccctgcagtttggcgacaatcatccggcgttgcgtgccggacgcatcgccaccatccagacactggggggctccggcgcgctaaaggtgggcgctgatttcctcaagcgctacttccccgactccgcggtctgggtcagcgatccaacctgggagaaccacgttgccatctttgccggcgccggctttgaggtacatacctatccctggttcgacagcgccacccgcggggtgaacttccccgctatgctcgccgccctccagcagctgccgccgcgcagcattgtgctgcttcacccttgctgccataacccgacgggggccgatctcacccgcgagcagtgggatcgcgtgattgaggtgctgatcggcagggagctgatcccattccttgatatcgcctaccagggcttcggccgcggactggacgaggatgcctatgccattcgcgccatcgccagcgccgggctgacggcgctggtcagcaactcgttttccaagatattttcgctgtatggcgagcgggttggcggcctgtcagtggtctgtgacaatgccgatatcgccgggcgcgtgctgggccagctgaaagccaccgtgcggcgcaactactccagcccgccggggtttggcgcccaggtggtgtcgcaggtgctcaacgatcccgagctgaatgccctgtggcaggaagaagtggaggccatgcgcacccgcatcagcgccatgcgcgtcgcgctggtgaaggccctgcaggcagccctgccggcgggggatttttcctatctgctgacccagcgcggcatgttcagttacaccggctttagcgccgatcaggtagacgttctgcgtcaagagcatggcatctatctgatcgccagcggtcgggtctgcgtggccgggctcaaccacggcaatattgcgcgggtagccagcgccttcgccgcggtctgcgcacgctag

SEQ ID NO: 270187 - DNA, 615 bp, Klebsiella pneumoniae
atggataatatcctttcccctgaaaaactgacccacacctggctggaggataccctggcgctgctgttcggcacgctgatgatctcctttggcattattttatttcgccaggctggcgccctgaccggcgggacggcgggcatggcctttctgatccactatgccacccacctgccgtttggcgtggtcttcttcgtcattaacctgccattctactggctctctgtccggcggatgggcgccgccttcacgctgaaaaccttctgcgcggtcggactggtgtccctgttctctgacctgcacggttactttatccatgtcgatcgcctgaatccctattacgccaccctcttcggcaacatcatggtcggcatcggctttgtggtgctgtttcgccataaagcgagcctcggcggcgttaatattctggccctctatctgcaggacaaaagcggcatccgcgccggtaaattccagatggtggttgacgcctgcatcgtcaccgcctcgctgtgggtggttagcctgccgatgctgctggtctctgtcctcggcgccgtgattttgaattcgattatcgccatgaaccaccgtcccggacgctacgcggtgtaa

SEQ ID NO: 270188 - DNA, 480 bp, Klebsiella pneumoniae
atgtacaacatcgacgactatgatctgaaaatacttaccctgctgcaggccaatggccgtttaaccaatcaggagctgagcgagcttatcggcctgtccgcttcccagtgttcgcgccgccgtatcgcccttgaacaggcacagcttatcctcggctaccatgcgcgtctggcgccggatgccgccgggcaggagatgcttggcctgattgaggtgcgtctgctgaatcacaccccgcaatgcgtggagagctttcatcagatgctcagtgaagtggacgccattctggacgcctggaaaaccaccggcgacgccgattatctgctgcgggtaacggtcccggacctgcccggtctgagccatttgatcagccatattctggcgcaaaacaaaggggtggcccatctgaaaaccgccgtcgtgctcaaccgccttaaagagaacggccagctgatgccgggcacgaccccgctgcgctga

SEQ ID NO: 270189 - DNA, 1380 bp, Klebsiella pneumoniae; identical to SEQ ID NO: 235216

SEQ ID NO: 270190 - DNA, 747 bp, Klebsiella pneumoniae
atgaagcatgtgcacaagctggcctggataggcctgttcgtcaatattattatctgttttgtcgcgcgaaatttattacttgatgaaggacagctgaacttccatagtcgggcggacggcgtatggtcctggctggtgctggccctgtttattgccgtggtggttcaggcgatcagcataatgctgtcaggccgctacccttatctggccatcgtcctggcgtttgttggcggcatcgtgatggtgcccgccagcgtgatctttctggtgggtagtctgttcagcttgcaaacgcggattaacgccggatttacgccctggcgatcaaccacggcagtgggcgaggctgataaccagcagctattaacctttaatgcctcaggcttttatccccaaggggcgctggcgctcatcgccgggatcattattttaatgattggcatggggataggcggagtatttattgccgccggtattgttgcgctgtgcaatggctatcgtctgcaaaatcgggtggtgattggcgtgagcggcgagtcgatgatatttacgccggggctttatgccgatacctacgttattcccttgcgggatgttgccgtagttgaacgcagcaataatgatgcgaaagtccggctgctgatccgttccagcggcagaagcttcacgttgcgtaaaaaactgctcgccggcgataaggttaatgacgccttcgccgccattctggcaaaactgactaccgtttaa

SEQ ID NO: 270191 - DNA, 195 bp, Klebsiella pneumoniae
atgtattacacgttaggagataccactctccatttttatcgctatcagtgcaaattttacgtcgcccactgggaagggggtaacgtgatgagcgaaaaatttaaatcgtttatcgaacagatcactgagaagaccgggctggatgcgaaacgcgttgagaccgccgcgcgcgattattttactaacgtggattaa

SEQ ID NO: 270192 - DNA, 1119 bp, Klebsiella pneumoniae
atgaccccgccctctctgtacatattgctgacgcttaacaacgtggagaacctgatgagtaacaacacgataaatatcgccctgattggctacggattcgtcggtaagaccttccacgcgccgcttatccgttcggtgccggggctgaacctggcgttcgtcgcttcccgcgatgaagagaaggtcaaacgcgacctgccggacgtcacggtgatcgcctccccggaagctgcggtccagcatccggacgttgacctggtggtcatcgcctcccctaacgccacgcacgccccgctggcccgcctggcgctgaacgccggcaaacatgtggtggtggataagccctttaccctcgatatgcaggaggcccgggagctgatcgccctggcggaggagaaacagcgtctgctttccgtcttccataaccgccgctgggacagcgactatctcgggatccgtcaggtgattgagcaaggcaccctcggcgcggtgaaacacttcgagtcgcatttcgaccgcttccgcccggaagtccgcgtccgctggcgcgagcagaacgtcccgggcagcggcttgtggtttgacctggggccgcacctgatcgaccaggcgctgcagctatttggtttgccgcagtcggtgcaaggtaacatagccaccctgcgcgacggggcggagatcaacgactgggcgcatgtggtattaaactacccggcgcataaagtgattctgcactccagcatgctggtcgcgggcggctcgtcgcgcttcaccgtgcacggcgataaaggtagcgttatcaaagcgcgggccgaccaacaggagagccagctgctggcgggcgtggtaccgggcagcgccggctggggccaggatgacgacccgctggttatctatgatgcctcgctgcaggcccacgcgcaggctaccccgcagggggatcagcgccagtactatatgctgatccgcgatgcgctgaagggccagatcgccaatccggtgccgccggtggaagcgctggcggtgatggccgttctggaagcggcggtgcgctctgctgaaagtggtatggtgcagaccctggacctgtccgacgacgagcgcaacacgctgcgctaa

SEQ ID NO: 270193 - DNA, 744 bp, Klebsiella pneumoniae
atgcataagctcgccaggcaaaaacatattctcgacaggcttagcgaaaccggtcagctgagcattagcgaactggttgcagagctgcaggtgtcggccgatactattcgccgcgatctgagcgacctggaacaacagggcgtgctgcagaaaagccacggcggggccatcgcccttaacgtcccggccatgacgcgccagggcagaaacgctcttctcacccagaccaagcagcgcctgggtcagcaggtcgccgcgcgcattccctctggctcgacgctgtttctcgacgctggaagcacgctgttggcggtggcagcccagctgaaagggccgttgaccgtgatcacggcatctctggatatcgctcagctgttcagcgaccgtgccgatatccagctgatcctgcttggcggccagtgggatagtaaacaacggctgttcgccggcagcgccaccctggcgctggtcacccgctaccgggccgatatcgccattctcggcgcctgcgcgctccatgccgggctggggctgagcgccagccaggaagctgatgccgacgttaaacgcgccatgctggccgccagcgccgagcactggctggtggcggaccataccaaactcaaccgctgcgaaccgtggcgggtggccgggctcagcgacattcaccatctttttcttgatcgtccctgggctgagctgggggatgaccccgccctctctgtacatattgctgacgcttaa

SEQ ID NO: 270194 - DNA, 1374 bp, Klebsiella pneumoniae
gtgaccgctttttctaccctgactgttttacctgccgcccaattagccaaccttaacgagctgggttatctgtcgatgaccccggttcaggccgccgccctgccggcgatcctcgcggggaaagatgtgcgcgtgcaggcaaaaaccggcagcggaaaaacggccgcatttgggctgggtctgctgcagcatatcgatccggcgcgcttcgagacccagtcgctggtgttgtgcccgacccgcgagctggccgatcaggtcgccggcgagctgcgccgcctggcgcgctgcctgccgaacatcaagattctgatgctctgcggcgggcagccctttggcgcccagcgagattccctgcagcatgccccgcatattatcgtcgccaccccgggccgtctgctcgatcatctgcagaagggaacggtctcccttgacgcgctgcagaccctggtgatggacgaagcggaccgcatgctcgatatgggctttagcgatgccattgatgaggtgatccgcttcgcaccggctgaccggcagacgctgctgttctctgctacctggccggcggcaatcgcggcgatcagcggccgggtgcagcgcaatccgcagacaattgagatcgacactgtcgatgcgctcccggcgattgagcagcagttctttgaagtttcccgccacggtaagattgccctgctgcagcgcctgctcagccagcatcagcccgcatcctgcgtggtgttctgcaataccaaacgcgattgccaggcggtctgcgatgcgctcaacgccgccgggcagagcgccttgtcgctgcatggtgaccttgagcagcgcgatcgcgatcagacgctggtgcgcttcgctaacggcagcgtccgggttctggtggcgaccgacgtcgctgcccgcggtctggacatcaaatccctggcgctggtggtgaatttcgagctggcctgggatccggaggtgcatgttcaccgcatcggccgtaccgcccgcgccggtgaacaagggctggccatcagcttctgtgcgccggaagaggcgcagcgcgccactattctggccgacatgctgcagctttccctgaactggctgccggcgccgacgggcaacaccatcgcgccgctgacggcggagatggcgacgctgtgtatcgacggcgggaaaaaggcgaaaatgcgcccgggagatgtgctgggagccctgaccggggatatgggctttgatggtgccgatatcggcaaaattaccgtccacccggcccacgtctatgtggcgatccgccagaatatggcgcagaaggcgtataagcagttacaaaatggcaagatcaaaggtaaatcctgccgcgtacgactgctgaagtaa

SEQ ID NO: 270195 - DNA, 936 bp, Klebsiella pneumoniae
atgctgcaaaaccaagaaatcagtaaaaaagaaaagtacaacatcgataagctgcagaaacgtctgcgccgcaacgtcggtgaggcgattgccgacttcaatatgattgaagagggcgaccgcattatggtttgtctttcaggcggcaaggacagctataccatgctggagatcctgcgcaatctgcagaaaagcgcgcccatctccttctcgctggtggcggtgaacctcgatcagaagcagccagggttcccggagcatattctgccggcgtatctggagcagctgggggttgaatacaagattgtcgaagagaacacctacggcatcgtcaaagagaagatcccggaaggaaaaaccacctgctcgctgtgctctcgcctgcgtcgcggcatcctctatcgtaccgccaccgagctcggggcgaccaagatcgccctcggccatcatcgcgacgatatcctgcagacgctgtttttgaatatgttctacggcggcaaaatgaaagggatgccgccgaagctgatgagcgacgacggcaaacacatcgtcatccgcccgctggcctactgccgcgaaaaggacatcgagcgcttctcccaggccaaaggcttcccgattattccgtgcaacctgtgcggttcgcagccaaacctgcagcgccaggtgatcgccgatatgctccgcgactgggataagcgttatcctgggcgcattgaaaccatgttcagcgcgatgcagaacgtggtgccttcgcacctgagcgacgtcaatctgtttgattttaaaggtatcacccacggctcagaggtggtggatggtggcgatctggcgtttgaccgggaagatattcccctgcagcccgccggctggcagccggaagaagaagacgcccgtctcgatgagctgcgtctgaacgtggtggaagtgaaataa

SEQ ID NO: 270196 - DNA, 435 bp, Klebsiella pneumoniae; identical to SEQ ID NO: 241339

SEQ ID NO: 270197 - DNA, 213 bp, Klebsiella pneumoniae
atgcaccaccatccggttaaatcttcccgaattatctccgtcgcctacgatgacgcctccgccacactggaaatctatttctatcaccagccgccattacaatataccggggtcccaccgcgtatttttcatgattttttacaggtggtgtcaaaaggccggtattatgatggggtgatcaaaggaaaatttcccgaacgcaagctacgttaa

SEQ ID NO: 270198 - DNA, 1125 bp, Klebsiella pneumoniae
atgaaaagaaaagtactggccctcgttattccggctttattagccgccggtgccgcgcatgcggcggaaatttataataaagacgggaataaattagatctctatggcaaggtagatggtctgcattatttctccagcgactcgaaaaaagacggcgatcaaacttatttacgttttggctttaaaggcgaaacccagatcaacgatatgcttaccggctatggccagtgggaatataacgttcaggccaacaacaccgagacctccagcgatcaggcgtggacccgtctggcattcgccggtatcaaagtgggcgattacggctccttcgactacggtcgtaactacggcgtgctgtacgacgttgaaggctggaccgatatgctgccggagttcggcggcgactcctacacctatgcggataactttatggcaggccgcgccaacggcgtcgcaacctaccgtaacagcgatttcttcggtctggtggagggtctgaacttcgccctgcagtatcagggtaaaaacgaaggccagaacgcgcaggatatcaacgtcggcaccaataaccgcagcagcgacagcgatgttcgcttcgacaatggcgatggtttcggcctctctacttcctacgacttcggcatgggcatcagcgcggcggcagcttacacctcgtctgaccgtactaacgatcagatgacccagaccaacgcgcgcggcgataaagcggaagcctggaccgccggcctgaagtacgacgccaacgatatctacctggcgaccatgtactctgaaacccgcaatatgaccccgtacggcaatgacggcgtggccaataaaacacaaaacttcgaagtcaccgcgcagtatcagttcgacttcggcctgcgtccggccatctcctacctgcagtccaaaggcaaagatctgtacaataacggccgctatgccgataaagatctggtcaaatatatggacgttggcgcgacctattacttcaaccgtaatatgtccacctatgttgattacaaaatcaacctgctggatggtaacgacaaattctacgaagacaacggtatctctaccgataacatcgtcgccctgggcctggtttaccagttctga

SEQ ID NO: 270199 - DNA, 3528 bp, Klebsiella pneumoniae
atgattacgattgatggtaatggcgcggtcgcttccgtcgcgtttcgcaccagtgaagttatcgccatctacccgatcacgcccagttcaacgatggcggaacaggctgacgcctgggccggcaatgggctgaaaaacgtctggggcgatgttccccgcgtggtcgaaatgcagtcggaggcgggcgccattggcgccgtacatggcgcgctgcagaccggcgccctctccacctcctttacctcatcgcagggcctgctgctgatgatccctacgctgtacaaactggccggccagctgatgccgtttgtgctgcacgtcgccgcccgcactgtcgctacccatgcgttgtcgatcttcggcgaccattccgatgtcatggccgtccgccagaccgggtgcgccatgctgtgcgccagcagcgttcaggaagcgcaggatttcgcgctaatctcgcatatcgccaccctgcaaagccgggtgccgtttattcatttctttgatggtttccgtacttcgcacgaaatcaacaaaatcgccccgctggcggatgacactattcgcgccctgctgccgcaggataagatctctgagcatcgccagcgcgcgctcaacccggaacacccggtgatccgcggaacctcggccaaccccgacacttacttccagtcccgggaagctaccaatccgtggtacgacgcggtgtatgaccatgtcgagaaagcgatggacgatttcgctgccgccaccggccgtcagtacaaaccgtttgagttttacggccacccgcaggcagagcgcgtgatcgtcattatgggctcggccatcggcacctgcgaagaggtggtcgatgagttgctgagtcgcggcgagaaagtcggcgtgctaaaagtccgcctctatcgcccgttctccgccgcccacctgctggcggcgctgccggagagcgcccgcgcggttgccgtactggatcgcaccaaagaacccggcgcgcttgccgaaccgctttacctcgacgtgatgaccgccctggcggaagcctttaaccgcggcgagcgcgagacgctaccgcgcactatcggcggccgctacggtctctcctccaaggagtttggtccggaatgcgtgctggcgatattcagtgaactgcaggccgcccagccgaagccgcgctttaccgtcgggatctatgatgacgtgaccaacctgtcactgccgctgggcgaaaataccctgccggcagaggccaagctcgaggccctgttctacggcctcggcagcgacggcagcgtgtcagccaccaaaaacaacatcaaaatcatcggcaactcgaccccatggttctcccagggctattttgtctatgactcgaagaaagcgggcggcctcaccgtctcgcatctgcgggtcagcgaaaaaccgattcgttcatcgtatctgatttcgcaggctgatttcgtcggctgccaccagctgcagtttatcgataaataccagatggccgagcggctgaagcccggcggcattttcctgctcaacacgccgtacagcgccgttgaggtctggtcccgcctgccccaggaagtccaggccaccctgaatcagaaaaaagcgcgtttttacgtggtcaacgcggcaaagatcgcccgcgaatgcagcctcggggcgcgcattaataccgtgatgcagatggcctttttccatttaacccagatcctgccgggtgatagcgcgctggcggaactgcaggcagccatcgccaaaagctacagcagcaaaggtcaggagctggtggagcgcaactggcaggcgctggccctggcccgtgaatcactggcggaagtaccgctccagccggtgaacgccagcagtccgaaccgcccgccggtggtctccgacgccgcgccggatttcgtcaaaacggtcaccgccgcgatgctggccggcctcggcgatgcgctgccggtctccgctctgccgccggacggcacctggcccatgggcaccacccgctgggagaaacgcaacatcgccgaagagatccccatctggaaggaagcgctgtgtactcagtgcaaccactgcgtcgccgcctgcccgcactcggcgatccgcgccaaagtggtcgccccggaagagatggagaacgcccctgccagcctgcattcgctggatgtgaaatcccgcgatatgcgcgggcagaaatacgttctgcaggtcgccccggaagactgcaccggctgcaacctgtgcgtcgaagtgtgcccggcaaaagaccgccagaacccggagatcaaggccatcaatatgatgtcccgcctggagcatgtggaagaggagaaggtcaattacgagtacttcctcaacctgccggaaatcgaccgcagcaaacttgagcgcattgatattcgcacctcgcagctgatcagcccgctgtttgaatactccggcgcctgctcgggctgtggcgaaacgccgtatatcaaactgctgacccagctctacggcgaccgaatgctgattgccaacgccaccggctgctcctccatttacggcggcaacctgccctcgacaccgtacactaccgacgccaacggccgcggcccggcgtgggccaactcgctgtttgaggataacgccgaattcgggctcggcttccgcttgaccgtcgaccagcatcgccagcgcgtgatgcgcctgctgagcgaattcgccgacaaactgccggtagagctgaacgcggcgctgcacgccgaggcgacgccggaagttcgccgcgaacaggtggcggcccttcgtcaggcgctggccggcgtggcgggagctgaagagctgctgaccgatgccgacgcgctggtggagaaatccgtctggctgatcggcggcgacggctgggcttacgatatcggcttcggcggcctggaccatgtactgagcctgacggaaaacgtcaatattctggtgctggacacccagtgttactccaacaccggcgggcaggcgtcaaaagccaccccgctgggagcagtgactaagtttggcgagcacggcaaacgcaaggcgcgtaaagatctgggcgtcagcatgatgatgtacggtcatgtttatgtggcgcaaatttcgctgggcgcgcagctgaaccagacggtaaaagcgattcaggaagcggaagcctatccggggccatcgctgatcatcgcctatagcccttgcgaagagcatggctacgatctggcgctcagccacgaccagatgcgtcagctgaccgccaccggcttctggccgctctaccgcttcgacccgcgtcgggcagatgaaggcaagatcccgctggcgctagattcccgtccgccatcagacgcgctggccgagacgctgcttaatgagcaacgtttccgccgcctgaacgcccagcagcctgaagtggcggagcagctatggaaagacgccgccgccgatctgcagaagcgctatgactttctcgcccagctggctggcaaagcggagaaatcgccaagcgaaggttaa

SEQ ID NO: 270200 - DNA, 264 bp, Klebsiella pneumoniae; identical to SEQ ID NO: 211692

SEQ ID NO: 270201 - DNA, 441 bp, Klebsiella pneumoniae
atgaacaaatttgcggcgcttctggcggcaggtatgctgctgtccggctgtgtctataacagtaaggtgtccaccggtgcggaacagctgcagcatcatcgtttcgtgctgaccagcgtcaacggccaggcggtcaacgccagcgaccggccgctggagctcagcttcggtgagaagatggctattacgggcaagatgtatgtatccggcaatatgtgcaacggctttagcggggaaggtaaagtgtcggacggcgagctgaaggtcaaatcgctggcgatgacccggatgctgtgccacgacgcccagctcaataccctggatgcgacgatcggcaagatgctgcgcgagggtgcgcaggtcgatctgacggaaaaccagttgacgctggcgaccgccgaccagacgctggtctataagctcgccgacctgatgcactag

SEQ ID NO: 270202 - DNA, 990 bp, Klebsiella pneumoniae
atgaaaatcgcggtttatagtacgaagcagtacgataaaaagtacctgcagcacgttaatgatgcatacggctttgaactggaattcttcgatttcctgctgacagcgaagactgccaaaaccgccaacggttgcgaagcggtatgtatcttcgtcaatgacgacggcagccgcccggtgctggaagagctgaaggcccacggggtgaaatatatcgccctgcgctgcgccgggtttaacaacgtcgaccttgaggcggcaaaggagcttggcctgcgcgtcgtgcgcgttccagcttactctccggaagcggtcgctgagcatgcgatcggtatgatgatgtcgctcaaccgccgcatccaccgcgcttaccagcgtacccgcgatgccaatttctccctcgaaggcctcaccggcttcaccatgtacggcaaaaccgccggggtgatcggcaccgggaaaattggcgtagcgatgttgcggatcctcaaaggcttcggcatgcgcctgctggcgttcgacccgtacccaagcgccgccgcgctggagctgggggtggaatatgttgacctcgccacgctgtacaaggaatcggacgtgatctccctgcactgtccgctgaccgacgaaaactaccacctgctcaatcgcgaagccttcgatcagatgaaagacggggtgatggtgatcaacaccagccgcggcgccctgatcgactctcaggcggccatcgacgccctgaagcaccagaaaattggcgcgctggggctggacgtttatgagaacgaacgcgatctgttctttgaagacaaatccaacgacgtgatccaggacgatgtcttccgccgcctctccgcctgccataacgtgctgtttaccggccaccaggcgttcctcaccgccgaggcgctgatcagcatttcggagaccactctgggtaacctgcagcaggtcgccaacggcgaaacctgtccgaacgccatcgtctaa

SEQ ID NO: 270203 - DNA, 501 bp, Klebsiella pneumoniae; identical to SEQ ID NO: 269140

SEQ ID NO: 270204 - DNA, 2640 bp, Klebsiella pneumoniae
atgaagggtaaatataaagccgccatcgcgctggtgttagttctggtgttattgccgctaaccctgctgttgacgctaacccactgggtgccgacgctggcgggcatctggctgcccgtgggcacgcgtatctctttgcaggagagcccgcgcctgacgcggtcggccctgctgatccccgatctgcgttatctggtgggcgactgtgaaatcgcccgggtgaccgatgcccgtctctcgcgtcccagccgctggcggctgcatattggccagctggagatcaacagcgcctgcctgagcaaactgccggccagcgatccctctcccggttcaccgcgcacgcttgccgaatggcaatcgatgttgccctatagctggttaaccattgacaatctgcggctctcgccgtgggagaaatggcaggggcggctggtaatgtcattaacgcctgcgcagcaggatatcggctttgccgggaaggaactgagtctgcaggcgcgcctgcgcggccaggcgctcaccgtcagccagttcagcgcccggctgactgacgatcagccgccggtgaagttggtggggaccttccatctgccgctggtgccggatggtctgccggtcgacggccagatgcagggcaccttcgaattcccgcagactgcggaatggatcgatgctgagctcgagtggcagcacaatcgcggccagctgctggtcaccccgcggggtgaggtagagcctattctggacctgccgtgggagatcaccccggagcggatcaccatcagcgacggccgttggcgcacccgttacgaggcgtatccgctgcgcgggcgggtggcgctgtcggtgggtaactggcagcagggcaccgaacagatgatcgtcagcggtcgcctgaatgttctcaccgaggggcatgccgggaagggcaatgcggtactgaatattggtccgggcaagctgagcatggataacagcgatctgccgctgcggctcaccggcgaggccaagctgggggagatgatactatacgcggcgctgccggctcagctcagcgggccgctgatcagcccgcagctggcttttcaccccggtgcgttgctgcgctcgcgcgggcgggtgatcgacgcgctgaatattgacgaaatccgctggccgctggccggggtgaaggtcacccagcagggcgtcgatggccgcctgcaggcgatccttcgcgcccatgagcagcagatgggcgactttacgctgcatctggacggtcaggcgagcgattttctgcccgacagcggccgctggcagtggcgctactggggcgagggacattttaccccgatgcaggcgcgctgggatgtgaagggcagcggggaatggcgcgacaatgctattaccctgagcagcctttccaccggcttcgataagcttgagtacggcacaatgcgggtcagcaccccgcgtctgaccctcgagcagccgatccgctggctgcgcgatgctgagcatccgcggttgaccggcgcgctgtcgctggacgccgccaaaaccaccttctccggcggcagctatctcccggcctcaacgctgaaattcgctctcgacggtcgggacccgacgtggttccagttcaccggcgccctgcatgccgaggctatcggtccggtgcgtctgtccgggcgctgggatggcgaacggctgcgcggccaggcgtggtggccaaaacagtcgctaacggtgttccagccgctggtgccgccggactggaagatgaacctgcgcgaaggcagtctctacgcgcaggtggccttctcggcggcagccgggcagggatttgaggcgggcggccatggcgtcctgaagggcggcagcgcctggatgccggataaccagatcaacggcgtcgacttcgtcctgccgttccgcttcagcgacggtcactggcagctgggcatccgccgcccggtctccctgcgcattggcgaaatcgtcaaccaggtcaccgcgcgtaatctgacggcggacctgcagggcacctggccgtggagcgaggccaatccgctgcagctcagcgacgtcagcgtcgatctgttaggcgggaaactgacgttgctgcagctgcgtatgccgcagcgcgacccggcgttgatccgcctgcagcatatctccagcagcgaactgaccagcgccgtcaaggtgaaacagttcgccatgtccggcgcggtgagcggcgcgctgccgctgtggctggagaataatcaatggatcatccacgacggctggctgcgcaatgacggaccgatgaccctgcggctggataaagacaccgccgatgcgctggtggcggataacgtctccgccggggcggcgattaactggctgcgctatatggaaatctcccgctcgtggacgcagattaacctcaataatctgggcgtgttgacgcttaaggccagcatcaacggcaccagccgggtggacgggaaaagcagtaccgtgcatttaaactacgctcatgaagagaatattttcgacctgtggcgcagtttgcgcttcggcgacaatttgcaggcgtggctcgagcagaatgctacgctgcccgtacggcgctgtacggacggtaagacatgtaaggaacctaaatga

SEQ ID NO: 270205 - DNA, 186 bp, Klebsiella pneumoniae; identical to SEQ ID NO: 269138

SEQ ID NO: 270206 - DNA, 324 bp, Klebsiella pneumoniae; identical to SEQ ID NO: 138935

SEQ ID NO: 270207 - DNA, 903 bp, Klebsiella pneumoniae
atgatgaccacggcagagggagggctggcgtatcagcgctggctggcgacgatcaatcaggtctgcggccatttcgccgcccggccgttggaggagagtttccacggcgagattgacgcccgctacgccggcagcctcaaggtcagtaccgtcaccgccgccggcgtcaatctctaccgcacgcgcaatgagataaaacgcgataacgacgcctggttctataccgtgtttcagctcgccggcgaagccatcctcgaacaggacgatcgccaggtgacgctggcggcaggcgatatcacgttaatcgacgccgcccgcccatgctccatcgtctggcagcagacctcgcgtcaggcctcgctgctgctgccgcgccagcgggtggcgcccacaggggacatcactaccgcctgccggctggacaaatctctgccaatggtccagctcagccagcgactgctgctggaaagcatgggcggcacgacgctctccgccagcgagagcgaagccgcgctggaggcgatcgcctgcctgttgcgcccggtgctgcatcagcgcgatcctgccccttcccggcgggaaaagcagtttcagaagattattgcgttaatcgatgcgtccattcagtcggagcatctgcgtccggagtggctggccagcgagacgggcatgtcggtacgcagcctgtaccggctgtttgccgatcaggggctggtggtggcgcagtatattaagaaccggcggttggatctgtgtgcccaggcgttacagaacgtccatgacgatgaaaagctggcggggatcggctaccgctggggcttcagcgaccacagccatttctccaccgcctttaagcagcgctttggcgtcaccccgggggaataccgcaagcgctgtcgctaa

SEQ ID NO: 270208 - DNA, 1500 bp, Klebsiella pneumoniae
atgtccacctcacagatagcgctgcttgccagcgtccagcagtttttagaccgtcagcatggcctgtatatcgacggcgccccctgcgccgcgcagagcgaaaaccggttaaccgtctgggatccggccaccgggcaggcgattgccaccaccgccgacgccagcccggcggatgtcgaccgggcggtgatgtccgcctggcgcgcttttgtcgatcgccgctgggccgggcgcaccccggctgaccgtgaacgcatcctgctgcgttttgccgatctggtggagcagcacggcgaagagctggcgcaactggaaaccctcgagcaggggaaatccattgccatctcccgcgcctttgaggtcggctgcaccctgaactggatgcgctacaccgcggggctgaccaccaagatcagcggccggacgctggacgtttcgatcccgttcccgcaaggggcgcgttaccaggcgtggaccaaaaaagagccggtcggggtggtggcgggcatcgtcccgtggaatttcccgctgatgatcggcatgtggaaggtcatgccggccctggcggcgggctgttcgatcgtcatcaaaccctcggaaaccaccccgctgaccctgctgcgggtggcggagctggcgacccaggcgggcgttcctgacggggtgttcaacgtggtcaccggcagcggcgccggctgcggcgcggcgctgaccgcccatccgcaggtggcgaaggttagctttaccggctcgacggcgaccgggaaacagattgcccgcgtggctgccgaccgcctgacccgcgtgacgctggagctgggtggcaagaatccggcgattgtgctcaaagacgccgacccccagtgggttattgaggggctgatgaccggaagcttcctcaatcaggggcaggtctgcgccgccagctcgcggatctacatcgaagcgccgctgtttgataccctggtcagcggcttcgagcaggcggtgaaatcgctgcaggtggggccggggatgcaggagacggcgcagatcaacccggtggtctcccgggcccactgcgacaaggtggcggcctacctcgaagaggctcgccagcagaaggcagagattatcagcggcagcgccggaccagatgcgggagggtactatattccgccgacgctggtggtaaaccccgacgccggactgcgtctcagccgtgaggaggtttttggcccggtggtgaacctggtgcgagtggccgatggcgaggaggcgctgcgcctggccaacgacagcgattttggtctgaccgccagcgtctggacccgcgatctgacccaggccctgaactacaccgaccgtctgcaggcgggaacggtatgggtcaacagccataccctgattgacgccaacctgcctttcggcggcatgaagcagtctggaaccggccgcgatttcggccctgactggctcgacggctggtgcgaaaccaaatccgtctgcgtgcgctactag

SEQ ID NO: 270209 - DNA, 891 bp, Klebsiella pneumoniae
atgacagcatttcctaaggttgcgctaattggtcccggcgccatcggcaccacgattgccgccgccctgtttgagagggggagggcgccgatggtctgcgggcgtaccgcgcattcggcgctggtgctgcgcactgacgagggtgagatcgtggtgcccggcccggtgcacaccgacccgatggcgatagccgcccccttcgacctggtctttgtcgcggtgaaaaccacccagacggaggccatcgccccctggctgacggccctgtgttcccctgacaccgtggtgtgcgtgctgcaaaacggcgttgagcagcgccagcagtttgcccccttgaccggcggcgcgacggtgctgccgtcggtggtctggttcccggcccagcgcgatgccgatgcctctgtctggttgcgcgccacgccgcgcctgacgctgccggatctgccgggggcagagcgggtgcagcaggcgctggcgggaacccgctgcgcggtggacctggcggctgattttaccaccgtggcctggcgcaaactgttgcagaacgcggttgccggactgatggtgctgaccggacgccgcgccgggatgttcgcccgggaggacatcactgccctcggactggcttatctgcgcgaatgcctacaggtggcgcgggcggaaggggccgccctgagcgacaacgtgccggaggagattatcgccggctttcatcgggcgcctgccgacttaagcacctctattctgatcgatcgcctcaatggccgaccgctggagtgggatattcgtaacggcgtggtgcagcgtcgcgggcgtcagcacggcattccgacgccgctcagcgatatcatcgtgccgctgctggcggcggccagcgacggcccgggctga

SEQ ID NO: 270210 - DNA, 732 bp, Klebsiella pneumoniae
atgcgcgattccgatgaagagcagatccgcatcgacctggcggccacctttcgcatcattgcccatcttggcatgcatgaggcggtggccaaccatttcagcgccgcgctctccgccgacgggaaaacgtttttactcaacccgaagtggaaacacttttcgcgcatccgcgccagcgatctgctggtgctgaacgccgatgatgaacgttgcgccgcgcgccctgacgtcgatgccaccgcgtgggccatccacgggcagatccatcagcgactgcccgacgtgcgggtggtgctgcatctgcacccggtgtacaccaccagcctcgcctgtctggcgacgccgcagatcctgcctatcgaccagaacacggcccgctattttaaccgggtcgccgtcgataccctgtacggcgggatggcggacaccgcggcagaaggcgcccggctggcggggctgctggcggataaacgccgtctgctgatgggcaaccatggggtgctggtgaccgccccgaccatcggcgaagcgttcgacgatatctggaccctggagcgcgcctgtcagatcctgatcaccgcctggtcaaccggccagccgctgaaggtgctgtcagacgcggtggcggaaaaaaccgcccaggactgggagaagattgccgatttctccaggcagcactttgccgagatgaagcagttgatgatcgacctcgatccctccctggtggactaa

SEQ ID NO: 270211 - DNA, 831 bp, Klebsiella pneumoniae
atgacacgcattttcgcaccacgcccgctgaccctgctgctctgcgcagcggctgctctgacatcctttagcgcactggcctttcagcaaagcggtaagatcaccgccggttcggacatgaccttttttccttacgagtacatggaaaacaataagccagccggttttgacatcgagctgctcgatggtctggcgaagactatgggccgtgaagcagtgaatatcgatacccgcttccccaacctgatccccgggctgcagggcgggcgcttcgatatcaccaactcgtcgatgtacattaccgccgaacgcctgaaggtgatcgatatggtgccgtacctgaaaagtggggaagcgatcctcgcccgcaaaggcggcgactaccagcctaagacgccggaagacttctgcgggcataaaatcggctcgatgggcgccacctcgtggctggcgcaattgcagaagctttccgccgactactgcgtgaagaaggggttgaagccgattgcgctgagcgtttataccaccgacccgcagaccacccaggcgctgttgtcgcgcgcggtggatgcgcagatcaccgacgccgccgtggcgcgcggggtggtggaaaaactgggtgaccgggtggttatctcctctgacacgctgatctatccggtgctgaacggctttggcgttaaaaaaggcaatactgaggtgaaaaccgccctcgaagaggcgctgaaaaaatacagcgcgacgccggaatatgccgccctgctgaagaaatatcacttccaggcgccgacggcggacgatctgcagaccctgatgccgaaagcggagtaa

SEQ ID NO: 270212 - DNA, 873 bp, Klebsiella pneumoniae
atgattgcgcagtggcaaattgatcagtttcatcagcagggttttctggtggtcgaagaggtgctttccagcgccgacatcgccgccctgcagagcgatttcgacggctgggtcgaggagagccgcggtcacgcgacggtgtggggagaaaccctcgacgggcggccgcgcttcgatatcgagcgcgatcatgctcctgaccatccgtcgctgcgccgggtcgcctccccgacggagatctccgaggcctatcaccatactgcgctgaactcacggatggcgaccatcgccgcgcagctgatcggcggcagcggcacccgctttcatcacagcaaaattaactccaagctgccgcacaccgccaccgaggtgaaatggcatcaggatttccttttcaccccacacagcaatgacgacatcatcaccgccctgctgatggtcagcgaggtgacgccagagaatggtccgctcaacgtggtgccgggcagtcatcaggggccgctgtggtcccactggcaggaggggcgcttcacgggggcggtggatgatgaggtggtggcgacgcactgccagcagccgcaggcctgttttggcccggcgggctcagtctgctttatgcatacccgcctgctgcacgcctccagccccaacgagaccgccctgccgcgcaccctgttcatcagcgtctacgccgcggaggatgcgctaccctacggcgaaaacccgctgccgagccgccatgccggccaactggtcgcgggagaagagagcggtctggtgcgcagcaccaataaccagcttcgtctgccgcagaagccgcgcggcgcttcgttttttgttcagcaggccggcgccgatcgcgccagcatgtaa

SEQ ID NO: 270213 - DNA, 1521 bp, Klebsiella pneumoniae
atgacgtttaactggaactacatgttaagcctgctcagcgatgccgatttttggtgggccacctggaccgtcattaaattaagtctgctgacctggggctgcagtattgtgctcggatttattctggcgctggccaaacagtcgccgcgcggctggttatccaccccagcccggctgtatatctggttatttcgcagtatgccgctgctggtcctgctgatttttgtctacaacatgccgcaggcgctgccctccttcgccccggtgctgaacgatcccttctgggccggcctgctggcgatggtcctcagcgaagcggcttatatcgccgagatccaccgcggcggattgctctccatccctcgcgggcagagcgaagccgcacgggccctggggttgcgctacgccgggatccagtggcgggtgatcatcccccaggcgctgcgcgtcgccctgccggcgctggccaatgaatatatcgccatcgtgaagctcagttcgctggtgtcggtgatctccctgaccgaaatattgatggtcggccagcagctctactcgcagaactttctggtcatggagacgatgacggccgtggcgttttattacatctttatcgtcacggtgttcgattttctgctgaaacggctggagaactaccttgacgtgacccagcgcaataccgctcgtccggtagatgccgagatgcagcggctggccagcgcccgccgcccggcgatggcgcgcagcgtcgcccagagtcatgagccggcgctgcaggcctctaagctgcataaggcctacaacaacgtcgaagtgctgggggcggtgagcctgcagatccagcccggcgaggtggtctcggtcatcggtccgtcaggctcggggaaaaccaccctcattcgcctgctgaacggtcttgagcagatcgataacggcgaaattcagattaacggccaaccctttattcacctcgaccgtcaggggcagcagaagccgcgctttatggagaatgccgaacatcgcctgaacatcggcatggtgttccagagctttaacctgttcccgcatctgaccgtgttcggcaatctgctgctggccccgcgctatcaccatctggcaagtgacgcggagctccgccagcacgcctgcgaactgctgcacaaagtgggcatgctggagcacgcctggaagtatccgcaccagctctccggcggacagcagcagcgggtggcgatcgcccgcgccctgatgatgcgtccgcagatcatgctgttcgatgagcccacctcggcgctggatccggaaaaagtgaatgaagtgctgcaggttatcgaatccctggcccacgaaggcatcaccatggtcatcgtcacccacgagatgaacttcgccttcaaagtgtccgaccggatcgtgtttatggagaaaggccgggtggtgtgcgatgacacgccgcaggcgatgcgtagcgggcaacacccgcgggtcgaggcctttctcaaagatgtttctctggcttaa

SEQ ID NO: 270214 - DNA, 915 bp, Klebsiella pneumoniae
atgaaccgatttaccctgaagcagctcaaatatttcgtcaccgtggtggagacggagagtatcgccgaggcctcccgccagctgcacattgcgcagccgtcgatttcgattgccatcaagaatctggagagcaccttcgaccagcagctgtttattcgccaccatgcgcagggcgtttcgctcacctccagcggtcggcggatctacgataaagcgaaagagctgctgcgcctgtcctgggagttcgaacagaattcgcgagcggataaagagctggtttctggcatgatctccatcggttgcttcgaatcggtggctccgctgtatatgccgaagctggtggccgggtttaagaaatgctatccggaaatcaccctgcatctgtacgacggcgaacagcatgagctgatgcatggcctgcaccgcggccgcttcgacctggcgctggtttacgatctggagctcggccattcgatcaataaagagcggctcaatgccccacataaaccctacgcgctgctgcccgccgcgcatccgctggcgcagaaggcgcaggtgacgctgcaggagctgagccgcgagccgatgatcctcctcgatgcggtccccagtaaaaattattttatctccatctttaaggaaaagggttatcacccggaagtggcttacagttccccctccattgaaatggtgcgctgtatggtgggtcaggggttgggtttttcggtgctggtcacccggccctgctgcgatatgacctacgatggtgaaagagtggtgcagcgggatattgccgacgagatgcccgcctcgaccttaattatggcgcatctcgcgaataatgagcccacgcggccgacgcaactgtttatggattattgtcgcagcatcgaattaaccccaactcacgcctga

SEQ ID NO: 270215 - DNA, 1260 bp, Klebsiella pneumoniae
atgactgaacagattaccgagatcgataccctggtggtgggcgcggggcaggcgggcgtcgccatgagcgagcatctgacccggctggatatcccccacctggtgctggaaaagcagggtattgcccaggcctggcgcagcggacgctgggattcgctggtcgccaacggcccggcctggcacgatcggttcccgggcatggtgttcccggactgcccggcagacagctttgtcggcaaagagcaggtggcagactattttgccgcctatgcccgcagcttcaatgcgccgatccgtaccggggtggaggttttcagcgccgaacgcctcgtcggacggccgggctttcgtatcgacacctcgcagggggtgattgaagcgcagcggatcgtagcggccaccgggccgtttcagcggccagtgatcccggccatcgccccacagagtcaggctattcagcagctccactccgcgcactattttaacccgcagcagctaccggagggcggtgtgctggtgattggcgcaggctcctccggcgtgcagattgccgatgagctacagcgagccggacgcgcggtgtggctgtcggtgggagcgcacgaccgcccgccgcgtcgctatcgtcagcgcgatttttgctggtggctcggggtgctgggaatgtgggatgccgcggccaatgcgccgggtaaagagcatgtcactatcgcggtgagcggcgcgcgcggcggccataccgtcgattttcgccagctggcgcatcagggggtcacgttagtggggcagacccgcggctttgacggtgacaaagcactgtttcaccacgacctggcggagaatatccgccgcggcgatgcctcctaccttgcgctgctcgacgccgcggacgcgtgggtggcccgcaacggcatggacctgcccgaagagccctccgcccgcgaatttctgcccgatccggcctgcgttaccgacccgctgctcagtctcaatctggcggaggccgggatcggcaccatcatctgggcgacgggctacaccaccgactatcgctggctgaaggtcaacgctttcgatgatgcacagcggccacagcatcatcgcggcgtgtcgacggagccgggcgtctatttcctcggcttgccttggctctcgcggcgcgggtccacctttatctggggcgtctggcacgatgccaaatatattgccgatcagatcgccattcagcgccagtaccagcgttaccagccgtcctgttaa

SEQ ID NO: 270216 - DNA, 435 bp, Klebsiella pneumoniae
atgccaactcatacccgtattcgcatgtttaacaccaaagagacctacccgaaccaggcgctgaacaacgatctgtgccaggcggtgcgggccggcaataccgtctacgttcgcggccaggttggcaccgatttcgccggcaatctgattggcctcggcgacccgcgggcgcaggcggagcaggcgatgaagaatgttgaacagttgctgaaagaggcgggaagcgacctctcgcatatcgtcaagaccaccacttatctgatcgatccccgctatcgcgagccggtctatcaggaggtgggcaaatggttaaaaggcgtctttcccatctccaccggggtggtggtgtcggccctcgcgcagccgcagtggctgatggagattgacgttacggcggtgatccctgacgactggcagggggaggcagcagaatga

SEQ ID NO: 270217 - DNA, 675 bp, Klebsiella pneumoniae
atgactctctctattagcgcccgctgcccggaatcaggtcagctgggcattgccattagttcgtcgagcatggccgtgggatcgcgctgtccgtggctattgcctggcgtcggcgcagtcgccagtcagaacataaccttaccgtcgctggggccgcatattcttggtgcgcttgaggcgggggcctccgttgagcaggctctgaacctggccctggcggaggaccgcttccgcgaatatcgccaggtcgcggcgattgatgccaacggtgaagtggcggcgttcagcggagaacatactctcgggatcggtggcaccctggcgggagataactgcgtggcggcgggcaacatgctggccagtcacgaggtgatcgccgcgatggtggccgccttcgagacggcgagcggtgaactggccagccggctgctggccgggctgcgcgcggggattgccgccgggggcgaggccggcccggtccactcggcggcggtgaaggtggtggacgattacccgtggccggtggtcgatctgcgtattgactgggcggagaaggatccgctggcggcccttgagcaactgtggctggcctgggagccgcaaatggacgcctatattacccgggcgctcgaccctcgcgatgcgcccgcctatggcgtccccggcgatgaataa

SEQ ID NO: 270218 - DNA, 1173 bp, Klebsiella pneumoniae
atggcgtccccggcgatgaataacatcctcgccgcgctgctggcttttgacaccaccagccgccattcgaacctggcgatgatcgactggatcgccgattttctcgctgcccgcggcgtggcgtcccgccgcttttatgacccgtcgggcggtaaggccaatctctacgcccggctggggccgtccggcggcggtggggtgatgctctcgggccacaccgacgtggtcccggtggacggccaggcctggagcgttccgcctttcagcctcaccgagcgcgatggccgctactatggccgcggcagcgccgatatgaaggggtttctcgcctgcgtgctggcggcagtggatgactttctggcggcgccgctgcgcatgccactgcatctggccttctcctatgacgaagaggtcggctgtctcggcgtgcgcagcctggtggattttctgcaggcctcgccggagaaaccggcgctgtgcctcatcggcgagccgacagagatgcagccggtgttcggtcataaaggcaaactggccatgcgctgctgcatcgaggggcaggcctgccattcggcctatgccccgcagggggtgaacgccatccgctacgcggcgagactgatcaaccacctggatcggctgggcgtgcgtctggcccggcagcaggacagccgcttttcgccgcccttcagcacgctgcaggtgggcaccattcagggtggggccgcgctgaacattgttccgcagtcctgccgctttgattttgagatccgctacctgccggggatgcgtcccgaagcggtcaccgaggcgctggcggcctacgcccatcgccagctgctgccggagatgcgccgggtaggcagcgggagcgacatccagttccagctgttaagccactatccgccgctgctcagcgatccgcagtccgacttcgcccgctggctggcgcagtggtgcggcagcgaccgcttctccaccgtggcgttcggcaccgaaggagggctgttcgatgagatgggcgtcgcgaccctggtctgcggaccgggcagcatggcccagggccataaggccgatgagtacatcagcatcgcgcagaccgagcgctgtatgacgatgctgagacagctttgcgcgtggatgcgtgccgaaccggcggaaccgctcacctga

SEQ ID NO: 270219 - DNA, 819 bp, Klebsiella pneumoniae
atgcacaatcaacactctccccacatcgatcaagcgaccatcgaccgctggcaggcggatggcgcggtgttattaaaaggcgtctttaccccctgggtcgagcgcctcgccgaaggggtcacggcgctgatggccagccccagcgagtatggtcatgcgcgcacggtgatccccaaagatggttcgccgcctttttttcaggactactgcaactggtcgcggatcccggcgtttagcgagtttgtctttcagtcagcggccgccgagatcgcggcggcgctgatgcagtcgcagacggcgaaatttttccatgaacatacgctggtcaaaccggccggaggcagcacggtgactccctggcatcatgaccagccttactattgcgtctccggcaggcagaacgtcagcttctggatcccgctggacccggtggcggaggccacctcgctgcgttgcattcgcgggtcgcatcgctgggaggaggagttcagtcctacccgtttcaatggcactaagctttacgagcacacccggttcagcaccctgccggatatcgacgcccatgaggacgaatacgatatcgtcagctgggcgctggagccgggggatgcggtggccttccattttcgcaccgtccatggcgcccgcggcaaccccggcgcgcgggcgcgacgggtcttctccgcccgctgggtgggggatgacgcctcgtttgccgatcgcggcggcgtgacgtcgccaccgttccccgagctgaccctgcgggacggcgacccgctggattccccgctgttcccccaggtttggccgcgggcgtga

SEQ ID NO: 270220 - DNA, 951 bp, Klebsiella pneumoniae
atgttcaacgacgccattgtttatgaccgctacgggccgccggccgccgtgctgaccctgaaacgcccgccgctggcgccgctggcgggcggacgggtgcgggtcaggatgcgctttgccccggtgaatccttcggatctgatccccgtgaccggcgcctatcgccaccgcacccgactgccggccgtcgccggctatgaaggccttggcgaggtggtcgccgcgccatacggcagccggctggccgcgggccagcgggtgctgcccctgcgcgggggcggcacctggcagcggtttatcgatctggatgagacctggctggtgccggtgccgccggcggttgacgatctgctggccgcccgcgggtatatcaatccgctgacggcgatgctgatgctcaagcgctggccggttgccggaaaacacctcgtgctgaccgcggcatcgtcctcctgcgccagtctgctggggcagtgggcgctggcgatgggcgcccgctcggtgagcgggattattcgctcgccgcagcatcgggcgcgcctggaacaggccgggatctatccgatcctcgataccgaccgggcgctgatggagaaggtcagccagcacagcgatctggtgtttgacgcggtgggcggcgaactggcgaatacgctgctgtcggtgctgcccgggtcgtcgaccctgatctcctatgggctgttatccgggcggccgctgacccagacgcgcggtagcgcgacggtgcgcaagtttcatctgcgggaggcgctgccgacactcagcgtagcggcgtggcgggcagcgttcgacgaaatctggcagcgcctgccgacgacctcccagccgccggcccagcgcatagcgttgaacgactggcgggcggcgattgccgccgccggccagccgggaagaggcggtaagatcctgctggatttcaccgccggttaa

SEQ ID NO: 270221 - DNA, 2268 bp, Klebsiella pneumoniae
atggcaaacggcttgaaattttctcctcgtaaaaccgcgctggcgctggccgtggcggtggtttgcgcctggcaatcaccggtcttcgctcacggtagcgaagcccacatggtaccgctggataaaacgctgcaggaattcggcgctgatgtgcagtgggatgactacgcgcaaatgttcaccctgataaaagacggcgcttacgtcaaagtaaagcccggcgccaaaacggcgatcgtcaacggtaaatcccttgacctaccggtgcccgtggtaatgaaggaaggtaaagcctgggtttccgatacctttatcaacgatgtgttccagtccggtctcgatcagaccttccaggtggaaaagcgcccgcacccgttaaactcgctctcggcggcggaaatcagtgaagcagtgaccattgtcaaagccgcgccggagtttcagccgaatacccgctttactgagatttccttacacgagccggacaaggcggcggtatgggcctttgccctgcagggaacgccggtcgatgctccccgcaccgccgatgtggtgatgcttgatggcaaacatgtcattgaagccgtcgtcgatctgcaaaacaaaaaaatcctttcctggacgccgatcaaaggcgcccacgggatggtgctgctcgatgattttgtcagcgtgcagaacatcatcaataccagcagcgaattcgctgaggtgctgaaaaagcacggtattaccgatcctggcaaagtggtcaccaccccgctcaccgttggcttttttgatggcaaagatggcctgcagcaggatgcgcgtctgctgaaggtggtcagttatctggataccggcgacggcaactactgggcgcacccgattgaaaacctggtggcggtggtcgaccttgaagcgaagaaaatcatcaaaatcgaagaaggtccggtgatcccggtaccgatggaaccccgttcttacgatggccgcgaccgcaacgccccggcggtgaaaccactggagataaccgaaccggaaggcaaaaactacacgatcaccggcgataccattcactggcggaactgggattttcatctgcgcctgaactcgcgcgtcgggcccattctctcgacggtgacttacaacgataacggcacaaaacgccaggtgatgtatgaaggttccctcggcgggatgatcgtcccctacggcgacccggacgtcggctggtatttcaaagcctatctggactccggcgattacggcatgggcaccctaacatcgccgattgttcgcggtaaagatgcgccgtcaaatgcggtactgctggacgaaactatcgccgattacaccggcaaaccgaccactattccaggtgcggtggccatattcgaacgctatgccgggccggaatataagcacctggaaatgggcaaacccaacgtcagcaccgaacgccgggagctggtggtgcgctggatcagcaccgtcggcaactacgactatatctttgactgggtgttccacgacaacggcaccatcggtatcgatgccggcgccaccgggattgaagcggtgaaaggcgtgctggcgaagaccatgcatgatcccagcgccaaagaggatacccgctacggaacgctgatcgaccataatattgtcggcaccactcaccagcacatctataacttccgcctcgacctcgatgtggacggcgagaacaacaccctggtggcgatggacccggaagtgaagcccaacaccgccggcggcccgcgcaccagtactatgcaggtgaatcagtacacgattgacagcgagcagaaagcggcgcagaaattcgaccctggcaccattcgcctgctgagcaacaccagaaaagagaaccgcatgggcaacccggtctcataccagattatcccttacgccggcggcacgcacccggcggcgaccggcgccaaattcgccccggacgagtggatatatcatcgcctgagctttatggataaacagctgtgggtgacgcgctaccacccgacagagcgatatccggaaggggaatacccgaaccgttccgcccacgataccggcctgggccagtacgcgaaggatgatgagtcgctgactaaccacgatgacgtcgtgtggatcaccaccggcaccacccacgtggcgcgcgccgaagagtggccgatcatgccgaccgagtgggcgcaagcgctgctcaagccgtggaacttctttgacgaaacccctactctgggcgaaaagaaaaagtaa

SEQ ID NO: 270222 - DNA, 2046 bp, Klebsiella pneumoniae
atgcagcagttagccagctacttatccggcgcctggcagaccggccggggccgcgcccgtactatccatcacgccatcaccggcgcggcgctttgggaggtgaccagtgaaggcctggatatggcgcaggcgcgccgcttcgcgattgagcgcggtggtaaagccctgcaggcgatgacctttattgaacgcagcgcgatgctgaaagcggtggcgaaacacctgctggagcagaaagaccagttctacgccatctccgcgcaaaccggcgccactcgcgccgacagttgggtggatattgaaggcggtatcggtacccttttcacctatgccgggctcggtagtcgagaattaccggacgatatcctgtggccggaagacgagctcatcccgctctccaaacagggcggttttgccgcgcgtcatgtgctgacatcaaaatcaggcgtcgccgtccatatcaacgccttcaacttcccctgctggggaatgctggaaaaactggcgcccacgtggcttgccggtatgccggcgatcattaaaccggcaaccgctaccgcccagctcacccaggcaatggtgaaagcgattgtcgacagcggcctggtgccggagggcgccatcagcctgatttgcggcggcgcgggcgatctgctcgaccacctcgatagccaggacgtggtgacctttaccgggtcagccgccaccggccagcagctacgggcgcaccctaacctggtagccaaatccattccctttaccatggaagcagattcactcaactgctgcgtgttaggcgaagacgtcactccggagcaaccggaattcgcgctgtttattcgggaagtggtccgcgagatgacggcgaaagccgggcaaaaatgtaccgctatccgcagaatcattgtgccactggctcagattaatgcggttagcgatgcactgatctcccgcctgcataaagtaaccgtcggtgaccctgcgcaggagggcgttaagatgggggccctggttaatagcgaacagcgtcaggacgtacaggagagcgtcaataagctgatagccgctggctgcgaagtactgctcggtggagaggcggatctcagcgcggccggcgcatttttcccgccgaccctgttgtactgctcacagccggatgaaacgccggcggttcacgccattgaagcttttggtccggtggcgacgctgatgccgtatcgtgaccgccagcatgcgctgacgctggcgcgcgccggcggcggcagtctggcggggacgctggtcaccgccagcggcgagctggcgcgcgagtttatcctcggcgccgcccgcgcccatggccgtattcagatactgaacgaggcgtcctcggtcgagtcaaccggccacggttcgccgctgccgcagctggtgcacggcggccccggccgcgctggcggcggagaagagcttggcgggctgcgttcggtgaaacactatatgcagcgtaccgcggtccagggcagcccaacgatgctggcgaccatcggtcaacagtgggtgcgcggcgcccaggtgaacgaagaccgtattcacccgttccgcaaatatttcgaagagattcagcctggcgacagcttattaaccccgcgccgaaccctgaccgaagcggatatcgttaacttcgcctgcctgagcggcgatcatttctacgcgcacatggacaaaatcgccgccgccgagtcgatttttggcgagcgggtggtccacggctatttcctgatctccgccgcggccgggctgttcgtcgatgccggcgtcgggccggttatcgccaactacgggatggaaaacctgcgctttattgagccggtcaaaccgggcgacaccattcaggttcgcctcacctgtaagcggaaaacggtcaaacgtcagcgcagcgccgatgagaaagccaccggcgtggtggaatgggcggtggagattttcaatcagcaccagcaggcggtggcgctgtattccattctgaccctggtggcgcgtcaacagggagatttcccggcgtga

SEQ ID NO: 270223 - DNA, 288 bp, Klebsiella pneumoniae
atgagcaaagtttactggccgttatatgaagtgttcgttcgcagcaaacaggggttatcccatcgtcacgtcggcagtctgcacgccgccgatgatcaaatggcgctggagaatgcccgcgatgcctatacccgccgcagcgaaggctgctcaatttgggtggtgaaggccagcgaaatcgttgcttcgcagccggaagagcgcggcgaattcttcgacccggcggaaagcaaagtctaccgtcatccgactttctataccgtgccggatggcatggaacatatgtga

SEQ ID NO: 270224 - DNA, 756 bp, Klebsiella pneumoniae
atgaatatccctaaccccgtagccacctacgccctgcggcttggcgacaatggtctggttctggcccagcgtttaggcgcctggtgcggccatgctcccgagctcgagatcgatcttgcgctggccaacatcggcctcgacctgctcggccaggcgcgcaattttttaagctatgccgccgagcttaacggctgcggcgacgaagatacgctggcttttggtcgcgatgagcgccagtacagcaacctgctgctggtggagcagccaaacggcaattttgccgacaccatcgcccgccagttctttatcgatgtctggcacgtcgccctgtacagccggctggtgaacagccgcgacgcgcagctggcggccattgccgccaaagggctgaaagaggtgcgttaccacctgcgcttcagccgcggctggctggagcgtctgggtaacggcaccgagttatcaaatcgcaaaatgcagcaggcggtcgacaatctgtggcgcttcaccggcgaactgttccttgccgatgaagtggagctcagcctggttgagcagggtattgcggttgatccgcgtgagcttcaggccgaatggcaaagcgcggtacacacggcgctgctcgactccggcttacaaatcccgcaggaagcggccttccgcagcggcggcaaacaggggctgcacagtgaacatctcggcccgctgctggcggagatgcagtatctgcagcgttcgcatcccggactgcagtggtaa

SEQ ID NO: 270225 - DNA, 498 bp, Klebsiella pneumoniae
atgcaacgtcttgccgatatcgctcctgcagaggttcgcaccatctggggattattaagcgcgatcccggatccggaagtgccggtactcaccatcaccgacctcggtatggtacgcagcgtcgcgcgccatggcgacggctgggtgattggctttaccccgacctattcgggctgtccggcgacggagcatctgctgggggagatccgcgcggtcatgagcgagcatggttttcagccggtacatatcgtcctgcagctggatccgccgtggaccaccgactggatgagtcaggatgcccgcgagcgccttcgcctgtacggcatcagcccgccccaggggcacgcctgccatgcggacatgcccgctgaggtgagctgtccgcgctgcggcagcgcccatacctcgctgattagcgaattcggttccacggcctgcaaagcgctctatcgctgcgacagctgccgggaaccttttgattactttaaatgtatttga

SEQ ID NO: 270226 - DNA, 1071 bp, Klebsiella pneumoniae
atgacgacgttccattcgcttaaggtggcgagagtcgagccggaaacccgcgatgcggtgaccatcacttttgcgatcccgcaagccctgcaggcggagtactgctttcgcccgggccagcatctgacgctaaaagcccgtctgggcggtgaagaactgcgccgctgttactccatttgtcgcagccgcacgcccggcgaaattagcgtcgcggtcaaagctatcgacggcgggcgcttttcgcgctacgcccagcaggatatccagcagggtatggagctggaagtgatggtgccgcaggggcatttcggttatcaaccgcaggctgaacggcagggtgaatatctggcgattgccgccggttccgggatcacgccgatgatggcgatcatgagcgcgacgctggcgaccgagccgcaaagccgcttcacgctgatctacggcaaccgcagcagccatagcatgatgttccgccaggcgctggccgatttaaaagaccgctatccgcagcgcctgcaggtgatccacctgtttagccaggagtcgatggacagcgatctgctacaggggcgcattgacggcgacaaactgcgccagctcgctgaccatctgctggatttcagccgtttcgacgaggcttttatctgcggcccggcggcgatgatggatgaggcggaagcggcgttacgtgaacttggcgtagcggagaaatcgattcatctcgaacgctttaatacaccaggcggcaatgtgaagcgcgctgccggcgtgcaggcggaagggcgcacggtgaccatccgccaggacgggcgcgatcggcttatcgccctcagcgccgaagacgacagcatcctggatgccgcattgcgtcagggcgccgatctgccgttcgcctgtaagggcggggtatgcgccacctgtaaatgcaaagtgctgcgcggtgaagtggcgatggccgccaattacagcctggaagcggatgagctggcggcgggctacgtgctgagctgccagtcattgccgaccagcggcgatgtggtggtcgactttgacgcgcgggggatggcatga

SEQ ID NO: 270227 - DNA, 768 bp, Klebsiella pneumoniae
atgagcgacctgctgatccaccgtcatggccgggtgcttcagttgacgctgaaccgcccgcaggcccgcaacgcgctgaacaatgccttattaacccagattgccgaggcgctggaggcggcggcagttgatgacagcgtcggcgtctgcgttattcgcggtaacgcgcgttttttcgccgccggggctgacctcaatgaaatggcggaaaaagatcttcctgccaccctggatgatattcgcccacggttatgggggcgaattgatgcctttactaaaccgctcatcgcttcggtcaacggctacgccctcggcgccggctgcgagctggccctgctgtgcgacctgattgtcgccggggacaacgcccgctttggcctgccggaaattaccctcggcataatgccgggcgcgggcggcacccagcggctgatccgcagcgttggcaaggcgctggccagccggatggtgctgagcggcgagagtattgacgcccgccaggcgcagcaggccgggctggtcagtgatatccatccggcggcgttaaccgatgagtatgccctgaaactggcaaccaccattgcccgccattcgccgctggcgctacgggcggcaaaacagtcgctgcgcctgtcgcaggaagtcagcctgcaggccggtctacaacaggagcgccagctgtttagcctgctgagcgccaccgaggaccgccgcgaaggcatcgacgccttcttacaaaaacgtaccccggaatttaaaggacgctaa

SEQ ID NO: 270228 - DNA, 789 bp, Klebsiella pneumoniae
gtggaagctttcattctcagcgcagtggaacagggcgtcatgaccattaccctcaatcgcccggaccgcctcaacagttttaacgatctgatgcatcaccagctggcggaatgtctgaagcaggccgagcgcgatgatggcgtgcgctgcctgctgatcaccggcgccggccgcggtttttgcgccggccaggatttgaacgaccgcaatgtcgaccccagcggcccgccgccggatctcggcatgtcggtagaacgcttttacaacccactggtacgccgtctggcggcgctgccgaaaccggtcatctgcgcggttaacggcgtggccgccggcgcgggcgctaccctggcgctgggctgcgatatcgtgctggccgcgcgttcggccaaatttgtgatggcgttcagcaagctcggcctggtgccggactgcggcggcagctggttcctgccgcgggtggccggccgtgcgcgcgcgatggggctggcgctgctgggcgacagcctcagcgcggaacaggccgcgcagtgggggattatctggcaactggtggacgattcagaactggcggataccagtctgcaactggcgcgccatctggcggcgcaaccgacgtttggtcttgggctgattaaaaaggcgctgctggcctctgaaaccaacagtctcgacgcgcagctggacctggagcgcgattatcagcgtctggccgggcgcagcgatgattaccgcgaaggggtcagcgcgtttctggccaaacggccaccacagttcagcgggaaatag

SEQ ID NO: 270229 - DNA, 1422 bp, Klebsiella pneumoniae
atgacgacatccttagccaccgtggcggtgatcggcagcggcaccatgggagccggcatcgccgaagtggctgccgcagccgggcatccggtgcgtatttttgatattaaccctaaggctgtagacctggcgatagagggtatcgccgggcgtctggcgtcacgcgttgcgcggggcaaactggcgtcagagcaggccgatgcgctgctggcgcgcctgcatccggcccacgatttagccgcgcttgccgatgcggatttagtgatcgaagcggcctctgaacggttggaggtcaaaacggcgctgttcacgcagctggcggagatctgcgcgccgtcaacgctgttgaccagtaatacctcgtctatttcgattaccgctatcgccgccggggtcaaaaacccggagcgggtggccggactgcacttttttaatccggcgccggtgatgaagctggtcgaggtggtgagtggtcttgcgacctccacagaagtggtggagcagctgtgccagtgcgtaagcggctgggggaaacagccggtgcgctgccgctcaacgcccggttttatcgttaaccgcgtagcgcgtccgttctacgctgaggcctggcgcgcgctggaagagcaggtcgccgccccggaggttatcgatgccgctttgcgtgacggcggcggcttcccgatgggaccgctggcgctgactgacctgattggccaggacgtcaacttcgccgtgacctgttcggtgtttaacgccttctggcaggaccgccgctacctgccatcgctcctccagcaagagctggcgctggccgggcggctaggtaaaaagagcggccacggcgtctatcgctggcccgttgagacactgccggacgcggcgctaccgccggtaatgatgggtgctgaatccgttaccgtcagaagtgacaatgtcactgaattagacgatgtcttgctgctggagaccgaaggcgagaccgccctggcgctgagtattaagcatcaccgcccggtggtggtgtatgacctgtgcgccagcgatacggtggtgctggccgcagcggcaaccaacgcgcctgcggccactgataaggccgtgcattacttccagcagcagggcaagaaagtgctgcgtattgccgattatcccggcctgctggtgtggcgcacggtggcgatgctgattaacgaagcgctggatgcggtacaaaaaggcgtcgccagcccgcaggatatcgataccgcgatgcgccttggcgtcaactatccgcatggcccgctggcatggggagaacgccttggctggcggcgggtgctgcaactgctggagaacctgcaacaccattatggcgaggagcgctatcgccccagttccctgctgcgccagaaggcgctgatggagaagcaccatgagcaatga

SEQ ID NO: 270230 - DNA, 423 bp, Klebsiella pneumoniae
atgagcaatgatccgtggcgcaacgcgcgcgtgatgtacgaaaaagatacctgcgccagaaagatggggatcgaacttatcgaaatagacgacggttttgcgcagatgagtatgaccgtctcggcggacatgcttaacggccatcaaacctgtcacggtggtcagctatttacgcttgccgataccgctttcgcctacgcctgtaacagccaggggctggcggcggtggcctcggcggcaagcattgattttcttcgtccggcgttcgccggcgaccggctggtcgccaccgccagagtcaaacagcagggcaagctgaccggcgtctacgacatcgaaattgttaatcaacagcaaaagattgtggccctgttccgcggcaaatcgcaccgcatcggcggcacaatcacgggagacgtgtaa

SEQ ID NO: 270231 - DNA, 1206 bp, Klebsiella pneumoniae
atgcgcgacgcctttatttgtgacgggatccgtacgccgattggccgctacggcggcgcgctggccagtgtgcgcgccgacgacctggcggcaatcccgctgcgtgagctcctgagtcgtaatcccgagctcgacccggcagcaattgatgatgtgattttcggctgtgcgaatcaggccggggaagataaccgcaacgtggcgcacatggcgacgttgttggccggttacccgcataccgtgccgggcaccacgattaaccgcctgtgcggatcgggtctggatgccatcggctttgccgccagggcgatcaaagccggcgatgccgatctgctgattgccggcggcgtggaatcgatgtcgcgtgcgcctttcgtgatgggaaaagccagcgcgccgtaccagcgtcaggcggaactctttgataccacgattggctggcgttttgtgaacccgctcatggcgcaacacttcggaactgacagcatgccggaaacggccgagaatgtagctgaattgttaaatatcagccgggccgatcaggacgctttcgcctggcgcagccagcagcgcgcggcgcaggcccagcgcgacggcattctggcgcaggagattgtgccggtgcagattgtcggccggaaaggggcggttagcgacgtgcgcgaggacgagcatccgcgcccggaaaccacgcttgagcagctggcgaaactgaaagcgccgttccgccagggcggcgtcattactgcgggcaatgcttcaggcgtcaacgatggcgccgcggcgctgatcatcgccagcgaacagcaggccgctatccaggggctcacgccgcgggcgcgtatcgtggcgatggcgacggcgggtgtcgaaccgcgcctgatgggactggggccggtaccggcggtgcgtaaagtgctggagcgggcgggactcaatattaacgatatggatctgattgagctgaatgaggccttcgccgcccaggcgctgggggtgctcagacagctcggcgtgccggacgatgcggcgcacgtgaatcccaacggcggcgccatcgcgttaggccatccgctgggcatgagcggcgcgcggttagcgctgagcgccagccttgagctgcaacgccggggcgggcgctatgcgctgtgtacgatgtgtattggcgtgggtcagggcattgccatgatcctcgagcgagtgtga

SEQ ID NO: 270232 - DNA, 936 bp, Klebsiella pneumoniae
atgaatcagatgagtaaactcgacgcctttattcaacaagcggtgacggcgatgcccatcagcggcacgtcattaattgcctcgctgtatggcgacgctttattacaacgcggtggggaagtgtggctgggcagcgtcgcggcgctgctggaaggattaggcttcggcgagcgcttcgtacgcaccgcgctgtttcgcctcaataaagaagagtggcttgatgttgtccgcatcggccggcgcagcttctatcgcctgagtgataaagggttgcgcctgacccggcgcgcggagcataaaatttatcgcgccagtgccccggaatgggacggtacctggctgctgctgctttcggaaggcctggagaaaaatgtgctcgccgacgttaaaaagcagctgctgtggcaggggtttggcgcgctggcgccgagcctgctggcctcgccgtcgcaaaagctggccgatgtccagtctctgctccacgaagcgggcgtcgccgaaaacgtcatctgttttgaagcccattcgccgctggcgctctccagggcggccctgcgcagccgggtggaggagtgctggcatctcaccgaacaaaatgagatgtacgaggcgtttatcgccttgttccgacctctactgccgctgctgcgcgattgcgacccgtcagagttgacgccggatcgctgtttccagatccaactgctccttatccatttctatcgccgggtggtgctcaaagacccgctgctgccggaagagctcctgccggcgcattgggcagggcaaaccgcccgccagctgtgtatcaatatttatcaacgcgtgagtcccggcgcgctggcgttcgtcagcgagaaaggtgagagctcggtgggcgagctcccggcgccgggtccgctctattatcagcgctttggcggtttgccgggcgcataa

SEQ ID NO: 270233 - DNA, 408 bp, Klebsiella pneumoniae
atggcagagaaattatccgctcactgtcactgcggtgcggtggcgtttaccgtggaactcagcgacggcttcaacaacgttcggcgctgtaactgctcatattgtcgcatgcgtggggcggtcgcggtctcttcgccgcgttcaggaatagaggtggtacgcggaggggataagctcacagagtatcgctttaatacaggggaagccgtgcactttttctgctcggtatgcgggatctacacctttcatcaacggcgatcaaacccacagcagtatggggtgaatgtggcctgcattgacggcgtttcgcctttcgatttcccttgcgtggaggtcaacgacggcgtgaatcatccaaaagatggcggcggaggcgtggtggggtatttacgctacgagaaaaagtaa

SEQ ID NO: 270234 - DNA, 606 bp, Klebsiella pneumoniae
atgagcaaagtattagttctgaaatccagtattctggcagggtactcacaatctggtcagctttccgactattttgttgaacaatggcaggaaaaacaccctggcgatgagatcaccgtgcgtgacctggccgccaatccgatcccggttctggatggcgaactggttggcgccctgcgtccgagcgacgcgccgctgactccgcgtcagcaggaagcgctggccctttccgacgagctgatcgccgaactgaaaggcaacgatgtgattgttatcgctgcgccgatgtacaacttcaacatcccgacgcagttgaaaaactatttcgacctggtggctcgcgccggcgtcaccttccgctacaccgagaaagggccggaaggtctggtaaccggtaaacgcgcggtcgtcgttaccagccgcggcggtatccataaagatactccgaccgacctggtcaccccgtacctgtccaccttcctcggcttcatcggcatcaccgacgtgaactttgtgttcgccgaaggtatcgcttacggcccggaagtcgcggccaaagcgcagtctgacgcgaaagcggccatcgacagcgtggttgcagcctaa

SEQ ID NO: 270235 - DNA, 3903 bp, Klebsiella pneumoniae
atgacagaacaacaaaaaatcaccttcccccagctttatcaacagctcgacggcctaatgctgcgcgacaaaacgcgctttgcccgccgtctgcacggcgtgaagaaggttaaaaatcctgaatcgcaacaggccattctgcaggagatggcgctggagataagccaggcagccggtaaagtcctgctgcgcgaagcggcgcgtccggccatcacctatccggaaaacctgccggttagccagaaaaaacaagagattctcgaggcggtgcgcgaccaccaggtggtgatcgtcgccggggagaccggttcgggtaaaaccacccagctgcccaaaatctgcatggagctgggccgcgggctgaaaggactcatcggccatacccagccgcgtcgcctggcggcgcggaccgtcgccaatcgtattgccgaagagctgcagagcgagccgggcggctgcatcggctataaagtccgcttcagcgaccacgtcagcgaaaacaccatggttaagctaatgaccgacggtatcctgctggcggagatccagcaggatcgtctgttgatgcagtacgacaccatcattatcgatgaggcgcacgagcgcagtctgaatattgactttctgctcggctatctgaaagagctcctgccgcgccgcccggacctgaaaatcatcattacctcggcgaccatcgacccggaacgtttctcaaagcatttcaataatgcgccgattatcgaagtctccgggcggacttacccggtggaagtgcgctatcggccgatagtggaagaggcggacgataccgagcgcgatcagttacaggcgatctttgatgcggttgacgaactggggcgcgaagggcccggcgatattctgatctttatgagcggtgagcgggaaattcgcgataccgccgatgcgctgaataagctggatctgcgccataccgaagtgctgccgctgtacgcccgcctgtccaacagcgagcagaaccgcgtcttccagccgcacagcggacgacgcatcgtgctggcgaccaacgtggcggaaacctcgctgaccgtgccgggcattaaatacgttatcgatcccggtactgcgcgtatcagccgttacagctaccgcaccaaggtgcagcgcctgccgatcgagccggtttcccaggcgtccgccaaccagcgtaagggccgctgcggccgcgtttcggaagggatctgtattcgtctttattcagaagacgatttcctgtcgcgcccggaatttaccgacccggagattctgcgcaccaacctggcgtcggtcatcctgcagatgaccgccctgggcttaggcgatatcgccgccttcccgtttgtcgaagcgccggataagcgcaatatccaggacggcgtacgcctgctggaagagctgggcgccatcaccaccgatgcgcaggcaacggcttataaactaaccccgctgggccgccagctcagccagctaccggtggatccgcgtctggcgcgcatggtgctggaggcgcagaagcacggctgcgtgcgggaagcgatgatcatcacctccgcgctgtcgatccaggacccgcgcgagcggccgatggacaaacagcaggcctctgacgaaaaacaccgccgcttccacgataaagagtccgatttcctcgccttcgtcaatctgtggaactacctcggcgagcagcagaaggcgctgtcgtcgaatcagttccgccgccagtgccgggtcgattttcttaactatctgcgtgtgcgcgagtggcaggacatctacacccagctgcgccaggtggtgaaagagcttggcctgccgatcaacagtgagccggcggaatatcgcgagatccatactgcgttgctgaccggtctgctgtcgcacatcggcatgaaggatgccgataaacaggagtataccggcgcccgtaatgcgcggttctctattttcccgggttccggcctgtttaaaaagccgccgaagtggacgatggtggccgagctggtggagaccagccggctgtgggggcgtattgccgcccgcattgagccggagtgggtggagccggtagcgcagcacctgatcaagcgctcatacagtgagccgcactgggagcgggcgcagggcgcggtgatggcgacggaaaaggtcaccgtttacggcctgccgatcgtcgccgcgcgtaaggtcaactacagccagatcgacccggcgctgtgccgcgaactgtttatccgccatgcgctggtggagggcgactggcagacgcgtcacgccttcttccgcgataacctgaagctgcgcgcggaaatcgaagagctggagcataagtcgcgccgtcgcgacatcctggttgatgacgagacgctgttcgagttttacgaccagcgcattagccacgatgtcatctccgctcgccactttgataagtggtggaagcaggccagccgcgaaacgccagacttgctcaattttgaaaagagcatgctgattaaagagggggcggagcaggtcagtaaactggactacccgaatttctggcatcagggcaacctcaagctgcgtcttagctatcagtttgaacctggcgccgatgccgatggcgtaacggtgcatattccgctgccgctgctcaaccaggtagaggaggccgggtttgaatggcagatccctggtctgcgtcgcgagctgattatcgcgctgataaaatcgctgccgaagccggtacggcgcaatttcgtcccggctcccaactatgcggaagcgtttcttggccgggcgacgccgcttgagctgccgctgctcgattcgctggagcgcgagctgcgtaagatgaccggcgtgaccatcgaccgcgaagcctggcagtgggatcaggtgcccgatcacctgaaaatcaccttccgggtggtggatgataaaaacaagaagctgcaggaagggcgctcgctgcaggcgttgaaagacgccctgaagggcaaagtgcaggagacgctgtcggcggtcgctgatgacggtattgagcaaagcgggctgcatatctggagctttggcaccctggcggaaagttacgaacagaagcgcggtaactataaggtgaaagcctggccggcgctggtggacgagcgcgacagcgtggccatcaaactgtttgataatccacaggaacagcagcaggccatgtggcgcggtctgcgtcgcctgctgctgctcaacatcccgtcgccgattaagtatctgcacgagaaactaccgaataaagccaagcttgggctctactttaacccgtacggcaaagtgctggatctgattgacgattgcatctcctgcggcgttgataagcttattgacgaggcgggcggtccggtgtggacggaagagggctttagtcagctgcacgataaagtgcgagccgagctcaacgacacggtggtggagatcgctaaacaggtcgagcagatcctcaccgcggtgttcaatatcaacaaacggctgaaaggccgggtggatatgaccatggcgctggggctgtcggatatcaaagcgcagatggcgggtctggtgtatcgcggctttgtcaccggcaacggtttccgccgtcttggcgatacgctgcgctatctgcaggcgattgaaaagcgtctggagaagatggctatcgatccgcaccgcgatcgggcgcagatgcttaaggtggagagcgtgcagcaggcgtggcagcagtggctgaataagctaccgccgaaccgccgtgaggacgacgatgtccgggagatccgctggatgatcgaggagctgcgggtcagcttcttcgcccagcagctgggcaccccgtatcctatctcggacaagcgagtgttgcaggcgatggagcaaattaccccatag

SEQ ID NO: 270236 - DNA, 660 bp, Klebsiella pneumoniae
atgcaacaacagtggtcggcagtagacaattatttgattaaggccttaattcccagcgatcctgtgctcgatcgggtactggaaaacaaccatcgtgccgggctcccggcacacgatgtcgccgccaatcagggtcagtttctcgccctgctggtacggctaacccaggctaagcggatactggagatcggcaccctcggcggctatagcaccatctggatggcgcgcgagcttcctgccgacggccaactcctcaccctggaggccgacgcgcatcatgcccaggtggcgcgggagaatctgcagctggcgggcgttgaccagcgggtcacgctacgggagggacccgcgctacagtccctggagtcgcttggcgaatgtcccgctttcgacctgatcttcatcgatgccgataagccgaataacccccattatctgcgctgggcgctacgttattcccgcccaggaaccttaattattggcgataacgtggtacgcgacggcgaagtggtcaacccacagagcgccgacgagcgcgttcagggcgtgcgtcagttcattgagatgatgggcgccgagccacggttgacggcaacggcgctgcaaaccgtgggcactaaaggctgggacggctttactctggcgtgggtaaacgcttaa

SEQ ID NO: 270237 - DNA, 1380 bp, Klebsiella pneumoniae
atgatccgcccggtcgcccttgctatcgttctggcgctggtcggctgtcaatccgccgatgtgcaacgcgcgcagccgaccctgaccattcctgccgcctggcgggccgacgttggcccggccagcccggtggagggcgtatggtggcgcaattttcatgacagtaccctcaatcagtatgtcgaccaggcgctgcgctataacagcgatgtgctgatcgcctgcgagcgggtgaatgagtatcaggcgcgcgcttacgccgccgacagcagcctgtttccgtcactggacgccagcctcaccggcacccgcgcccggacgcagtccgccgccaccggcctgccgatccacagcacactgtataagggcggcctgaccgccagttatgatgtcgatatctggggagcgaaccgcagcgcggccaacgccgccggggccagccttgaggcgcagaaagccgccgccgccgccgccaatttgagcgtcgccagctcggtggccgttggctacgtcacgctgctgtcgctggatgagcagctgcgggtgacccagcagacgctaacatcaagggaagacgcgtggcgcctggccaaacgtcagtttgaaaccgggtatacttcacgccttgagctgatgcaggcggattcggagctgcggtcaacgcgggcgcagatcccgccgctacagcaccagattgcgcagcaggaaaatgcgctcagcgtgctgctcggcgataaccctggcgcggtaaaacgcggcgagttcgcccagcttaccccgctgcgtctgccgtcgcagctgccgtccaccttgctcaaccgccgcccggacatcgctcaggccgagcgccagctggtggccgccgacgccacgctggcctcgtcgcaggcgcagctgctgccctctattaacctgaccgctaccggcagcctgcaggaccggacgctgccggatctgctggacaacccgctgcggctgtggagtcttggcggcagtattctggcgccgctgctaaaccgccaggcgttaaatgcccaggtggacgtctccatggcccagcgcaatcaggcgctctatagctatgagaaaacggtgcgcagcgcgttcaaagaggtcaatgacagcctggacgccatcagtcgctatggcgaacagttaaccgagcttcaggaacaagagaccgttgcccaggaaaccttacgtattgcacaaaaccgctaccgtaacggctactcttcttatctggatgtgcttgatgcccagcgaacgctgttctccacccagcttagcgtggtgcaggtgaagaacaacctgctgctggcgcagatcgatctgtaccgggcgctgggaggcggctggtctgactcatcagggagctaa

SEQ ID NO: 270238 - DNA, 1086 bp, Klebsiella pneumoniae
atgagtcagcaggatgcggccaaacaacaggccaacacccggaataatattcgcgtggtttccatttttaccgccgcggcgataggcctcgtcggcgtgctggtgatcctctacgcctggcaactgccgccgttcactcgccatagccagtttaccgacaacgcctatgtgcgcgggcagaccacctttattagcccgcaggtcaacggctatatcaccgccgtcaacgtcaaagatttcgcgattgtccagccgggcgaggtgctgttccagatagacgatcgcatctataaacagcgggtgcatcaggcccaggctaccctggcgatgaaagaggccgcgctgcgcaataacctgcaacagcgcaaaagcgccgaggcgacgatcgccaagaatgaagccgcgctgcaaaacgcccgcgcgcagaatctgaaaatccaggccgatttaaaacgcatccagcagttaaccgccgacggttcgctgtcgatccgcgaacgtgattcggcgcgggccagcgcggcgcaaggggcggcggatattgagcaggcgaaagcggcgctggagatgtcgcgccaggaccgtgaatcgaccatcgtcaatcgcgattcgctggaggccgacgtggccagcgccaaagcggcgcttgagctggcgcagatcgacctgcagaatacccagattatcgcccccaccggcggccagctggggcagatctcggtgcgtcttggcgcctatgtcagcgccgggacccatctgacctcgctggttccgccgcagcactgggtgattgccaacctcaaagagacccagctggccgaagtacgcgttggccagccggtcaccttcaccgtagacgcgctcaacggcgagaccttccacggcaaggtgcagagtatctccccggcgaccggggtggagttcagcgccatctctccggacaacgccaccggcaatttcgtcaagatcgcccagcgcatcccggtgcgtattacggtcaacgacgggcaaaacaacagcgaacgcctgcggccggggatgtcggtgcaggtgactattgatacccgtgcggagaaacaaccatga

SEQ ID NO: 270239 - DNA, 1653 bp, Klebsiella pneumoniae
atgccccgtcgccaggataacccctacgccccgcatgactgggcgccgcatgaaaaaccggctctgctcggttcgccgtcgacgccgctgcacagtccggcgaaacgccttgcctacggcgtggtcggtctgctggtatgtctcaccggcgcgctgggcaacgcagtggtcaccgccaacctgcagctgctgcagggtaccttcgccgcctggtcgacagaaatcgcctggctgccggcggtatacgtgatgaccaacgtctccatcaacctgctgctggtgaaattccgccagcagtttggcctgcgcgctttcaccgaaggctttctggtgctctatgtgctggtcacctttttccacctcttcgtcaacgatctcagctcagcgatgatggttcgcgccgcccatggcatggtggccgcggcgctcagctcgctggggatttactaccaggtacaggcctggcctgcgcgccatcgcctgaaagggctgactatcggcatcaccggctcgtcgctggccattcccctggcgcgcctcttttccaccgaactgctgcagaccgatgaatggcgcggtctctacttctttgagctgggcctggcgctggtgtcgctggcctgcgtcatcgcgctaaaactgccgccaagcgatcgtaaaaaagtgttcgaaaaaaaggatttcattaccttctttctgctggcgcccggcatggcgctggtgtgcgccgtgctgtcgctggggcggctcgagtggtggtttgaagcgccgtggatcggctgggcgctggcggcggcggtaatactgatcgtcgctgcgattaccttcgagcataaccgcagcaaccccctgctcaataccaaatggctctccagcggcagcatcgtgcgtctgggcctgattatgctgttgatccgcatcgtgctggcggagcagaacaccggggtcatcggctggctgcagtacgttggcctgcaaaacgaacagatgactaacctcgcgtggtcgattttcgccggtattctgtgcgggatcattgccagctgtctgacgctcaacccgcagaagctctactggccgaccgccaccgcgctggcgctgatcatgatagcctcgctgctcgacagccagtccaacgccctcacccgtccggaacaattaatgttcagccagtttttactcggcttcggcagcgccttctttctggccccggcgatgctcgccgggattggcggcgtgtttgccgacccgcgcaacctggtcagcttctcggtgctgttcggcatgagccagaacattggcgggctgctcggctcggcgatcctcggcaccttccagacctggcgtgagaaattccactccagccagctggcggaccagataaccacccttaacccgctgatcgtcgagcggctgcagcagtacagccagatgtatcagagccagattggcgacagtacgctgctcaacgttcaggccaccaccctgctgcaaaacgccgcgacgctgcaggccaatattctcgcctggaatgatacctatctgctgacggcggcgatctccgccgggacactagtgtgggttttctggcgcttaattcgcttacgactgactgcccgtatcgcgttgcaacgcgctaccggcagcaaataa

SEQ ID NO: 270240 - DNA, 432 bp, Klebsiella pneumoniae
atggacaatcgacagcttaccttctctcatcttttatacctcaccgcgcaccactggcggctggcggtcaatcgtcggctgaaaaatctcggtctcagccaggccagctgggtggcggtagcgtccatcgcccgccaccagcagccgctgtcgcaaagcgaactggcgcaggagctgggggtggagagcccgaccattgtgccgttgatccatcgtctggtcgccctcggactggttgagcgcatcaccaccgccagcgacaaacgtaagcgactgctggtggtcaccgacaaagggaaggccctctatgaacaggtcaaaacggtggctgacgatctgcgcgaagagatcctgacggcgattaccccacaggagcaggagcaaacccagcgggtgctggaaaagctgttgcgcgaagtggagaagaaataa

SEQ ID NO: 270241 - DNA, 948 bp, Klebsiella pneumoniae
atgaaaaccttgcccgatctgcaacaaatagaaatattaatactcatagtgaaacatggcagttttcgtcaggccgctaaagcgttaaacctttccccaccggcccttaccgtcgctattaatcatctggaagaaaagttaggcgtgcgcctgctaaatcgctcaacgcgcagtttgtcattaaccgcagtgggtgaggaatttcttaataatataacgccggtggtcaatgattatcgccgggtggtggacagtctgaattatcaccgtctgactccggaaggcgtggtgaaagttaatttaccgcgcattgttattgacctgttttttcaagactattttatcgcctttaaaaacgcctgtcccaatgtgacgctcgaactgtatgccaccgatcggaaagtcaatattatcgagtccggttttgacgccggcattcgctattcgcaggatgtgcccaaagagatgattgccatcccctttggcgagaaactatcgctgatcccggtggccagcccggactatatacgcgaagccggagagcccgataccccgcagtcattagttaatttccgctgcattaaccgctgttttcctggtggtgagaagtaccgctgggagtttattggccccagcggcgagcttagcgaggtcgcggttaaaggcgatctggtcgtcgatgccgatagcgcaatgatccaggccgcggagagcggattaggcatcgcctttgtctatcagtcgctggtgacgcagcagctgagcgcgggcagcctggtccatttgttacccggctaccgctatcctgccgaccatttctgcgtctactacccaagccggaaacatattcccgcccccctgcgggcctttatcgcctgggtgatggcgcagaataaaaatatcctcggtcagcagaccgcacgacacggatcgcggccggaagattaa

SEQ ID NO: 270242 - DNA, 1023 bp, Klebsiella pneumoniae
atgctatttcgtcccgtacgggaaaacgatctcgacgacatcgtccgcctcgccgcgcgggcgggggtcggcatgacctctttaccgcatgacgtcgggcgcctggcggcccggatccggcgcagtatcgagaccttcgccggcgaactgccgcgcagccagcagggtttcctgtttgtgctggaggacaccgcgctggcgcgggtggtgggggtgagcgccattgaggtcgcagtgggcctggacgagccgttttacaattttcgcattcagaaaacggtacgcgcctcgaaagcgctgggagtctataagccccaggagctgcttaatctcagctatgaccacaccgggcatagtgagctgtgtacgctgtttctcgacccggcgtatcagcgcaaccgcaatggtctgctgctctccaaggcgcgctttttatttatcgccgcctttcgcgagtggttctccccgcacctgtttgccgaactgcgcggctgcagcgatgagcagggacagtcgccgttctgggatgcgctgggccatcatttcttcgacatcccgttcgccgatgccgaccggctgaccggcaccggcatgaaaacctttattgccgaactgatgccggcgtacccgatctatatctcactgctgccggaagcggcccgcggggtcatcggtcaggtgcatcccaataccgccccggcgcgggcgatcctcgagaaagagggtttcagctggcgcggctcggtggatattttcgatgccggtccggtgctggaggcggacaccgatcagatccgcgccgtgcgcgacagccagcgcctgcctgtccggcagctgatgggcgacctgccggcgccgaccctcgtcgccaacggtcaattcgacaactttcgggcgctgctggtggcccacgaagagcaggtctcgcttgacagcgccgcgctggacgcgctgcaggtcagtgaaaccgaccgcgtttatacggtaaccctgaatccagaggacaacagatcatggcggtaa

SEQ ID NO: 270243 - DNA, 1467 bp, Klebsiella pneumoniae
atggcggtaaaagcacagtttatagccgggcagtggctgccaggcagcggcgcaacgatgagcaaactggccccggaggatcagtcgctgctgtggcaggcggccagcgcgggggctgacgacgtccaggcggcctgcgccgcggcgcgcgcggcgttttatccctggtcgcaccggccgctggccgagcgtattgacgtcgtacagcgttttgccgcgctgctggagacgcataaagaggcgctggcgaccctgatttcccgcgagaccagcaagccgctgtgggagacccgcaccgaagtgcaggcgatgatcggcaaggccgcgatctccatcgaagcctatcaccagcggacgggctttcatgagtcgacgctgccggacggtaaagcgctgctgcgccacaaaccgcacggcgtgatggcggtctttggcccctacaacttcccgggccacctgcccaacggacatatcattccggcgctgatcgccgggaacaccattgtgtttaaacccagcgagctgacgccggctaccgctgaaatgaccgtccagctgtggcagcaggcgggcatccccgacggggcgatcaacctgctgcagggcggaaaagccaccggccaggcgctgctggaaaatcgtgatatcgacggcgtgctgttcaccggcagcgcggcggccggtttccacttccatcgctacttcggcggccagccggagaagatgctggccctcgagatgggcggcaacaacgcactgatcgtcgccgacgtggccgatatcgatgcggcgctacatgtgattatccagtcggcgtttatctctgccgggcagcgctgcacctgcgcgcgccggctgatcgtgccgcgcggcgagcagggggatgcgctgctgcagcggctggtagaggccagcgcgcagatccgcgccggcaagtgggatgatcagccggcgccgtttatgggcggggtgatctctctcgacgctgcgcagaacatgctggcggcgcagcaaaaactggaggggctcggcggcaaggtgctgctgcgcatgcgccagcctgacccgcgctccacggtgctgaccccggggatcgtcgacgtcaccggcattgaggtgccggatgaagagtactttggcccgctgctgacgattatccgttacgacggcttcccggaggcgattcgcctcgccaatcagacccgctatggcctggccgtcgggctgatctccagcgatgcggcgcagtttgatcagctggcggacgaggcgcgagccgggatcgtcaactggaacaagccgctgaccggcgcatcgagtaaagcgccgtttggcggggtgggcgcctccggtaaccatcgcgcggcagcgtggtatgccgccgattactgtgcctggccgatggcctctctggtcagcgatacgctgacgcttccggcgacggtatcgccgggcctgccattctga

SEQ ID NO: 270244 - DNA, 1341 bp, Klebsiella pneumoniae
atgtctggttttgaagcaaactttgatggcctggtcggcccgacgcaccactacgccggactctccgtcggcaatgaagcctcgcaaaataaccgcgatggtctctctaaccctaaaaaggcggcgctgcaggggctgtataaaatgaaagccctggccgatcgcggcttcgtgcagggcattctgccgccgcagccgcggccgaatctgcgtctgctgcgtgaagtgggtttccagggcagcgatgagcaggttatccggcaggcggcccacgcggcgccgcagctgctctccgccttcagctccgcctcgtcgatgtggaccgccaacgcggcgaccgtctcaccgtcggcggacagcgccgatggcaaagtccatttcaccgtcgccaacctgaacaataagctgcaccgtatgcaggaggcgcccaccacctcggcgatccttggcgccacgttcgccgatccgcgctactttgcccaccatgcggcgctgccgcagcatggcgacctcggcgatgaaggggcggccaaccataaccgcttctgccgggaatatgaccggcagggggtgcagtttttcgtctatggtcgacgcgccagcggcggtatcgccccggtgaagtatccggcgcggcagaccctcgaggccagtgaggcggtggcccgcctgcatcagctggatccgcgctacacggtgtttgcccagcaggcgccgcaggctatcgatcgcggcgtgtttcataacgacgtcatcgcggtcagcaatcgccatgtgctgttccaccatcagcaggcgtttgtcgatcaggcggcggtgctggccacgctgcgggctaaaagcgacagtctggatatcccgttcaccagcgtggaagtgccggacgagcgggtttcgctcgatgacgccgtggcctcatacctgttcaacagccagctgctgagcaaacctgacggtaagatgctgatcgtggtgccggaggagtgccgccagcgggaaaacgtctggcgctatctcagcgatctcgccgccgacagcgcatcgccgatcgatgaagtggcggtctttgacctgcgggaaagcatgcgcaacggcggcggcccggcctgtctgcggctgcgagtggtgctcaacgaggcggagcgccaggcggtcaacgcccatagcctgatgaacgacgaacgttatcagcagctgacggcatgggtggaaaaacactatcgcgaccggctgcatgcccgcgatctggcggacccgcagctgctgcgcgaggtttatcaggcgctggatgagctgacgcagatcctgcgcctgggcgcggtctatgattttcagcgttaa

SEQ ID NO: 270245 - DNA, 996 bp, Klebsiella pneumoniae
atggagcacctggttaacgatttactgcactgccgcctgcaggcgtggacctttccggcgggcatcgaggcccgctggctgggcgagggcattttacagctgctgccgacggcgccttggcgccaggcgacgatcctctccgccggcgtgcatggcaatgagaccgcgccgattgaactgctgctgcagctaacccacgatctgagccaggggcggcagccgctcacgcaggcgctgctgatcgtctttggtaatctgccggcgatccgcgccgcgcgtcgctatctgcataacgacctgaatcgcctgttcggcggccgccatctggcggtcaccccgggaaatgagtcgcggcgggcttttgcgctggagcaggcggtgcaggctttttatcgcgccgccgatgcggcggggccggtcaaccgtggtcatctcgatatgcacaccgccattcgcggatcgctgtatcgccagtttgcgctgctcccggcccacgccggggatttttcgcccgatttctatcagctgctgcaggccagcgggatggacgccgtcgtgcgccataccgaagcgggcggcaccttcacccatttcacctgcgaaaagttcgccgcgcaaagcgccaccctggagctggggaaagtgatgccgttcggcgccaacgatctcagcctgttcgccgccgccgacgcggcgatccgggcctggatcgctgacgcgccgctgccgccgcgcgacaaagcgccggtggactacttcctggtcgaggagagcatcatcaagcgcgagggggaatttacgcttaatctcgcggcagacgttgaaaacttcaccgcgctcccggcagggtatgagatcgcccgccaggcagagaaacgttgggtggtgcaggcccgggccccctatatcctctttcccaacgccggggtcgccaccggccagcgcgccgggctgttgctccgcgccgctgcccttcgtctcccgcaaccagcctga

SEQ ID NO: 270246 - DNA, 1431 bp, Klebsiella pneumoniae
atgactgaacatcaacatcaggcgtcacctgccgccggaggtgaaggcgcgtcacagcttaagcgcgggctcagcgcccgccatatccagatgattgccctcggcggcgccatcggcaccggactgtttatgggggcggggcgcaacatcgccgtcgccggcacctcgatcctggttatctatgtgctggtcgggttctttacctatatggtgatgcgggcgatgggcgagctgctgctcacccgccatgactaccgctcgtttgccgactttgtcggcgagtatctcgggccgcaggccagcttttacctcggctggacctactggctaagctgggtggtgacctgtatcgccgacgtggtggtctgcgggagctatatgcagtactggttcccggaactgtcggcgtggatgccggccctcagcatgctggcgatcctgttcctgcttaacctgctgtcggtgaaaatgttcggcgaggcggagttctggttcgccctgatcaaggtgatcaccattatcgccctgatcggcaccggcggctggatgattgccaccggctggacctccccggacggcgtgacggcctccctcagccatctcaccgacccgacggcctttatgcctcacggcatcaccggctttttcgccggcttccagatagcgatcttctcctttaccggcattgagctgctgggcaccatgacggcggagacccgcgatccgcagcgcattttgcccaaggcgatcaatgctctgccgctgcggattatcatcttctatctgctgtcgatggtggtgatcatcgctgtcgcctcgtggccgggggtgtcggcggagaccagccccttcgtgacgctgttcgccaaggccgggctgcctgccgccgcggcggtgattaactttgtggcgctgacctcggcgatgtcctcggccaacagcggggtcttctccagcacccgcatgctgtacggcctgtcggtggagaagcatgcgcactggcagtttcgtatcctgtcgcgcagtacccgcattccggtgcgcagcctgctgttctcctgcttctgcatgctgatcggcacgctgttgctgtttctggtgccgaacgtgatgaccctgttcaccatcgtctcgaccctggcggcgattatggtggtgttcagctgggggatgatcctcgtggcctatctggtttaccgccgtcagcgtccggacctgcacgccgggtcgatctttaagatgcccgccggggtggtgatgagctgggtgagcctgctgttcttcgcgttcgctatcttcatcatgatctttgacccggacacgctgctggcgctgttggcttctccgctgtggtttatcgcgctgtggggcttctggaagctgaagcagcggcgcgaggggcagcttcagctggacaaccagagcgcctga

SEQ ID NO: 270247 - DNA, 1326 bp, Klebsiella pneumoniae
atgagcaatccacaagacaacactgcatccattctgcagaaaaacaagaaggtactgatcgcgagcctgacaggcagcgccatcgaatggttcgattattttctctatggcaccgccgccgcgctggtgttcaacaaaatcttctttccgatggtcgacccggttatcggcctgatcctctcctggctctccttctcgctgacgttttttatccgccccatcggcggcgtgattttcgcccatatcggcgatcgcatcggccgcaagaagacgctggtgctgaccctgtcgctgatggggagcgccacggtggcgatcggcctgctgcccacctacgagatggtgggcctctgggcgccggccctgctgattactctgcgcattattcagggcatgggtatcggcggcgaatggggcggcgcgctgctgctggcctatgaatacgcgccggaaaagcggaaaggctttttcggcagcattccccaggccggggtgaccatcggcatgttgatggcgacatttatcgtctcgctgatgacgctgttcgatgaggcgcagtttctcgcctggggctggcgcataccgttcctgctcagctccgtcctcgtttttctcggcctgtggatccgtaaagatatcgacgaaacgcccgcctttaagcaggtgaaaaaatccggccaggtggcgaaggccccgctgcgcgatacgctcaagcaccactggcgggaagtgctgatcgccgccggcctgaaagtggtggagaccgcccccttctatatcttctccacctttgtggtcagctacgccaccaccaccctgagctatcagaagtcgcaggcgctggaatccgtgaccctgggcgcgctggtggccaccgtgatgatcccgctgatggggctgctgtcagacaaggtgggtcggcaaaagatgtacaccctgagcgtggtgctgctggggctgtttatcgtcccgtggttcctgctgctcgacaccggcaccggctggggcatcatgctggcgacgatcgttgccttcggcatcctgtgggcgccggtaaccgcggtgctcggcaccctgtgctctgagattttcagcgccaatgtgcgctataccgggatcaccctcggctaccagctgggcgccgcgctggccgggggcaccgcgccgcttatcgccaccggtctgctggcaaaatatgacggtgactggcggccggtggccatttatctgggcgttacggtggcgatttcgctgctggcgatattctgcgccagccggatgaagtccgcgctgggcgcggccccctcccgggcggaaagcgcctga

SEQ ID NO: 270248 - DNA, 801 bp, Klebsiella pneumoniae
atggcagaacaatttcctccgctgtcggcagcgacgctggcggcggctaaccaggtcggcgcctggctggcgcaggacgatctggcgacgctgcccgcgctgccgcaggtggacgtggtagtgctggccggcaacgccgtgatcccaaccatcgacgccgcctgccgtctggcggcggcgcaggcggtcccgctgctgatcagcggcggcgtgggacattctacgggctatctctacgaggcggtgcgccaggatccccgttaccgtacgttgccggtggatggccgcccggaagcgcatattctggccgacattgctcatgactactggcacatcccccattcgcggctggtggtggaggaccagtcaaccaactgcggtgagaacgcccgttttacccggaccacgctggagagccgggggctcgcccatcgtcgcgggatcgtcattcaggacccgactatgcagcggcgaaccatggctaccttcgcccgcgtctggcagggggcgacgacgccgccgcagtggttgagctttcccggctgctcgccggtgctggagcagaccgatggccaactggggtttgcgggcggcggagcggggctctggccggtcacccgctacctggggctgctgctgggcgagctgccgcgcctgcaggatacccctgaagggtacggtccgcggggaaaagacttcatcagccatgtcaccttcccgccggagatcctcgacgcctggcgacagctgcgggaggacgcccagcttgccggggccctgcaggcccgcaccctcggctga

SEQ ID NO: 270249 - DNA, 1440 bp, Klebsiella pneumoniae
atgacagcacccgttcaacacccgatgtatattgatggccagttcgtttccggtcgcggcgacggctggatcgacgtgcttaacccggcgaccgaagcgctgctgtcgcggatcccggacgggactgccgaagaggcgcggctggcgattgacgccgccgagcgcgcccagcccggctgggaagcgctgccggccattgagcgtgcgggctggctgcgcaaaattgccgccggtatccgccagcgtgccgacgagatcgccgggctgattgtcgctgaaggcggcaagatccagcagctggcggcggtggaggttgcgttcaccgcggactatctcgactatatggcagaatgggcgcgccgttacgaaggtgagatcgtgcagagcgatcgcccgggggagaatatccttgtctttaaacgcgcgctgggggtgaccaccgggatcctgccgtggaacttcccgttctttcttatcgcccgcaagctggcgccggccctgatcactggaaataccatcgtcattaagcccagcgaatttacgcccaataatgccatcgcctttgccgagattgtccatcaggttgggttgccgaaaggggtctttaaccttgtgcttggccgcggagaaaccgttggccaggagctggccggcaatccgaaggtggcgatggtcagcatgaccggcagcgtggcggcgggagaaaaaattatggccgctgcggcgaaaaatatcaccaaagtgtgcctcgagctcggcggcaaagcgcctgccattgtaatggacgatgcggatctggagctggcggtgaaagcggtagtggactcgcgggtgattaacaccgggcaggtgtgtaactgcgtcgagcgggtctatgttcagcacggaatatacgaccgcttcgtcaaccgcctcggtgaggcgatgaaggccgtccagtttggcgacccggcgacgcgggatgacatcgcgatggggccgctgatcaacgcggcggcgcgggaccaggtggcgggcaaagtggcgaaggcggtggcgcagggggcgcgggtggcgctgggcggtcagccgctggagggcaaaggctatttttatccgccgaccctgctgctggatgtacgtcaggagatggacattatccatgaggaaaccttcggtccggtgctgccggtggtggccttttcgaccctcgatgaggcgctggcgatggccaatgacagcgattatggcctgacctcctcaatctatacccgcgatctgaacgtggcgatgaaagcgattaagggactgaagtttggcgaaacctatatcaaccgtgagaactttgaggcgatgcaggggttccacgccggctggcgtaagtcggggatcggcggggcagatggccgccacggcctgaatgagtacctgcagacccaggtggtctatctgcaggcctga

SEQ ID NO: 270250 - DNA, 999 bp, Klebsiella pneumoniae
atgagtaaacttgggattaatggatttggtcgtatcggacgtctggtgttacgtcgtttattagaagtcgacagcagcctggaagtggtggctatcaacgacctcacttcgccaaaggtgctggcctacctgttgaagcatgattcaaactacggccccttcccgtggagcgtcgactttaccgaagatgcgctgatcgtcaacggcaaaaccattacggtgtatgccgaaaaagaggcgcagcatattccatggcaggcggcaggcgccgaggtgattgtggagtgtaccgggttctacacctcggccgagaaatcgcaagcccatctccaggccggcgcgcgcaaagtgctgatttccgcccccgccggcgagatgaaaaccatcgtctacaacgtcaacgatgacaccctgaccccggatgacaccatcatctccgtggcctcctgcaccaccaactgcctggcgccgatggccaaagttctgcaggatgctttcggcatcaccgtaggcaccatgaccaccatccacgcctataccggcacccagtcgctggtggacgggccgcgcggaaaagatctgcgcgcctccagggcggcggcggaaaacgttatcccgcacactaccggcgcggcaaaagccattggcctggtgatccctgccctgagcggtaagctgaaaggccatgcccagcgcgtaccgaccaaaaccggctcagtgacggagctggtatcggtgctggagaaaaaggtgactgcggatgaggtcaatcaggcgatgaggcaggcggctgagggcaatgaatcctttggttacaccgaagaggagatcgtctcttccgatatcatcggcagccatttcggttcgatctacgatgctacccagctggagattgtggaggccggcggcgtacagctggtgaaaaccgtcgcctggtacgataacgaatacggctttgtcacccaactgatccgcgtgctggagaaatttgcccgctaa

SEQ ID NO: 270251 - DNA, 159 bp, Klebsiella pneumoniae; identical to SEQ ID NO: 136317

SEQ ID NO: 270252 - DNA, 393 bp, Klebsiella pneumoniae
atggaactgctggtcaggctgggtcatttttttgagcaagcgcgttctgacgccgactatgccaccttcgccaatgaactgcgtcggcatcaggtctcctactacatctattttgtttccaccggcaatatgaatttcgtaatggcaaacgacgaggtggtctcggtaaaaagcgcccgcgggctgctgcgcgttcgggctgaggccagccattgtctgaccagggccgccgttatccgccactttgcccgggccattaactttgaacagtactgccgggatcttgccagcgccggggtatttaagtggatcgtcgatctggaagaggagacccggcactactggtcgaaggataatacgctgttgtataaagagtgcctgatgcccccctga

SEQ ID NO: 270253 - DNA, 234 bp, Klebsiella pneumoniae
atgaaaaacatcatccctgattatcgcctggatatggtcggcgaaccctgcccgtatccggcggtcgctaccctggaggcaatgccttccctgcaaaaaggcgagatcctcgaagtggtcagcgactgtccgcagtcgatcaataacattccgcttgatgcaaggaaccacggctacacggtgctggatattcaacaggatggcccaaccattcgctatttgattcagaagtag

SEQ ID NO: 270254 - DNA, 354 bp, Klebsiella pneumoniae
gtgttagccactctcctcgttgcgctggtcgctattattcatctcgccatcctggtgctggagatgtttctctgggaagcccccgccgggcgccgggcctttaacctcagcgccgatttcgcccggcagacccgggtgctggcggccaaccagggcttgtataacggctttctggccgccggcctggcatgggggctgtggctgggggcgccgggggtgcaggtggttatctttttcctggcctgcgtgctggccgccgggattttcggcgcgctgaccgccagccgcaaaattctctatattcaggcgctgcccgcgctgctggcgctggttgccgtgctgacgcaagcgtag

SEQ ID NO: 270255 - DNA, 519 bp, Klebsiella pneumoniae
atggtaaataaattatggattttgttatcagcgctactaatggttgccatgccgtcggcgcaggccggggaattaaacctctattcgatgaataccggttcctatgtctatcatatgacgggtaaccacggacaatataacgaacatttcaataacaactttttctcggtggagcgcaagttttctcaggattcaaaatacagcgtgctggtcggaacgatgaaaaacagctttgacgatcgttgcctgaccctcggcgtgcgccgcgactggctgaaaaacgataccggctgggtactgaaaggggtgtatgcctataccggggaatttttctttgatgccttcagccactgtggggattccggcacctaccgcaccgccaaaaaaatcaccggcatcggtttttcgccctacctctatcatggcctgcaatataatttcaccgattatttcggtgtggaaggcggcattattgtgccggcgatctttgtgatgagtgttcagtggagctttcgctag

SEQ ID NO: 270256 - DNA, 204 bp, Klebsiella pneumoniae; identical to SEQ ID NO: 136323

SEQ ID NO: 270257 - DNA, 1029 bp, Klebsiella pneumoniae
atgagtcaagacgtcaccgcgaagatgttaaagcccgattttgatagtgaagtttccggcctggtgcatggctatttgtttcatgaacagcgccccccgcagccgatcgcctctggcgaggtatgcgcccgctatcaggcgctcgccgatgacaaggcgtttatctggttacacctgaatcttaatcatgccaccgccgagaaatggttaaccagccactttccggtggccgattttttcttcgaggagatccgcagcggctcgcacaccacccgcattgagcgacagggggaaaatctgttcgctgtgcttaacgatgtgctgtttcgtccgcaggataccagcgcggaaaccgccacgctgtggctctactgtagccccaggctggtggtgacggcgcgcttcaaaccgttgcggtttatcgaatggatgctgccgcgcttgcagacgctcagggtgaacacgtctactgagctgctggcctttctgctggaggagcaggaggaggtgctggagcaggtcgtccgccaggccagccgccatgttgaccttattgaagagcgtcttctgagcaatcacgtgcagcgcaaccgggccgatctggcgcggctacggcggatgcttttacgcttccagcggctgctggcgccggagccggcggcgatgttccggctgcttaaccggccgccggcgtggatggatcgcgcggtggtgcaggcgtttcgtcagttcaccgaagagtttagcgtggtgcttaacgatctgtcgggcctgatcgagcgcatcagtctgctgcaggaggagattggcgcccgccagctggagcagagcaatcgcaccctctataccctgacggtgatcaccgtcctcgcgctgccgattaacatcgtcgccggtttcttcggcatgaacgtcggtgggatcccgctggcaagcaaccaccacgggtttatcctgctggtggtgattgtcgctgtctttaccctcggcgccggttacctggcgtttcgccggcgcgatgacctgtag

SEQ ID NO: 270258 - DNA, 1173 bp, Klebsiella pneumoniae
atgtttgattttgccacccctatcgatcgccacggcacctggtgcacgcaatgggactatgtcgccgaccggtttggcgccgccgatctgctgccgttcactatttccgatatggatttcgccaccgcgccctgtattctcgacgccgtcagccagcggctggcccacggggtgttcggctacagccgctggcgcaacgaggcgtttctcggggcgattgtccactggtacgccagccgctttaacagcgacatcgatccgcaatctgtggtctacggaccgtcggttatctacatggtggcggaaaccatccgccagtggtcgaaagaaggcgacggcgtcgtggtccacacccctgcctacgatgcgttctataacaccatcaccgctaaccggcggcggattgccccggtgccattgatcctgaaggataatcggtggcgctgcgatatggaccgcctggaggcggcgctggcggagccaaagaataccctgctgctgctgtgcagcccgcacaacccaacggggaaagtctggcgtcgcgaggagctggagaccatggcggccctgtgtcaaaaacatggcgtcagggtgattagcgacgaaattcatatggacatgacctggggcgaacaccgccatatcccgtggagcgaggtcgctcatggaccatgggcgttgttcacctccggttcgaagagcttcaatattccggcctttaccggggcctacggctttatccccgaagagaacgagcgcgacagctacctgcaggcgctaaagggtcgcgacgggctctcttccccttccgtgccggcgctggtcgcccatatcgccgcctaccgcgacggggctccctggctcgatgccctgcgcgactacctgcaggcgaatatgcgctatgtcgccgacacgctcaacaacgccttccccgcgctctgctggcagccgccggaggccacctacctggcatggatcgacctgcgcccgctcaacgttgacgatcgcgcgctacagcaggcgctgatcgccgaacagaaggtggcgattatgccgggttatacctatggtcctgagggcaacggctttctgcgactcaacgtcggctgcccgcgcgagaagctggaacgcggtgtcgaaggactgattgccgccctgcgcagcctcagctga

SEQ ID NO: 270259 - DNA, 1593 bp, Klebsiella pneumoniae
atgacggcgaaaaccgcaccaaaaatcaccttgtgggaatttttccagcagctgggaaaaacctttatgctgcccgtggcgttgctctcgttttgcgggatcatgctggggatcggcagctcgctaagcagtcacgatgttttgactctgctgccgtggctggatatgccgctgctgcaggccatctttatctggatgagcaaggtcggctcctttgccttcagcttcctgccggtcatgttctgtatcgccatcccgctgggtctggcgcgagagaacaaaggcgtcgccgccttcgccggcttcgttggctacgcggtcatgaacctggcggtcaacttctggctgaccgcgaagggtattctgcccaccaccgacgccgcgatcctgaaggccaacaatatccagaacattatcggcattccgtcaatcgataccgggatcctcggggcggtgatcgccgggattatcgtctggctgctgcatgaacgcttccataacattcgcctgccggacgccctggccttcttcggcggcacccgcttcgtgccgatcgtcaccaccgtggtgctggggctggtcgggctggcgatcccgctggtgtggccagtcttcgccatggggatcaacgccctcgggaagatgatcaacagcgccggggattttgggccgatgatcttcggcactggcgagcgactgctgctgccgtttggcctgcaccatattctggtggcgctgatccgctttaccgaagccggcggcaccctcgacgtctgcggccacagcgtcagcggcgcgctgaccatcttccaggcgcagctgagctgtccgacgacccacggcttcgccgaaagcgccacccgtttcctgtcgcagggtaaaatgccggcattcctcggcggcctgccgggagccgcgctggcgatgtaccactgcgcccgtccggaaaaccgacataaaattaaaggcctgctgatctccggggtcatcgcctgcgtggtcggcggcaccaccgagccgctggagttcttgttcttgtttgtcgcgccggtcctgtatgtcatccacgcgctgctgaccggtctcggctttaccatcatggcggtgctcggggtaaccatcggcaacaccgacggcaatatcatcgacttcgtggtgtttggcattctgcatggcctggccaccaagtggtatctggtgccggtggtggcggctatctggttcgcggtctactatgccatcttccgcttcgccatcacccgcttcaatctgaaaacgccgggccgcgacatcgacactgccgccagcgtggagaaagccgtcgccggtaccatcggcaaatccgggtataacgtaccggcgattctggcggcgctcggcggcgcagagaacattgtttcgctggataactgcattacccgtctgcgcctgtcggtgcacgatatgagcaaagtggacgccgccgcgctgaaagcccatcgcgctatcggggtggtacagctcaaccagcataatctgcaggtggttattggcccgcaggtacagtcggtaaaagatgagatggccacgctgatgaataccgtgcaggcctga

SEQ ID NO: 270260 - DNA, 1029 bp, Klebsiella pneumoniae
atggcaatcgcaaaaaagatcaccatcaatgatgtggcgctggccgccggcgtctccgtgagtaccgtttcactggtactgagcggcaaagggcgcatctccagcgccaccggcgagcgggttaatcaggctatcgaacagctgggatttgtgcgcaatcgtcaggcggcctcgctgcgcggtgggcagagcggcgtgattggccttatcgtcagcgacctgtcaaaaccgttttatgctgaattaaccgccggcctcaccgatgccctggagaggcaggggaaaatggtatttctcacccagggaggccgcagcggcgagaagatggcccagcggtttgatacgctggcggcgcagggggtggacggggtgattatcgccggggcgatcgaccgcgggagcgagctgcgcgagcgtgcggcggaggcgggggtgccgctggtgtttgcttcccgcgccagctatcttgacgatgtcgacctgatccgcccggacaacatgcaggcggcgcagctggtgacggagcatcttatccgccgcggccatcagcggatcgcctggctcggcgggcagagtgcttcgctgacgcgcgccgagcgggtcggcggctattgcgccaccttgctgaaatacggcctgccgtttcacagcgaatgggtgctggagtgcgagtccagtcagaagcaggcggcggaggcgatgaccggcctgctgcgccagaatccgaccattaccgcggtgctgtgctacaacaacgtggtagccaccggcgcgtggttcggtctgttacgggctggaagacagagcggggaagatggcgttgagagctactttgagcagcgggtggcgctggcggcgtttgccgacgtgccggaggccgccctcgacgacctgcccctcacctgggtgaccaccccggcgcgggagatggggaaaagcctggcggattcgatgctgcggcggctggaagaggggactggcgagacgcgaaaccagattatgcccccgcggctggtgacgcgaaaataa

SEQ ID NO: 270261 - DNA, 1506 bp, Klebsiella pneumoniae
gtggcgctgggcgtggtatggacaggcggcgcctggttcaccggtaaacagctggaaggccggatcgccgatatggtgcagcaggcaaacgcccagctgcgcagcagcgcgccggagtcaggtctggagctgagctatcaggactaccagcgcgggctgttcagcagccatctgcagctggtggtgaagccgatcgccggtcaggctaacggctggctggccgccgggcagagcgtggtgcttgacgaagtggtcgatcatggccccttcccgctggcctcgttaaaagcctttaatctggcgccggcaatggcttccgtccacaccacgctggtgaaaaacgacgccagccaggcgctgttcgagatagccaaaggcgacaccccctttaccgtcgatacgcgcattgcctacagcggcgacagccagtcggctatcgtccttaacgccctcgactacgctaaaggcgatgagaaagtcaccttcagcggcggtcagttccagctcgacgccgaccgcgacggcaaaaacatcagcctgaagggccaggccggcagcgggcagatcgatgcgctcaatgaatataatcagaaggtacagctgcgcttcgtcaacctgaccaccgacggcgccaccgaactggccagcttcaacgaacgtatcggccagcaaaaaatgaccctcgataaactggccatcagcgtcgaaggcaaagagctggcgctgatcgacggcatggcgctggacggcggctcgacgctgacccaggacggcaaaggcgtgaacagccaggtgaactacaccgtcaacagcctcaagctgcaggggcaggatatgggcagcggcaaactcacgctgaaagtggataacgtcgacggtcaggcgtggcaccagttcagtcagcagtacagcgcgcagtctcaggcgctgctggcgaaaccggagctggcgcagaatccggagctgtatcagcaggccctcaccgaaacgctgttcaatgcgctgccgatcctgctcaaaggcaacccgtcggtgaccatctctccgctgagctggcgcaatgccaaaggcgaaagcaccctcaacctctcggttctgctgaaagatccggcccaggtgaccgctccgccgcagaccctggcggacagcctggatcgcgtggtgcagtccctcgacggcaaagtggtgatcccggtggatatggcgacggagtttatgactaagatcgccggtctggaaggctatcagccggccgatgccgccaagcttgccgatcagcaggtcaaaggcctggcggcgatgggccagatgttccgcattaccaccatggaagataacgccatcagcagcagtctgcagtacgcgaacggccaggtgacgctgaacggacagaaaatgccgctgcaagattttgccgcgatgtttggtctggaagcgccttcgctgccggacagcgcgccgcaggaaggccagccgcagcaggatgacgccgccccgcagccgtaa

SEQ ID NO: 270262 - DNA, 1179 bp, Klebsiella pneumoniae
atgcaaaagctgattaacgccgtgcagaactatgcatggggaagccacaccgccttaactgaactgtatggcatcgccaacccggacaatctgccgatggcagagctgtggatgggggcgcatccgaagagcagctcgcagatcctggcggccgacggccagccgcgttcactgcgcgaggtgattgacgcggataaagccgctctgctcggcgacaaggttgccgcccgctttggtgaactgccgttcctgtttaaggtactgtgcgccgctcagccgctctcaattcaggtgcatcccaacaagcaggcctcggaagaaggtttcgcccgcgagaacgccgccggtatcccgctctccgccgccgagcgtaactacaaagatccgaaccacaaaccggagctggtttttgccctgacgccgttcctggcgatgaatgcatttcgcgagttcagcgagattgtcaccctgctgcagccggtggctagcgcgcatccggcaatcggcgccttcctgcagcagccggacgcgactcacctgagccagctgtttgccagcctgctaaatatgcagggtgaggaaaaggccaaggcgctgcaggtgctgcgcgacgtactggcccgtgaacaaggcgaaccgtggcagactatccgcctgatcgcggaattctatccggacgacagcggcctcttctccccgctgctgctgaacgtggtgaagctgaacccaggcgaagcgatgttcctgtttgctgaaacgccgcacgcctatctgcagggggtggcgctggaggtgatggccaactcggataacgtactgcgcgccggcctgacgccgaaatacattgatattcctgagctggttgctaacgtcaagttcgaggctaaaccggcgggtgagctgttgacccagccgcagcgtcacggcgcggaactcgacttctcgatcccggtggaagattttgccttctccctgcatgacctctccgccgaggccagcgatttggcccaggcaagcgcggcgatcgtgttctgcgtcgacggcgaagccgtactgcgcaaaggcgaccagagcctgaccctcaagccgggcgagtcggcattcgtggccgccagtgaatcgccggtgcaggtcagcggccgcggccgcgtggcgcgcgttttcaataagctccagtaa

SEQ ID NO: 270263 - DNA, 1647 bp, Klebsiella pneumoniae
atgtcgaataaaccgtttgtttaccaggatccttttccgctcaaaaaggatgacaccgagtattatctcctcagcagtgattacgtctccgtcgccgaattcgccggccaggaagtgctaaaagttgaccctcaggcgctgacccttctggcgcagcatgctttccacgacgcctcctttatgcttcgccctgcgcatcagcagcaggtggcggatatccttaacgatccggaagccagcgaaaacgataaatacgtcgcgctgcagttcctgcgcaactcggatatcgccgccaaaggtattctgcccacctgccaggacaccggcaccgcgatcatcatgggtaaaaaaggccagcgcgtgtggaccggcggcggcgatgaagccgccctggcgcagggggtgtacaacacctatatccaggacaacctgcgctactcgcagaacgcgccgctggatatgtataaagaggttaacactggcaccaacctgccggcgcagatcgatctctatgctaccgatggcgatgagtacaaattcctctgcatcgccaagggcggcggctcggcgaacaaaacctatctgtaccaggaaaccaaagcgctgatcaccccggcgaagctgaaaaattacctcgtcgagaagatgcgcaccctcggtactgccgcctgtccaccgtaccatatcgccttcgtgatcggcggtacctcggcggaagcgacgctgaagaccgtgaagctggcgtccaccaaatactacgatggcctgccgaccgaaggtaacgagcacggccaggcgttccgcgacgtgcaactggagcaggagctgctgctggaggcgcagaaccttggtctcggcgcgcagttcggcggcaaatactttgcccacgatatccgcgtgatccgtctaccgcgtcacggcgcttcctgcccggtagggatgggggtttcctgttccgccgaccgcaacatcaaagccaagattaaccgcgacggcatctggatcgagaagctggagagcaacccggggaaatatatccctgagcatctgcgccaggccggggaaggcgaagcggtgaaggtaaatcttaaccagccgatgagcgagatcctggcgcagctgtcacagtatccggtgtccacccgcctgtcgctgagcgggactatcatcgtcgcccgcgatatcgcccacgctaagctgaaggagcttatcgacaacggcgaggcgctgccgcagtacgtcaaagatcacccgatctactacgcaggtccggccaagacgccggacggttacgcctccggctctctggggccgaccaccgcaggccgcatggactcttacgttgatctgctgcagtcccatggggcgagcaagatcatgctggcgaaaggcaaccgcagccagcaggtcaccgacgcctgccacaaacacggcggcttctacctcggcagcatcggcggcccggcggcagtgctggcccagcagagcatcaagagcctcgagtgcgtggcctatccggagctgggtatggaggctatctggaaaattgaagtggaggatttcccggcctttatcctcgttgatgataaaggcaatgacttcttccagcagatccagacctcgcagtgcgcccgctgcgtgaagtaa

SEQ ID NO: 270264 - DNA, 1401 bp, Klebsiella pneumoniae
atgacaacgcatcgcagtgaaaaagactcgatgggcgccatcgaggtcccggccgataaactctggggcgcccagacccagcgctcgctggagcatttccgcatctcgaccgaaaaaatgcccggggagctgatatacgccctggcgctgaccaagcgggcggcggcgaaggttaaccaggatctcggactgttgacggcggaaaaagccggggcgatcgtcgccgccgctgacgaagtgctggccggaaagcacgcgcaggagttccccctggctatctggcagaccggctccggcacccaaagcaatatgaatatgaacgaggtgctggccaaccgcgccagtgaactgctcggcggagaacgggggatggcgcgaaaaattcatcccaatgacgatgtgaataagagccagagctcaaatgatgtattccccaccgccatgcacgtcgcggcgctgattgccctgcgggaaaaagtgatcccgtcactgcaggcgctgcgggcgacgctcaatgaaaaagcggtggccttcagggatatcgtcaagatcggccgcacccatctgcaggacgccacgccgctcaccttaggccaggagatctccggctgggtggcgatgctggaccatagcctgaagcacattgaagccagtcagccgcatcttgccgagctggcgctgggcgggacggcggtaggaaccgggctgaatacccatccggaatatgccgtacgggtggcggccgagctggcgtcgctcagcggacagccatttgtcaccgcgccgaacaaattcgaagcgctggccactgtggatgccctggtccatgcccacggcgcgctgaaaggcctggcggcctcgctgatgaaaatcgctaacgatgtccgctggctggcctccggcccccgctgcggcattggtgaaatcgccatcccggaaaacgagccagggtcatcgattatgccgggcaaggttaacccaacccagtgcgaagctctgaccatggtctgctgccaggtgatgggcaacgacgtggcagtgaatatcggcggtgcttccggcaactttgagcttaacgtctatcgcccgatggtcatccacaacttcctgcagtcggtgcgtctgctggcggacggtatggcgagctttaacgagcactgtgcggtgggtattgaaccgaatcgcgagcggatcagtcagttgctcaatgagtcgctgatgctggttactgcgctgaatacccatatcggctacgacaaggcggcggaaatcgctaaaaaagcgcaccatgaggggctgactctcaaagcctcggcgctggcgctgggctacctgacggaagccgaattcgacagctgggtgcgcccggaagagatggtcggcagcctggctattcgctag

SEQ ID NO: 270265 - DNA, 933 bp, Klebsiella pneumoniae
atggccagctacgacctcgttgaacgtctgaataatacctttcgccagatcgagctggagctgcaggcgctccagcaggcgttaagtgactgccgtctgctggcgggccgggtatttgaactgccggcgatcggtaaggatgccgagcacgatccgctggccactattccggtggtgcagcacatcggcaagacggccctggcgcgcgccctgcgccactacagacatctgtttatccagcagcaatcggaaaaccgcagtagcaaggccgccgtacgcctgccgggggctatctgcctgcaggttaccgccgcggagcagcaggatctgctggcgcgtattcagcatatcaatgccctgaaggccaccttcgagaagatcgtcaccgtcgactccggcctgccccccaccgcccgttttgagtgggtacaccgtcatttgccggggttgatcacccttagcgcctaccgcacgctgacgcccctcatcgacccgagcaccatccgcttcggctgggccaataagcacgtcatcaagaatctgacccgcgaccaggtgttgatgatgctggagaaaagcctgcaagcgccgcgggcggtgccgccgtggacccgggagcagtggcagagcaaactggaaagggagtatcaggatatcgccgccctgccgcagcgggcgcggctgaaaataaaacgaccggtgaaagtccagccgatcgcccgcgtctggtacgccggcgagcagaaacaggtacagtacgcctgccccagcccgctgatcgccctgatgtccggcagccggggggtcagcgtaccggatattggcgagctgctgaactatgatgccgacaatgtgcagtatcgctacaaaccggaggcgcagtcgctgagattgcttatcccgcgcctacacctctggctggctagcgaatag

SEQ ID NO: 270266 - DNA, 1302 bp, Klebsiella pneumoniae
atgaaaaagctgttcgtgcagttctatcttctgctcttcgtctgctttctggtgatgaccatgctggtcggtctggtctataaatttaccgcggagcgcgccggacggcagtcgcttgacgatttgatgaaaagctcgctgtatctgatgcgcagcgagctgcgggagataccgccacgcgactggagcaagacccttaaagagctggacctgaatttatcgtttgatctgcacatcgagccgatcagcaaatttaagctgtcggaaagctcgatgcagcacctgcgcgccggcgatatcgtcgccctcgacgatcagtacacctttattcagcgcattccccgcagccactatgtgctgtcggtgggtccggtgccctatctctattttctgcatgagatgcgcctgctggacgtggcgctgatggcgtttattgctatctcgctggcctttccggtgtttatctggatgcgcccgcactggcaggacatgctgcgcattgagacggccgcccagcgctttggcgaaggtcacctcagcgagcgcattcacttcgacagtatgtccagcttcgagcggctcggggtggcctttaaccaaatggccgataacattaatgcgcttattgccagcaaaaagcagctgattgacggcatcgcccatgaactcaggacaccgctggtacgcctgcgctaccgtctggagatgagcgagaatctcagcgaggcggaatcgcaggcgctgaaccgcgatatcggtcagctggaggcgctgattgaagagctcctgacctacgcccgcctcgaccgcccgcagacggagctcagcctgacgactcccgattttcccgcctggatcagcgatcacgtcgaggatatccagatggttaacccacagcgcgaggtcgccctggcgacgctgacccacggtaactacggcgcgctggatatgcgactgatggagcgggtgctggataatttggtcaataacgccctgcgctacagcagccagcgggtggcggtcagcctgacgctgcagggttcgcgcgcatcgttgctggttgaggatgacggcccgggaatcgcccccgaggagcgcgagcgggtgtttgagccctttgtccgccttgaccccagccgggaccgggcgacaggaggctgcggcctcggcctggcgattgtccacagtatcgcccaggcgatgggcggcgaggtgcgctgcgaggccagccctctcggcggcgcccgcttctgctttagctggccggtctatcatcagctgcctgatttcacctctgcctga

SEQ ID NO: 270267 - DNA, 363 bp, Klebsiella pneumoniae; identical to SEQ ID NO: 138550

SEQ ID NO: 270268 - DNA, 720 bp, Klebsiella pneumoniae
atgaataaaatcgtttttgttgaggatgaccctgaggtaggcacgctgatcgccgcctatctcggcaagcatgatatggatgtggtggtcgagcctcgcggcgaccgcgctgaggaggtgatcgcgcgggagaaaccggatctggtgctgctggacattatgctgcccggcaaggacggaatgacgctctgtcgcgatctgcgcgggcaatggcaagggccgattgtcctgctgacttcgctcgacagcgatatgaaccatatcctctccctggagatgggcgccagcgattatattctgaaaaccacgccgccagcggtacttctcgcgcgactgcgtctgcatttgcgccagcatattgctccggcaggcgccggatccgcctcctcaacgctcacgccacataaaaccatctccttcggctcgctgaccattgacccggtcaaccgccaggtgctgcttggcggagaaaacgtcgccctgtcgaccgccgatttcgatctgctgtgggagttggccacccacgccgggcagattatggaccgcgacgcactgctgaaaaatttacgcggcgtgacctatgacgggatggatcgcagcgtcgacgtggctatctcccgcctgcgcaaaaaactgctcgacaacgccacggagccctatcgtattaagaccgttcgcaacaaaggctacctgttcgcccctcacgcctgggataactaa

SEQ ID NO: 270269 - DNA, 336 bp, Klebsiella pneumoniae
atggggctgttaatcaaagggctgctgggagcgctggtggtggtgctgattggcgtgctggcgaaaaccaaaaactacgctatcgctggcctggtcccgctgtttcccacctttgcgctcatcgcccattatattgtcgccagcgagcgggggatcgaagccctgcgcgcgaccatcgttttcggcatgtggtcgattcttccctattttatctatctgctgtcactgtggtatttcaccgggatcatgcgcctgccgttggcgctggcaggcgcggtgggatgctgggggctgtgcgcctggctgttaatcctcggctggagccgtttccactag

SEQ ID NO: 270270 - DNA, 723 bp, Klebsiella pneumoniae
atggctgaacaacagccccgcccgattctgatcacaggagcaggccgccgcatcggcctcgctctggcacaccattttctgcagcagcgccagccggtcatcgtcagctatcgtacgccctatccggcgattgacggcctgcgcgaagcgggcgcgctctgcctgcaggccgattttagcagcgatgacggcattctgaccttcgctgaagcggtcaaatcacacaccgacggtctgcgcgccatcatccataacgccagcgactggatggcggaaaagccgggcgtcccgctgagcaccgtcatcaaccgcatgatgcagatccacgtcaacgccccctatctgctcaaccatgcgctggaggcgttgctgcgcggccacggccatgccgccagcgacattatccatatcaccgattacgtggtggagcgcgggagcgacaaacatatcgcctatgccgccagcaaagccgccctggataacatgacccgctccttcgctcgcaagctggcgccagaggttaaggtcaacgccatcgcgccgtcgctaatcatgtttaatgagggtgacgacgaggcctatcgtcagcaggcgctggataaatcgctgatgaaaatcgcccctggcgaaaaagagattagcgatctcatcgattacctgtttaccagccgctacgttaccggccgctcattcgctgtcgacggcggccgcccgctgcgctag

SEQ ID NO: 270271 - DNA, 951 bp, Klebsiella pneumoniae; identical to SEQ ID NO: 235138

SEQ ID NO: 270272 - DNA, 1530 bp, Klebsiella pneumoniae
atgcgtattggtgtaccacaagaaaggctagcccaggagacccgggccgccgccacgccgaagaccgttgagcaattgctcaaactcggctttagcgtcgcggtagaaagcggcgccgggaagctggccagctttgacgatgaggcctttgccgaggcaggagctgaaatcgtgaccggcgacgaggtatggcagtctgatgtcatccttaaggtcaatgctccgaatgacgatgaaattgccctgctgaatccggggaccacgctgattagttttatctggccggcgcaaaacccgcagctgatggaaaaactggcggcccgtaatatcaacgtaatggcgatggattccgtgccgcgtatttcccgcgcccagtcgctggatgcgctcagctcaatggccaacatcgccgggtaccgcgctatcgttgaagcggcgcatgaatttggtcgattctttaccgggcagattacggcggcaggcaaggttccgcccgccaaggtgatggtcattggcgccggggtagccggtctggcggcgattggcgccgccaacagcctgggcgctattgttcgcgccttcgatacccgtccggaagtgaaggagcaggtgcagagtatgggcgccgagttcctcgagctggactttaaagaggaagcgggcagcggcgatggctacgccaaggtgatgtctgaggcctttattaaggctgaaatggcgctgttcgccgcgcaggcgaaagaggtcgatatcattgtcaccacggcgttaatcccgggcaaaccagcgccgaagctgatcacccgcgaaatggtcgactccatgaaatcgggcagcgtggtggtcgatctggcctcgcaaaacggcggcaactgtgagtacaccgtaccgggcgaagtggtgaccaccgccaacggcgtgaaaatcatcggttacaccgatcttcctggccgtctgccgacccagtcctcccagctctacggcaccaacctggtgaacctgctgaagctgctgtgcaaagagaaagacggcaatatcgttatcgatttcgatgacgtggtagtgcgcggcgtgaccgttgttcgcgaaggtgaaatcacctggccggcgccgccgattcaggtctccgctcagccgcaggccgcggcgaaaaaagtggaagcgccgaaagaagcggtgaaaccggcgtcgccgtggcgcaaatatgcgctgatggcgctggcgattattctcttcggctggctggccaacgtggcgccaaaagagttcctcggccatttcaccgtcttcgcgctggcctgcgtggtgggttactacgtggtgtggaacgtctcccatgcgctgcatacgccgctgatgtcggtgaccaatgccatttcgggcattatcgtggttggcgcgttgttgcagataggccacggcggctgggtcagcttcctgagctttatcgcggtgctgatcgccagcattaatattttcggtggttttaccgtgactcagcgcatgctgaaaatgtttcgcaaaggataa

SEQ ID NO: 270273 - DNA, 1389 bp, Klebsiella pneumoniae
atgtctggtggattagtaacggctgcatacattgttgctgcaatcctgtttattttcagcctggcgggcctgtcgaaacacgaaacgtcgcagcagggcaactatttcggcatcgccgggatggccattgccctgatcgctaccatcctggggccggacgccggcaacgtcggctggattattcttgcgatggtgatcggcggggcgatcggtattcgtctggcgaagaaggtcgagatgaccgaaatgccggagctggtggctatcctgcacagcttcgtgggtctggcagcggtgctggtgggtttcaacagctacctgcagcatgaaaccggtatggagcaaattctggtcaatattcatttgaccgaagtgttcctcgggatcttcatcggcgcggtgaccttcaccggttcggtggtggcgtttggtaaactgcgcggcaaaatttcctccaggccgctgatgctgcccaatcgccataagctgaacctggcggcgctggtggtttccttcatcctgatggtgatttttgttcgctctgacagcaccggcacccaggtcctgtgcctgctggtgatgaccgcgatcgcgctggcctttggctggcacctggtggcctctatcggcggtgcggacatgccggtggtggtctcgatgctcaactcctactcgggctgggcggcagcggcggcgggctttatgctgagtaatgacctgctgatcgtcaccggcgcgctggtgggctcttccggcgccatcctctcttacattatgtgtaaggcgatgaaccgctcctttatcagcgtgatcgccgggggcttcggcaccgatggttcctccagcggcggcgatgaagaagtgggcgagcatcgcgagattagtgccgaagagacggcggagatgctgaaaaactcgcactcggtgatcatcaccccgggctacggtatggcggtggctcaggcgcagtatccggtagcagaaattaccgagaagctgcgggcgcggggtatcaaagtacgctttggtattcatccggtggccgggcgcctgccggggcatatgaacgtcctgctggcggaagccaaagtgccttacgacatcgtgctggagatggatgagatcaacgacgatttcagcgacaccgacaccgtgctggtgatcggcgccaacgataccgtcaacccggcggcgcaggacgatccgaagagcccgatcgccggcatgccggtgctcgaggtgtggaaagcgcagaatgtggtggtctttaagcgttcaatgaacaccggttacgccggcgtacagaacccgctgttctttaaagagaacacacatatgctgtttggcgatgctaaagccagcgtcgatgcgatcctgaaagcgctgtaa

SEQ ID NO: 270274 - DNA, 222 bp, Klebsiella pneumoniae
atgttcctgttcttacatcagacagaggatattatggataccgagttaaccccaacgcagatggccatcgaattcttacgccgcgacactaccgtcatgaccccagcgcagtatctgaaaaaacttaaactgctggagctggagtttgctgacctgatggcgctctcctcgctggagctgaaagaagagatcgatctggcctggcgtctgggtatccactaa

SEQ ID NO: 270275 - DNA, 951 bp, Klebsiella pneumoniae
atggcgaagtatcagagcatgctggtagtaatcgatcctaaccaggacgaccagccggcgctaaggcgagcggtgtacctgcaccaacggattggtggacgcatcaaagcctttttgccgatctatgatttttcctatgaaatgaccaccctgctgtcgccggatgagcggacggcaatgcgccagggcgtcattgcccaacgaacggcctggatccgcgagcaggcgaaattctacctggaatcgggcgtgccgattgacgtgaaagtggtgtggcacaaccgccccttcgaagcgattattcaggaggtggtcagtgagaaacacgatctgctgctgaagatggcccaccagcacgacaaactggaggcggtgatctttaccccgacggactggcatctgctgcgtaaatgcccttgcccggtgtggatggtcaaagaccagccgtggccggaaggcggcaaagcgctggtcgccgtcaatctcgccagcgaagagaattatcacaacacccttaacgagaagctggttcgcgagacgctgtcgctggcggaagaagtcaaccacactgaagtgcacctgatcggtgcctacccggtgacgccgatcaatatcgcgatagaactgccggattttgatcccagcgtctacaacgacgcgatccgcggccagcatctgctggcgatgaaagcgctgcggcagaagtttggcatcgatgaaaaattcacccacgtcgaaaaaggactgcctgaagaggtgatcccggacctcgccgagcatctgcaggcggggatcgtggtgctgggaacggtcggacgtaccggcctgtcggcggcgttcctcggcaataccgcggaacaggttgtcgaccacctgcgctgtgacctgctggtgctgaaaccggaggcctaccagacgccggtggaactggacgacgacgacgacgattaa

SEQ ID NO: 270276 - DNA, 753 bp, Klebsiella pneumoniae
atgatccctgagaagcgaattattcgacgcattcagtctggcggttgtgcaatccattgtcaggattgcagcattagccagctctgcatcccctttactctgaacgagcatgagcttgatcagctggataatattatcgagcggaaaaagcctatccagaaaggtcaaaccttgttcaaagccggtgatgagctgaagtcgttgtacgctattcgctccgggaccatcaaaagctataccatcaccgagcaaggtgatgagcagatcactggcttccatctggcgggcgacctggtgggctttgacgccatcggcaccggtctgcacccgagctttgcgcaggcgctggaaacctcaatggtctgcgagatccccttcgaaacccttgacgatctttccggaaaaatgcccaatctgcgtcagcagatgatgcgcctgatgagcggtgagattaaaggcgaccaggatatgatcctgttgctttccaaaaagaatgccgaagagcgcctggccgcgtttatctataacctttctcgtcgtttcgcccagcgcggcttctcaccacgtgagttccggctgaccatgacccgcggcgatattggcaactatctcggcctcaccgtcgaaaccatcagccgtctgctgggccgttttcagaaaagcggcatgctggcggtgaaaggcaaatatatcactattgaaaacagcgatctgctggcccagctggccgggcaggcgcgcaacgtcgcttaa

SEQ ID NO: 270277 - DNA, 516 bp, Klebsiella pneumoniae; identical to SEQ ID NO: 136767

SEQ ID NO: 270278 - DNA, 159 bp, Klebsiella pneumoniae; identical to SEQ ID NO: 269076

SEQ ID NO: 270279 - DNA, 1527 bp, Klebsiella pneumoniae
atgagtatgtcatccataccgtcatcttcccccggcggaaagcgctatggctgggtagagaagatcggtaacaaggtcccgcacccgtttttgctgtttatctatctcatcgccgtgctgatcgctgccacggcaatcctctccgccctcaacgttggggtacaaaacccaactgacggttcgcgggtggtggtcaaaaacctgctcagcgtggaaggattgcactggtttttgccgaacgtgattaaaaacttcagcggtttcgcgccgctgggcgcgatcctcgccctggtgctgggcgccggctttgccgagcgggtgggcctgttaccggcgttgatggtcaagatggcctcgcacgtcagcgcccgctatgccagctatatggtgctgtttatcgcctttttcagccatatctcttccgatgcggcgctggtgattatgccgccgctgggggcgctgatgtttcttgccgtcggtcggcatcctgtcgctggtctgctggcggcgatagccggcgtgggctgcggctttaccgccaatctactgattgtcaccaccgacgtgctgctctccgggatcagcaccgaggcggcaaagtccatcgatgcctctttgcacgtcagcgtgatcgacaactggtactttatggcgacctcggtgatcgttctgacgctcgtcggcggactgatcaccgataagctggtcgagccgcggctgggccagtggcaaggcagtcgtgatgaaaagctgcagacgctgacgcccggggagcggttcggcctgcgcatcgccggcgtggcgacgctggtattcgtggcggtcatcgccctgatggtggtccccgaaaacggtattcttcgcgatccggttcagcatacggtcatgccctcgccgtttatcaaaggcatcgtgccgctaattatctttttcttctttgtcgtgtcgctggcatacggcatcgccaccggcaaaattcgccgccaggccgacctgccgcagttgatgattgagccgatgaaagagatggccgggtttatcgtgatggtcttcccgctggcgcagttcgtggcgatgttcaactggagcaacatgggcaagtttatggccgtcgggctgacggatctgctggagagttcaggcatgaacggtgttccggcgtttgtcggtcttgcgctgctgtcggcttttctgtgtatgtttatcgccagcggctcggccatctggtcgattctggcgccgatcttcgtgccaatgtttatgctgttgggctttcacccggcgtttgcgcagatcctgtttcgtatcgctgattcatcggtgctgccgctggcgccggtgtcaccgtttgtgccgttgtttctcggctttctacagcgctaccggccggatgcccgcctcggcacctactactcgctggtgctcccttacccgctgatttttctcgccgtctggctgctgttgctggtgggctggtatctggtgggactgccgatcggccctggcatctatccgcggctgtcttaa

SEQ ID NO: 270280 - DNA, 1446 bp, Klebsiella pneumoniae
atggaagccatttttcagtttgtggacgaggtggttgaggcacaacgcgacacttactgcgccatcgccgacgacatctgggaccacccggagacccgctttgaggagttctggtcagcccaacggctggccgacgccctggaggcggaaggttttcagctcacccgcgatgctggcgggatcccgaatgcctttatcgccagcgtcggtgagggccaaccggtcattgccctgctcggcgaatttgacgccctggcgggactcagccagcaggcccacagcgcggaaccgacgcccttgacaccgggagccaacggccacggctgtgggcacaatctgctcggcaccgcggcattcgccgcggcggtcgccgccaaaggctggctgcagcagcacggcgacagcggcactctgcgcttctacggttgtcccggcgaggaaggcggttcgggaaaaacctttatggtgcgcgaagggttgtttgatgatgtcgatgcggcgctgacctggcatccggaagcctgggccgggatgttcagcacccgcaccctcgccaacattcaggcggcatggcgatttaccggcaccgcggcccacgccgctaattcgccgcacctgggccggagcgcgctggatgccgtcaccctgatgaccaccggcagcaatttcctcaatgaacatatcatcgagaaggcgcgcgtccattacgccattaccgataccggcggcgtctcgcccaacgtggtgcaggcgcaggcggaagtgctgtatttgatccgcgcgccggagatggccgacgctgagcaaatcttcgcccgcatagagaagattgcccagggggccgcgctgatgaccgagacccaggtcagctgccgctttgaaaaagcctgctccagctatctgcccaaccgcacgcttgaggcggcgatgtatcaggcggtctgtcattacggtacccccgcctggagcgacgaggaacgcgcttttgccgcggcgatccgcgccactctaagcgccaacgatattaacaacagcctgaacaatattgccggcaccagtggcgaggaaggcaaaacgttcgctcgtcgccaccgcgacaccttgctgattgatgaggtggcgccctgggtggccacggataacgtcctcgccggatccaccgacgtcggcgatgttagctggaaagcgccggtggcccagtgcttcagcccgtgcttcgcggtgggtaccccgctgcacagctggcagctggtgagccagggcagaacctccattgcccataaagggatgttgctggcggggaaagtcctcgcggcgaccgccatccgtttattcagcgacagcgccctgctggcggccagccagcaagagctcaggcaggtactggccgaacgcccctatcgttgcccgatcccggcggaggtgagtccgtccgttttacgataa

SEQ ID NO: 270281 - DNA, 1311 bp, Klebsiella pneumoniae
atgccgcaacttgatgaatacctccgccagctggcgccctccatgacccaatggcgccgcgattttcacctgcacgctgaatccggctggctggagtttcgcaccgccagtaaggtcgcggatattcttgacgggctcggctatcagctggcgctaggccgcgacgtcatcgatgccgacagccggatggggctgccggacgaggagaccctggcccgggctttcgaacgcgcccgcgaacagggcgcgccggagcgctggctgccggcgtttgaaggtggtttcgccggcgtggtggccacgctcgacaccgggcggcccgggccaaccctggcctttcgcgtcgatatggatgccctcgatctcaacgaacagcatgacgatagccaccgcccccatcgcgatcatttcgcctcctgcaacgccggcatgatgcacgcctgcggccatgacggccataccgccatcgggctggggctggcgcatgtgctcaagcagtatgccgcccagctcaatggcgtcattaaactgattttccagcctgctgaagagggtacccgcggcgcccgcgcgatggtggccgccggcgtggttgatgacgtggattatttcacggcgatccatatcgggaccggcgtgccggcaggtaccgtcgtctgcggtggagacaactttatggccaccaccaaattcgacgtgcagttcagcggcgtggccgcccacgccggcggcaagcccgaggacgggcgcaacgcgctgctggccgccgcccaggccgcccttggcctgcacgccatcccgccgcacagcgccggcgcctcgcgggtcaacgtcggggtgatgcaggccggtaccgggcgcaacgtggtgccctcttccgcgctgttaaaagtggaaacccgcggcgaaagcgaagccattaatcagtacgtgttcgagcgggcgcagcacgtcgtcgccggggcggcggcgatgtacgaagcccgctacgaactgcgcatgatgggcgcggcgaccgccagcgcaccgtcgccggcgtgggtggactatctgcgcgaacaggccgcccgggtgcccggcgtgcaacaggcggtggatcgcatcgccgccccggcgggctccgaagacgccaccctgatgatggcccgggtccaggcgcgcggcggcctcgcctcgtacatgattttcggcactgaactcagcgccggtcaccacaacgaaaagtttgacttcgacgagagcgtgatggcggtagcggtcgaaaccctggcgcgcgtcgcgcttaactttccctggcagcggggggtgtaa

SEQ ID NO: 270282 - DNA, 927 bp, Klebsiella pneumoniae; identical to SEQ ID NO: 229913

SEQ ID NO: 270283 - DNA, 564 bp, Klebsiella pneumoniae; identical to SEQ ID NO: 211610

SEQ ID NO: 270284 - DNA, 687 bp, Klebsiella pneumoniae; identical to SEQ ID NO: 229911

SEQ ID NO: 270285 - DNA, 276 bp, Klebsiella pneumoniae
atggggtttaacttgctgcgcatcgggaggctgatgaggctggaggtatctgactgcgaacaacgggattgttttcaccggctgcacattatgagtctgctgtggtttctggtaaccgactgcgaacaacggggttgttttcaccggctgcaaattatgagttttctgtggcttctggtatccgactgcgaacaacggggttgtattcacctgctgcacatcatgagtctgtggtggcttcgggtatccgactgcggacaagctgaggggggttaa

SEQ ID NO: 270286 - DNA, 1053 bp, Klebsiella pneumoniae
ttgcccgccagcgttgaggatagcacctgcagcgaccccgcttacccgccagcgttgaggatgagcaccgtcagcgacccggtttgcccgccagcgttgaggataagcaccgtcagcgcccccgtttgcccgccagcgttgaggataagcaccgtcagcggtcacgtttacccgccagcgttgaggatgagcaccgtcagcggtcacgtttacacgccagcgttgaggatgagcacagtcagcggatccgtttacccgccagcgttgaggataagcaccgtcagcggtcacgtttacccgccagcgttgaggatgagcaccgtcagcggtcacgtttacacgccagcgttgaggatgagcacagtcagcggatccgtttacccgccagcgttgaggataagcaccgtcagcggtcacgtttacccgccagcgttgaggatgagcaccgtcagcggtcacgtttacacgccagcgttgaggatgagcacagtcagcggatccgtttacccgccagcgttgaggataagcaccgtcagcggtcacgtttacccgccagcgttgaggatgagcaccgtcagcggtcacgtttacacgccagcgttgaggatgagcacagtcagcggatccgtttacccgccagcgttgaggataagcaccgtcagcggtcacgtttacccgccagcgttgaggataagcaccgtcagcgcccccgtttgcccgccagcgttgaggataagcaccgtcagcggtcacgtttacccgccagcgttgaggatgagcaccgtcagcggtcacgtttacacgccagcgttgaggatgagcacagtcagcggatccgtttacccgccagcgttgaggataagcaccgtcagcggtcacgtttacccgccagcgttgaggataagcaccgtcagcgcccccgtttgcccgccagcgttgagaataagcaacggtagcggatccgtttacccgccagcgttgagaatgattcccctccaccgaccccgtttacccgccagctttgacactaccagcgactacagtcgacattaa

SEQ ID NO: 270287 - DNA, 423 bp, Klebsiella pneumoniae; identical to SEQ ID NO: 113698

SEQ ID NO: 270288 - DNA, 351 bp, Klebsiella pneumoniae; identical to SEQ ID NO: 10325

SEQ ID NO: 270289 - DNA, 189 bp, Klebsiella pneumoniae
atgatcttcttactcaaaaactggtcattcatttggatagccattctgcttttggcggttggtggctggatctcaaacatcgttaagctggcactacacggtgacttatttcttcactcaggtatgacgatcgctcgtgttgtggggatttttgtcccaccgatcggctctgttctcgggttctgttaa

SEQ ID NO: 270290 - DNA, 732 bp, Klebsiella pneumoniae
atgcccgcagcattggttaaacacctattgcggtcagataaattctctctttttaaaaacattgcaactaatgtaggaggctttgaggaagaaatttcgaagcaaatcaaaaatggtatcaacgcggcgcaaaatgaagcagaacagttaaaagaaaaaattgagactctcgttaacaatgccgattcgtccataaaatctctccaagaatatgatgaaaaactccaacagtacaaaagtgagtacaactttgttctgttgagtaaggcgttttcaaatctgttgaggacaaaaaaatcagagtgtgattcaaaccacactcgcataataacattttcactcttattaattggcacacctttactagctttgcttaaccacatttttaaatggtattcagttgatttaaatctgaatgcattatcttattacctgcctattctttcactggaattattattcttttattttatgcgcctttattatattgaagaaaaagctattaaggcacaaatacttcaaatagaacagaggctcagtctatgtgagtttatacatgattacgtggagaccaaaaatagctctggagctgaaaaggaatcttggtcgctgtttgagaagttaattttcagcccaatacaggttacttctgaaaacataccgtctatactggatggtgcatcatctattgccgagttagccggaaaagtattgtccaaagattcaaaataa

SEQ ID NO: 270291 - DNA, 915 bp, Klebsiella pneumoniae
atgaccaccagcagcgaccacgcttacccgtcagcgttgaggatggtcactggtatcgcccctgtttacccgccagcgttgacggtgaccaccgacagcggccacgcttacccgccagcgttgaggatgactaccggcagcggtcccgtttacccgccagcgttgaggatgactaccggcagcggtcccgtttacccgccagcgttgaggatgactaccggcagcggtcccgtttacccgccagcgttgaggatgactaccggcagcggtcccgtttacccgccagcgttgaggatagccaccgtcagcggccacgtttacccgccagcgttgaggatagccaccttcagcggccacgtttacccgccagcattgaggatgagcaccggcagcggcccctcttacccgccagcgttgaggatagccaccgtcagcggccccgtttgcccgccagcgttgaggataagcaccgcggcggttccgtttatccgtcagcggtcacgtttgcccgccagcgttgaggatgagcaccgtcagcagccccgcttacccgccaacgttgaggataagcaccgtcagcgcccccgtttgcccgccagcgttgaggatgagcaccggcagcggccacgtttacccgccagcgttgaggatagccaccgtcagcggccacgcttacccgccagcgttgaggatagctaccgtcagcggccacgcttacccgccagcgttgaggatagccaccgtcagcggccacgcttacccgccagcgttgaggatagccaccgtcagcggccacgcttacccgccagcgttgaggatagctaccgtcagcggtcacgtttacccgccagcgttgaggatgagcaccggcagcggccctgtttgcccgccagcgttgaggatgagcaccggtag

SEQ ID NO: 270292 - DNA, 618 bp, Klebsiella pneumoniae
atgcgattcaccaaaaaaaatattagttcgattcaatggaggttccttcagttttctgatgaagcgcggaggtggctcaacctgcgaaaagaaacgagttgctatggacttgcaccggttgtgttccggtctatctctcattttaagcggcttttttctcaaatgccaccggcgatttccagccgagtgttgaatgtcttcggcgtggattataaaagccatttaccagaagaatacgcggcttatctggcagcaaatcagcccgtaatgacgtgcgtatatggcaatacggcgacgggtaaaactaatttcaaagatagccttttaaggtgcatctcggatgatatggccgaaaactttttagttgaagatgaagataatggtcggatcagtgaagatactagattgcatctatttaagtctttttttgacgagggcaggaacgttgtctttgtagaacatgcccataactgtagctgtatgatcactcgattcgtgaatgcaatggctagcagcaaagttaactttatctttatcggcgaagtaggaccggcccggaaagcaaaaatgatcacggcggtaggtaagggcgggtatacatgggagacttccgtataa

SEQ ID NO: 270293 - DNA, 1467 bp, Klebsiella pneumoniae
gtgccgttgctggcattgctcgaggagacggctgatgatcgggtgacccgttttgtgtggctgcgccagttcgagcctggctcgaactcttcgtcggccaaccggctgctcgaccggctcgaatatctgcaacgcatcgatctccccgaggatctgcttgccggcgttcctgcccatcgggtgactcgtctgcgcaggcagggtgaacggtattatgccgacggcatgcgcgatctcccggaggacaggcggcttgcgatcttggctgtttgcgtctcggaatggcaggcgatgttggccgacgcagtggtcgaaacccacgaccggatcgtcggccgtctctaccgtgcttcggagcgtatttgccatgcaaaggtcgcagacgaagcgggggtggtgcgtgacaccctgaaatccttcgccgagatcgggggcgccctggtcgatgcacaggatgatggccagccgctgggcgatgtcatcgcgagtgggtcagggtgggacggcttaaaaacccttgttgcaatggcaaccaggctgaccgccaccatggccgacgatccgctcaatcatgtgctcgacggttatcaccgcttccgccgatacgctccacgcatgttgcgcctgctcgatctgcgagctgcgcccgttgcactgccgcttctggaagcggtgacggcccttcgtaccggtttgaacgatgccgcgatgaccagcttcttgcggcccagctcgaaatggcatcgccaccttcgggcccagagggctggcgacgctcgcctatgggagatcgcggtgctgttccatctgcgcgatgcgttccgctccggagatgtctggcttactaggtcccggcgctatggcgatctgaaacacgcactcgttccggcacaatccatcgcggaaggcggtcgtctcgctgtgccattgcggccggaggaatggctggcagaccggcaagctcgcctcgacatgcggttgcgcgagcttggccgtgccgctcgcgcaggcacgatcccgggcgggtcgattgaaaacggcgttctgcatatcgagaaactcgaagccgccgcgccgacaggcgccgaagatctggtgctcgatctctacaagcagatcccgcccacgcgcatcaccgatctcctgctggaggtggatgcggcgaccggcttcaccgaagcgttcacccatctgcgcacaggagcaccctgcgctgaccggatcgggctaatgaacgttatcttggcggaagggatcaacctcggcttgcgcaaaatggcggatgcgacaaacacccacaccttctgggaattgatccgcattggacggtggcatgtcgagggcgaagcctatgaccgggcgctggccatggtggtcgaggcacaggcagcgttacccatggcccggttctggggcatgggcacgtcggcttcgagcgacggacagttcttcgtcgctacagagtaa

SEQ ID NO: 270294 - DNA, 894 bp, Klebsiella pneumoniae
atgagaaaattaatcgtagttgcttccgttgcagccggtttactgaccgggtgcgaccagaagagtactggcaagcgtgaaaccttgtctgaagcgcttgttgctaagtcgctttctaacatggttcccgttaagggcggcgagttcttaatgggggattttggcccattagtcggtcaaaaactacctttcagcataaaccaggatgataaggtattacataaggttgtattaagtgatttttcgatatcaaagtttaaagttaccaacgatgattataataaatatctgcagataacaggaataaaaaaacctcccattaatattctggtaaaagagtacccatccttgcaaaaagatgattactctgttggtgtgacctggcaacaggcaaaagattattgtcagtggctaggtaaggagtccgataaaaatattgatttaccgacagaagcacaatgggaatatgcggcaaggtcaagagggcagtatcttcctttttcgactaataatggaaatttcgagcttggttctaatatacctgaacaaaagaaattagatgaatacacagatggttatggttttcctatttatccaattgggaaatatcctccgaatccgctaggtttatacgatatggggctaagtggagccgaatggagtaatgattggtattcaactgattattattcccactcccctgtttatgatcctcaaggtccagttaagggtaatgaaaaagttttaagggggtatgttggcggagatcgtcagtatgccttgactatattcaggcaatcgtcacaacctgtgccaaaatttgctgggcgtgatgattatcaaaagtttggagttagtcctctttttgtatttcgttgcgttattaataaataa

SEQ ID NO: 270295 - DNA, 894 bp, Klebsiella pneumoniae
atgagaaaattaatcgtagttgcttcagttgccgccggtttactgctcgggtgcgaccagaagagtactggcaagcgtgaaaccttgtctgaagcgcttgttgctaagtcgctttctaacatggttcccgttcagggcggcgagttcttaatgggggatttcggcccattagtcggtgaaaaactgcctttcagcataaaccaggatgataaggtattacataaggttgtattaagtgatttttcgatatcaaagtttaaagttaccaacgatgattataataaatatctgcagataacaggaataaaaaaacctcccattaatattctggtaaaagagtacccatccttgcaaaaaggtgattactctgttggtgtgacctggcaacaggcaaaagactattgtcagtggttaggtaaggagtctggtaaaaaatttgatttaccaacagaggcgcaatgggaatatgcagcaagatccagagggcaatacattccgtttgcaacgaataatggtgagttcctgcccggtaaaaacatccccagccaggatgagctgagtgaatatactgatggagcaggtattcctatttatccagtggggaaatatcccccaaaccccctgggtctgtatgatatgggacttagtggctcagaatggaccaatgactggtatgcgtcagattattactctcattctccggtaaacgatcctcagggacccgtaaaggggaccgaaaaagtcctccgcgggaatgttggcggtgacagacaatacgctttaaccgtgttcagacaatcagatttgccagttccaaagatcaataaagacgatgattatgaaaaatatggtgttggtccgcagtatgttttccgttgcgtcatcaataaataa

SEQ ID NO: 270296 - DNA, 840 bp, Klebsiella pneumoniae
atgcaacaactcgatgaacgactgaaagggcaatacgcctcgctgtcgccgcaggagcagcgggtggcggatttcatctttgaccactttgacgacctgataagctacaacagcgccgagctggcgcagctgagcggcgtgtcgaaagccaccgtcagccggctgttcaagcgcctcggttacgacaaatataaggatatgcgcgatgaactgcgcactctgcgtcagagcgggatgccgctcaccgaccagcgcgacgcggtgcagggtaacacgctgctggcgcgccattataagcaggagatggcaaacctcacccagtgggtcaacgccctcgacgcccgccagttcgctgaggcgctgacggcgatggtggccgcccgccgcattgtggtgattggcatgcgcaacgcctatccggcggcgctgcatctacgccagcagctgctgcaggcccgcggccaggtgctggtgctgccccagccgggtcagagtctcagcgaagagctggtcgatctgaccgccgatgatctggtggtaatgatggcgtttcgccgccggccgcgaatagtacgcccgctgctgcagcagctgcagcgcgacggggtgccggtcctgttaatgtgcgagccgcaggcccacagcctgtttccgctctcccgctggcagctctgcgcgccgctggacagcgtctccgcctacgatagctatgcctcggtcaacagcctgattaatctgctggctaatgcctttctccatgaaacgctcgacagcggtcgtccgcgcatccacgatatcgccacgctttaccagcagctggacgagctggaacaacgctga

SEQ ID NO: 270297 - DNA, 318 bp, Klebsiella pneumoniae; identical to SEQ ID NO: 183293

SEQ ID NO: 270298 - DNA, 270 bp, Klebsiella pneumoniae
atgcgtcaagtgtttgagcaggcgctggcacttcatttgccagccatgcacaccttttcggacgcctatcgggggcatttcaagcaggtactgttgcaggatggcaccagtttcgctgttcatgacggcctcagcctgcatttccccgggcgattcagtacacactctcctgcggcagtggagcttcacgtgacctatgaccttgaaaaagcccagcctgtccgcgtttctctgagcgaagatactgcatctgaacgcgactatctgtaa

SEQ ID NO: 270299 - DNA, 498 bp, Klebsiella pneumoniae; identical to SEQ ID NO: 151822

SEQ ID NO: 270300 - DNA, 288 bp, Klebsiella pneumoniae; identical to SEQ ID NO: 151823

SEQ ID NO: 270301 - DNA, 300 bp, Klebsiella pneumoniae
atgcttgaactgtcctattgcactaagaatttggctgcgttcggatttttcagttcattgttccaaaaggctgaatacaaaggcgctgtcatacgtatgagatcttactatctataccagcttatggaaattagtgaggcaaccttctacaactggcgcagtaagtacgcaggtctggaagtgaacgaagccaagcgactgaaagagcttgaggtagagaacaacaagcttaagaagatgctggccgacaaaatgctcgaagtcgaagcgatgaaggatgtgttgtcaaaaaagtggtga

SEQ ID NO: 270302 - DNA, 816 bp, Klebsiella pneumoniae
gtgacgccagcggcaaggaaacctgttgctcagcatttgatagaagctttccgcctgagtgaacgggtggcttgcaagttggcgggattgagtagaacagcattgcggtataagccaaaaacgaatgcagatcacagcatacggcagcggctgaaagcattggcaacccaatatccgcgctatggctatctgatgttgcatggtctgcttcggggcgaaggctgggtcaaaaaccgtaaacatacctatcgcctttataccgaagaaggtttgcaggtgcgtacgaagaaacgcaaaaagctgacacgaccacggcagccgatggaagtgcctacagcggtgaatcagcgttggtctatggactttgtatcggaccaactgagcaatggcaggcgctttcgggttctaaatgtggtggatgattattcgcgtgaaatgcttgggcaattggtttcggtttccatcagtggcagacaagtcgccagattcttgagtttgctgattgagcaacgcggcaaaccaaacaaggtaatctgtgacaacggaactgaatttaccagcaaagcgatgttcttctggagcaaagaaaccggtgttactctgggttttattcagccaggtaaaccaacacaaaacgcatttgtagaaagtttgaatggcaagttcagaaacgaatgcttgaaccaacactggtttagaacgatggacgaggccagatacgaaatagatttatggcgcgagcattacaatcatattcgcccgcacagttcgttgaattacatgtcgcctgttgagtatgcaaagcaggcagcataa

SEQ ID NO: 270303 - DNA, 1554 bp, Klebsiella pneumoniae; identical to SEQ ID NO: 151826

SEQ ID NO: 270304 - DNA, 747 bp, Klebsiella pneumoniae; identical to SEQ ID NO: 151827

SEQ ID NO: 270305 - DNA, 333 bp, Klebsiella pneumoniae; identical to SEQ ID NO: 151828

SEQ ID NO: 270306 - DNA, 291 bp, Klebsiella pneumoniae
atgtgtgacagaactgtttttttgaatttccagtctcaagatacgacaccttttataactgaggtggaaatgcttattggaggagttccacgactcatgtatcccgatggaacagagcagtttgctgatgatgaaaccgattcactcctaatttattctcctcgactgaccgaacttgaacttgaagccttttgcgaagcgaacattgagcattatcggacttttcacgaggccaatttaaagcaactactcagggggagaccgcgtaccattaaccccgttctgggctga

SEQ ID NO: 270307 - DNA, 339 bp, Klebsiella pneumoniae
atgccgtcctgcctccctggtggtcagttcctgcccggggagttcgctggtttcgccactgacgtcaacctgtacagcgggcaggttagcctgctggatagtgacattatcgctgccgccgctctgcccgacgttcgaaccgtcagcctttccgatgcggatcgttttgttttcgccggtgtatacccattgagaccacggccagcgctcattgggattgaggttctggttaaaaaagcgggtggtgccgactggattatccagttcccaggcatcgcttaccgccgttttgacggcttcggcaataatctgctttatgttcgtatcgaggtcgcctaa

SEQ ID NO: 270308 - DNA, 2205 bp, Klebsiella pneumoniae
atggtggattattatggtagtaaactaaaacgctttaagcgtccacagcaacacctatggttgctgtgttttctgactcaacgcatacggcaaagcttagagcgactgactgatggttttattcatcatatccggaaacaacaagaagctgcgcatgcgtttgcccaacaggcagtgtttgattcatggaggtcagctgcggacaatgtcaccaaagctgcagaattactccatctgtttgttgatgacagtatcgacgataatcaaccatttgcaacggttaggcaacaagcattaagtgtaatgaataaccaagatatagaaacgctatgcctgtacttaaaaaagcaaaaacgcacagtagaagaatatcaatggcaatattatgatgatcaaaacaccttacttgaacagttattaaggcccgtgtttctatgtcttgaatgccaagcaggtaaaggctcagaagtattggtgacacagctcagaaccacaaaaacagaactattagcaggtaatacattgcaaacaatggatagtacacttatccaacaaaaacatcgtccatggttactcaacaacgatgttgttcatccacagcgatacgaatggttgctttaccgtcaactggcttctcggcttaatggtcgaatttacttatcaaacgtcactaaatatcgtgcgctagaagacgacttaattgcatcgtcaatacagtctgatctattggcatcgtcaacgttggaaaagctaaagcagccgattcagaagctactgcaagtaaaacaaatacgcttagcaacatccctagaagatgttgctcgtcacattgataatggtgataaccgcaatgtgatcatgaagagccgaagtggcgcacgatggcgactgccagttaaaggctcccgatcatttgtcaacaaccccttctttaaacagatgatccccgtcagtattgctgatgtgttgcgttatgttgaacaagaaaccaactttatgcaatgcttcgcacacgtgctgccaatccaaaaacaagtaggcgccaatcaggatgatttattggctattctcattgcgaatgcgacacatcgtggcgtatatgggatggcacaaatatctgatcgcagttatgatcatctaagcactatacaagctaattatattaggcctgaaaccttgcaagaggcaagtgatatcatcaataacgcagtagcggcactccctattttccgtcactatcacatccaagaagacgtcctacacgccagtaccgatgggcaaaaatttgaaactcaccttgagacttttaaaactcgctactcctcgaaatacttcggcaccaacaaaggtattacggccatgacgttagttgccaatcatagtgcgttaaatgcccgtataataggatctaatgagcatgagtcccattatatttacgacttactacaatctaatactagtgatcttaagcctgacgtactctcaaccgacacccatggtgttaatcatgttaattatgccttattggatttatgcggttatagttttgcgcctaggtatgctcagttcaccagtgtgatcaatgacctatttaacgtaactgaaagcgacgacggaaatacgcatctggcgctgaaaaagccgataaaaatgaatgtgattgaggaaggctggcaggatattcagcgtattgtgttatcccttcaagaaaaacgcacaacacaggcattgctagtacgcaaattatctggttatccatctggacaccctatattacaagcattaacggaatataataggctcatcaaagcccaatatttacttgattatattgatgatgcaagtctgcgccaatatgttcaacgagcactgaaccgaggcgaagcctggcatttcctcaggcgagccattgcatcggtcaatcgtgaccagttccgcggaaaaaacgaatcagaaatagtcgtttggaacgagtgtgcccgtttgacggcaaatgcaattatttactttaactcgatgatcctaagtcatctactactgcactttgaagacgttggtgacgaggaaaaagctgcaataactcgacaagtatcacccgttgcatggcagaatattaatctaagcggcacttatcagttcgctagtaaccgcaaactacctgatttacaggaaataactaggcctattgttcaaaatgaagtctaa

SEQ ID NO: 270309 - DNA, 363 bp, Klebsiella pneumoniae
ttgacgctctatatcgggatgagccgcgataccggcagagccataacggaaactgaccacctgcgccagtcagtgcgtgacattctgctgaccccgcaagggagccggcttgcgcgccgggagtatggttccctgctttcagcgctcattgaccagccgcaaaatccggcgctgcgcctgcagatcatggctgcagtatatgtggcgctgcggcgctgggagccgcggctgcagctggacaccatcacggttaacagcagcagcatggatggcgcaatggttattgagctggcaggccagcgtaatgacggcgtgccagtgtccctttccgtatcgacaggagcagacaatggccgttattga

SEQ ID NO: 270310 - DNA, 693 bp, Klebsiella pneumoniae
atggccgatgcaggttatttttcaaaagcttacattgaatcgctccaaaacgaagcggccagctttgtgcttcggatgcccgcttcggtgaatccaatggcgacttgcaaccaaacaggactctgtcagccgctacgcagctggctggccgtattgcctaagcatggcgaattggatttggatgtgcagtggccagatggtccggtgtaccgttgtgttttgtttgcttccactgaccataaagacaaaccggtttgtctgtgtacaaatttggaccggcacacattcccagccgcaacagtgggcgaatggtatcgtctgcgctggcagatagaactcttgttcaaagaatggaaatcgttgaatagtttgaataaatttaatacggaatactcaacgatagccgaaacgttgatttggggaagtctgctggcggcaacgctcaagcgttggttaatcaacggagcacagcaaaaatatcggcgagtgttgtccatgttcagcggggccaaaacagccaatcagtggtggcttcccttttgtataaaatgggcttgttcagggataactgaaattgctgcggaattgggtaaggtttttgcgtttctcgcggaacattgccagagggtaaatgtaaagcgagatcaaaaatcaggggcttttaaagtgttggaaatcacatatgaatcatga

SEQ ID NO: 270311 - DNA, 165 bp, Klebsiella pneumoniae; identical to SEQ ID NO: 151820

SEQ ID NO: 270312 - DNA, 327 bp, Klebsiella pneumoniae; identical to SEQ ID NO: 151819

SEQ ID NO: 270313 - DNA, 636 bp, Klebsiella pneumoniae; identical to SEQ ID NO: 151818

SEQ ID NO: 270314 - DNA, 1236 bp, Klebsiella pneumoniae; identical to SEQ ID NO: 151817

SEQ ID NO: 270315 - DNA, 786 bp, Klebsiella pneumoniae
atgcgtgtattagccttatcggctgtgtttttggtggcatcgattatcggaatgcctgcggtagcaaaggaatggcaagaaaacaaaagttggaatgctcactttactgaacataaatcacagggcgtagttgtgctctggaatgagaataagcagcaaggatttaccaataatcttaaacgggcgaaccaagcatttttacccgcatctacctttaaaattcccaatagcttgatcgccctcgatttgggcgtggttaaggatgaacaccaagtctttaagtgggatggacagacgcgcgatatcgccacttggaatcgcgatcataatctaatcaccgcgatgaaatattcagttgtgcctgtttatcaagaatttgcccgccaaattggcgaggcacgtatgagcaagatgctacatgctttcgattatggtaatgaggacatttcgggcaatgtagacagtttctggctcgacggtggtattcgaatttcggccacggagcaaatcagctttttaagaaagctgtatcacaataagttacacgtatcggagcgcagccagcgtattgtcaaacaagccatgctgaccgaagccaatggcgactatattattcgggctaaaactggatacgatactaagattggctggtgggtcggttgggttgaacttgatgataatgtgtggttttttgcgatgaatatggatatgcccacatcggatggtttagggctgcgccaagccatcacaaaagaagtgctcaaacaggaaaaaattattccctag

SEQ ID NO: 270316 - DNA, 228 bp, Klebsiella pneumoniae
atgcaccgcaagccgttgatggccgttgtaccgtcaatggcacaaccgcagacagaaaaaagccccttaacggggcagactgataccgggatttatcaggcaacgcggctccagcacatcagcagtgtgtgggcctcaaccacgctgattgatttcccttcaccgaggttttcggttttgccggtggtcgtgtgtctgtgggacggcaagtccacaatatggctatga

SEQ ID NO: 270317 - DNA, 546 bp, Klebsiella pneumoniae; identical to SEQ ID NO: 267955

SEQ ID NO: 270318 - DNA, 495 bp, Klebsiella pneumoniae
atgggtaatacatttctttaccggatgcctgcgggcatcgccggggcaatttctcgtccgcaggatctgacggttgaacctcaactgctggactcctccaaccttttccccgcttacggccttggcggcaagatttcctccgggaaatttgtgccaatcgctgcgagcgatacagcgtcggtgctggtgggcatttacgttcgtccgtatccgaccgccagccagccggataaagtccagcaggtaggcagcggtaaaaacttcaccggcgattgcctggtacgtggttacgtcacggtaaacatcggcgtggatgcatccagcgttgcgctgcatggcccggtctacatgcgagtggccacaccatccgcctcaagccctctcggcgcgttccttgccgccgctgatggctcgaataccgtccagatcactaacgcttacttcaatggccctggcgacaccagcggcaacattgagctggccttcaatatttaa

SEQ ID NO: 270319 - DNA, 126 bp, Klebsiella pneumoniae
atgctgtacatcatgagtctgcagtggcttctggtatccgattgcgaacaacggggttgtattcaacagctgcacataatgagtctgctgtggcttctggtatccgactgcgaacatggggtttaa

SEQ ID NO: 270320 - DNA, 342 bp, Klebsiella pneumoniae
atgagcgattcatcaatgatcgacatgatggttgacagcatgctgaacgtagagcgtaaagacatgctgataaatacatgtcgtaacctgttcattgaaaaggatttttcaagcatgcaaaaatctgttcagaaggaattaaaagccatcttcgaagatgacagcatgcctgttcccatatcaccacgattcacattaggaatgagcgccctacttctggcaaaagaattaaacgatgacgttttgaaaatgttggcaaatgaaatcatgctcatatccgataaaggaacgttgcagcgagcattcgaaatggtcaggaaaaggctgcaagacgcaagctga

SEQ ID NO: 270321 - DNA, 1116 bp, Klebsiella pneumoniae
gtgttctacgattggttgagtattgaacaggattttggctaccaattacccatcctttcagatgtggcttatcagcgcattcatcttgatagcggtgaagccagtgccttatctcaaccaaccttccagcaccgtggctctttctgtgatgttgtctcgatctcgatccgtggttcagtgttaaaaatgactggaaacccttctcgctggggacgtcttgataatctctttggccttccaactgtagatacttgtgtcatggtatttaatcagatccttactgaactgaaattacccttatttactaaatgtacaaaattgatgcccggacaatcaaaagaaaatgaaaaggctcatttgattactgatggtgcattgattaaagagttgcatataacatctaataaatcagtagggaagggtaatgaggatgattatatttctggcctttctacacaaccttacagaaatagtgttcctcgactacactccaatggtaagtcagttgactggctttcaaaaaaaggtaatgtcaatcttatatacccaacagtatataacaaagctcatgagattgagttgcatagccttgcgaaaattaaaaataaattctctgaggattcaaaagaatttaattacataatagatattattaattactgcaaggataatggtattgtaaggtttgagcagaaattaaagtctcgttttcttcaaaaacaatccctgtgctattgggggctttctgattattctttgttaaataagttacattctgagtttcttgatcttgatgaaaagttatcggtgaatgctatggactttgaaactattagtgaacatctcattagtcgtggtgtcgttgatacaattcgagctgccaatacaacagccatgtatgcaattcaatggtttcacggtcattcttttgatttaaataaaaggcaagtaaaacagcatcgagcaagattaagaatgatagggattgatatagctcaaaaatgtaatgtctccaaattctctcctgttgttgtgaaacaaacaagagaaattaaagtgactgactgcgttattccatcatggtatttaaaaccatcacatctgcgtgtggcttaa

SEQ ID NO: 270322 - DNA, 228 bp, Klebsiella pneumoniae
atgaaaaaatctgttatttctaaaattgttgcaggttcaactctggtaattggttcttcagcttttgctgctgaaggtgatgctacctctcaggcgaaagctgcttttgattctctcacagcacaggctacagaaatgtccggttatgcctgggcattggttgtattagtcgttggtgcaaccgtggggatcaaactctttaagaaatttgtcaaccgcgcatcttaa

SEQ ID NO: 270323 - DNA, 195 bp, Klebsiella pneumoniae
atgcaactggtgttgttgtttgtacgggtgacgaaaatcaatgttatggcacatggaagcctattggcgcagctattcctgaaggtggcggctcaggaggtaatgaagaaggaggaggctcaggtggcggtgatggtgatggtggtaacactggaacagatccaaaacccggatatacctatgttaatcctctag

SEQ ID NO: 270324 - DNA, 267 bp, Klebsiella pneumoniae
atggtaagtttcgagattgtgctttccattcaggattcaacgaagatccttttgtttgtgattatcaaggccagccatccgaaattcctcaacctccagttaatggcggcggttcaggttctggcggtggcggctccgatggtggttccggtgggggctccgatggtggaaacacaggaggcggtgacggaggcggttctggcggaggctcaggaaccggagatttcgattatgaccgtatggctaaggccaacaaggacgctatga

SEQ ID NO: 270325 - DNA, 342 bp, Klebsiella pneumoniae
atgccagcgtttttaggattgcctttgcttgcacgctttattgggtggcttgcgggggccttaatcggttattttgcaaggttccttactttaggtattgcacgtatcgcacttgcaataacactttttctggccttaatcgtggggctcaatcaattactggtctcttatttgtctgatttggtagcagcattgccagcagagatatcagatgcaatagcttatatcattccttcgaatgcgttgccttgcctttatgcgattttttcattgaaggctgcgatttttatatttgatgtaaaagaccgtattattggttatcttgactggaataaatcgtaa

SEQ ID NO: 270326 - DNA, 1065 bp, Klebsiella pneumoniae
atggctgtttatgtcgtgacaggtaaactaggtgcaggtaaaacacttgttgctgttgggaaaatacaggataagattgtttctggctgtaaggtagcaacgaatcttgacttacgcatacataagttacctcgcgtcggtatttttgccaaaacgcctaatgtagttcgtatacccgacaaaccttcactggatgatttattagccatagggaagggtaatgatagttatgatgaaaataaaaacggcttacttgtacttgatgaatgcggaacatggtttaattcccgctcatgggctgataaagaacgtcaggcagttatcaactggtttttacatgcccgtaaactcggatgggatattatttttctcattcaggacttatcaatcatggataaacaagcccgtgttgctctggcggaacatgttgtctattgtcgtcgtctggataaaatcacaattccgtttataggtacaatttatagtcttataacggggagtaaactgcctttgccaaaagtgcatgttggcatcgttaaatatggtgattcgcctcagtcaatgacagtagaacgctggacatataccgggcgtgacctctatcaggcttatgatactaaacaggcattttcagatagttacgagcactcttcgttttcatatttaccgccttttttatcacatggacgctacgccaccaaaagagactcaaggttttatatgacacttactaaggtttatttcagaaagtattcgagggttttgtgtttcatttttggcgtgtttctcgcgtttttatattcatttatcacccgcaatgatacccctgtaattatcgaaaaacaggcatcccaacagattaatactcaaaagtataatatttcagaattcaaaatcacctcatcgtatcgacttttgaatacagtcagttttgaatttatggattcaaaaaagaataaatatacatctgaggatttaaagaaagacggttatgaaatggttttcatcgatttgtgtaatgtggattttgttaaaggtggtaaacatgaaaaagttacttgctag

SEQ ID NO: 270327 - DNA, 1287 bp, Klebsiella pneumoniae
atgaaaaagttacttgctagtattttattgattttgacattttcagttcatgcaattcctgtagagcttaacaatgtaccgcttcgggagtttgtgtcatggtattctaaggtttctggtcaaccagttattgtgtctcctgatgtaaaaggggaagtgactgtttattctgctgatgttaaaagagaggaattgccacagttctttgtttctgtacttcgtgcaaatggttacgatttaagtaatggtaatccgggtgttgttcagaagtacagttcacgcaattatgaatatgccgattcattctcggatgatgttgattatgttccgcaggattcttcatctgctcctgctggcgatttcttcaatccagcaaaaactcaggcaagcctgattacacaaacttaccctgttaataatgtaagagctaaagaccttgccccggtaattgatgtattcctcaaaggggataacattgcaggtacaaaagtatttccctttgatggagccaatatacttgcagttactgcgtctgcttcacaacataagcaattgaaagaattttttccttcggttgatgtacccagaattcaggttcttgttgagtcggttattttcgaaacatctgcttctgacggttttgatttctcatttgctgtcggagatccatcaggccatccagtagcagggggcgtgaatactgacaggcttggtaaggtgctttcgtcttcaggtggttcatttggtatttttaatggaaatgttctggcattgagtcttaaagcgcttgagacttcgaataaatcgacattactttctatgcctcgcatacttacaatgtcaggccagcctggaacatttaccgcaggtcagaacgtgccttttgtgaccggacgaatcaccggagaagctgcaagcgtcaataatccgttccagacaatagaacgacgtgacgtaggaatttctttgcaggtagttcctgttgtgacacctgcgggattactcataatggatgtcaaaactaacgcagacagtatttctgattctcaggcagcctcagacattattacgaatacacgttcgatttcgacgaccgttcagcttaaatctggtcagactgtgcttcttggcgggatggttgataacagggacagtgaagctgattcgtcagtaccgtgggtttcaaaaattccgctgataggcgcgctctttacctccaaaagcaccaacgccagcaaacgaacgctgtacatgctcattcgtgcccgtgtcgttaatccactttga

SEQ ID NO: 270328 - DNA, 342 bp, Klebsiella pneumoniae; identical to SEQ ID NO: 270320

SEQ ID NO: 270329 - DNA, 1116 bp, Klebsiella pneumoniae; identical to SEQ ID NO: 270321

SEQ ID NO: 270330 - DNA, 228 bp, Klebsiella pneumoniae; identical to SEQ ID NO: 270322

SEQ ID NO: 270331 - DNA, 195 bp, Klebsiella pneumoniae; identical to SEQ ID NO: 270323

SEQ ID NO: 270332 - DNA, 267 bp, Klebsiella pneumoniae; identical to SEQ ID NO: 270324

SEQ ID NO: 270333 - DNA, 342 bp, Klebsiella pneumoniae; identical to SEQ ID NO: 270325

SEQ ID NO: 270334 - DNA, 1065 bp, Klebsiella pneumoniae; identical to SEQ ID NO: 270326

SEQ ID NO: 270335 - DNA, 1287 bp, Klebsiella pneumoniae; identical to SEQ ID NO: 270327

SEQ ID NO: 270336 - DNA, 408 bp, Klebsiella pneumoniae
atgggaaaaacaaaagataattactttaaatcacattacgacatttttaaaatcaacactatcaacggcaaaaggttttcaatctctgcaaaatccatctacagttacctaaaaagttttagtgatgctggtctcaaggtatttcccagtcataatgaaattgctgatacctttggtattacccgaaatgcagcgataaaacagatagaaaaactgattgaactaggtttgatcgaacgtgagacacggcccggtaattgcaatgagtaccacgtcctccccattcagatagagaatacatctggaaggacatattcggaaaacaagggaaccagacacgaggtcaaaggcgattttgaaagtaagtctgaaacggcattaattgatgatgatgatttaccatggtag

SEQ ID NO: 270337 - DNA, 123 bp, Klebsiella pneumoniae
atgatgtccctctgggatgcgctccggatgaatatgatgatctcatatcaggaacttgttcgcaccttccctagatatcaacctgagctacagagtgtcgttaacgtccattactcgctgtga

SEQ ID NO: 270338 - DNA, 2382 bp, Klebsiella pneumoniae
atgtccaaaactagagataatcattatgtacctcaatggcatcaaaaagggtttatggaggaacgggaacaacaactctgtcacttaacgcgacgtgaaatcaacattcccggaggcgagacaaagttggtcgagtcaaaaaaatggcagactccaacccagcggttttatgaggttgatttatactcaactttttttggctctgaaataaatgatgacatagaacgacaattattcggccctatagataacaatggttcaacagctattcgagcttttctcggagatgatcaagctaagtggcataatagttttcgtgatttgtttacgtacattgactctcagaaattacgaacgcctaaaggtttggattggattaaaagcaaatactctgagctaaatcaaagtcaactcatgatggaaatgcaatcacttagaacaatgcattgtacattatgggccgagggagtacgggagttagtttcagcatcagaatctgaaaccaaattcattctttcagaccatccagtaactgtttacaactatgcttgccctcccgattctgaactttgtgtttatcctaatgatccagacattacgcttaaaggctcacagacaatatttcctttagacaaaaatcgctgtttgattctgacaaatcttgagtatgcacaagatccaaaaaatataaacccaattcagcaacgaactaatgccactcgacaaagacatagtatggttaacaccattaatttcattaacagccgaaaacttactgatgatgaagtaaaaaaaataaactacatcataaaaagcagatctaacaaatccattgccgcaggtcgagaagattggctttatcctgaaaaagacattaagaatgattgggctgaattacgccatgtgcttttaccatcattgaatggggtattgggttttggaggagaaatgtatgttaagtttgaggatggctcagtacattatcaagatgcgtttggtagaacatctagtgcacacgaatttctccagaaaaagacaagtaaagagcgaataggtcgtaactctatttgtgggtgtggcagtggtagaaaatacaaatattgctgccttaatcttgctgaaaatttgcgtacatcatgggatgtattaagcataagagaaagaaacctcgcattttgcaattgtattaaagatgtattgggtttaaataaaggtaaaacgtggctagatgtcagaaaagaactcacagaggaacatataacaaagatttatgaattctatgcaatcctatggcctattgatacagacatatataatctattaccaaaatctgatggaaaattacgagctttgtattcagggcctgtagatatccgtaccatagttgaaaatgcaataccaatggcttcattatttgatgagtttttgattgaatcccctatatgtaaccctaatgttaccaatcctgattttagccccataaatcacccatcacaatataaatatcagtcactcaaggattttttattcttccttcacatggagccatttattggacttggcttgataaatatcattcctgaaccagccgaatttgatattgaacttatgcgagcaatgttagacatggctagggatagaagccaaagaaaagagcatatacacgagcaagatctgcagcgacatttcatattagccactgaggatttactaaactcaacggtactaatgcctaggtctataagagttgatttccttatgagccagttcgatttggctgaagagttagcaactgatattatttctatgtcagagtcgaaagcagattcatcacctctaatgctattacaaaagccaccaacaggtagtagtgggcaattaatgatgtcacgtaacggacctaattatgaaatggctttatttatagcccaggcaactggatcagtgattgtaactgatagcatttcgagatggaatcagctatattctgcacagcaccgcaatcaaggtatatctgcttacccatggagtaaaacacttgatactttcaattctgtgcctctagacattcagtttgaccgcacatttttaaaatcccaaggtctattctccaagaccagaaacctgcttaaatgcattgaccaaacaatattgagaaataatcgttcaccatcacatctacagaacctcgctgctcacataaatgaccttatgaaacagctaaatgtagagagtgagtccttggttcttaaaaatatgatgatttccgcaccggagggtggttttcatgatagaaatgttcagcgattattggcacgttcaagttgtttaaaatacgatgacaatgtcaggtcaattttgggccttgatattacaacttag

SEQ ID NO: 270339 - DNA, 333 bp, Klebsiella pneumoniae
atgagccgtacatttgcatactgccgagtttccaccagcgaacagacaaccgaaaaccaaatcatggctattcgtcaggctggctatgatgtgattgataatcgtgttgtatcagaagttgtttctggtggtgttcaggctatgcagcgtaaagcctttgccgatatggtaaatcataaactggagtctggtgatcggctggttgtgctcaaactggaccgcttagaccgtgacaatatcgacgtgcaacacactatcgcaatgttgctagacaaaggaattgacgttgtatcgttggatctgcctgcgagcaaccttgccagtgccaaatga

SEQ ID NO: 270340 - DNA, 741 bp, Klebsiella pneumoniae
atgtcacaggcttatgaagcattctattcaggtgatttgacacgataccagcagatcattaattcgatgggatcagctttacaaaatacaatcccggcagttaccccagcaccaatggagcaaaatacagcgacaactgccgagactgaaccagcacactgcccaagattgttggaagcgtggaatgactatataaaggataagggtcaaaagtggcgcaagcaaacagcaaatgagaatcagcgtttctttgatgtcctctatcatgttgtgggtgatgtccctgttgatagcgttaagaaacaggatttaagggattctctcaaggtggcagagaatctgcctactcgaactaaactaccctactccagaatgagtcttgccgagtgcattgattacgatgtccctgaggataacctgatcgccagtgagcatgtccacaaacatttaaagctatggcgttcattgttcaaaacgtatcaagtcgatcagaaagatgttcttaccaaatcccctactgatgggattagttacgaggttaaatccaaccggggtgggaactatacaaccaatgaactgagtcgaatcaaagagcatctctttgcactaccaaacagtgattatcggaaatggcacttactgcccctgatttatacaggtgctcgacgtggtgaaatagcggatatccgtaagcaccacatacagaaagatgaggagaccgggcgcaggtatatttattga

SEQ ID NO: 270341 - DNA, 147 bp, Klebsiella pneumoniae
atgaatcagatccgccctttcataccccttgtacagaatggaacgatgagcctcgaagagttcaaacacaaaattcagggttaccgcgccgccactaagcaggactttgatgaatatcttttgaattggcttaaaggtggcctttaa

SEQ ID NO: 270342 - DNA, 903 bp, Klebsiella pneumoniae
atgagcgagaaactgcaaaaagtgctggcccgcgccggccacggctcccgccgtgaaattgaagcgaaaatcgaagctggccgcgtcagcgtcgacggcaaaatcgccaccctcggcgatcgtgtggaaattgtccctggtttaaaaattcgtatcgatggtcatctgatctcggtgaaagagtctgccgagcagatctgccgcgtgctggcttactataagccggaaggcgagctgtgcacccgtaacgatccggaaggacgcccgacggtatttgatcgtctgcctaaactgcgcggcgcgcgctggattgccgttggtcgtctggacgtgaatacctgcggcctgctgctgttcaccaccgatggcgaactggccaaccgcctgatgcacccgagccgtgaagtcgagcgtgagtacgccgttcgcgttttcggccaggtggatgatgataagctgcgccagctgtcgcgcggcgtacagttagaagatggtccggcagcgtttaaaaccatcaaattcaccggcggcgaagggattaaccagtggtataacgttaccctgaccgaagggcgtaaccgcgaagtgcgtcgcctgtgggaagcggtcggcgtgcaggtcagccgtctgatccgcgtgcgctacggcgatattctgctgccgaaaggcctgccgcgcggcggctataccgagctggacctggcgcagaccaactacctgcgcgagctggtggagctcacgccggaaaccagctctaaggttgccgtcgagaaagaccgtcggcggttgaaagccaatcagatccgtcgggcggtgaagcgtcacagccagaccagcgctaatccgcgccagggtaacaacagcaaccgtcgttccagtactcgcaataagactaacggttaa

SEQ ID NO: 270343 - DNA, 591 bp, Klebsiella pneumoniae; identical to SEQ ID NO: 250125

SEQ ID NO: 270344 - DNA, 801 bp, Klebsiella pneumoniae; identical to SEQ ID NO: 134911

SEQ ID NO: 270345 - DNA, 1083 bp, Klebsiella pneumoniae
gtgcagcaacgtcagtgctttacacaaggtgaaaacgtggaattacttgctcagtacggcttatttttagccaagatcgcgacggttgtcgtcgccatcgcggtgattgccgctattatcgtcaacctcgctcagcgcaagaagcagcgcggcgagctgcgggtgaccaatcttagcgagcattataaagagatgaaggaatcgctggcggtggcgctgctggacggcccgcagcagaagcagtggcataaggcgcagaagaaaaagcaaaaacaagaggcgaaggcggccaaagcgcgggcgaagctgggtaatgccgagccggaaggcaagccgcgcgcctgggtgctggatttcaaaggcagtatggatgcccatgaggtcaatagcctgcgggaagagatcaccgcggtactggcggcggcgaaagcgcgcgatcaggtggtgattcgcctggaaagccccggcggggtggtgcacggctacggtctggccgcctctcagctgcagcgcttgcgcgacaagcagatcccgctgacggtggcggtcgacaaagtggcggccagcggcggctatatgatggcctgcgtggcgaacaaaattgtctcggcgccgtttgcgatcctcggctctattggtgtggtggcgcagatcccgaacctgcaccgcttcctgaagaataaagatatcgatatcgaactgcacaccgccgggcagtacaaacgaacgctcaccatgctgggcgaaaataccgaggaagggcggcgcaagttccgcgaggatctcaatgagacacatcatttgttcaaggatttcgtccaccggatgcgtccgggacttgatattgagcaggtggccaccggcgaacactggtacggggtgcaggcgctggaaaaaggtctggtggatgcggttgaaaccagcgatgagctgctgctggggctgatggagagccacgaggtgatcggggtgcgttatcaacagcgtaagaagatgctcgaccgctttaccggtagcgcggcggagagcgccgatcggcttctgctgcgctggtggcagcgcggtcagaaaccgctgatgtaa

SEQ ID NO: 270346 - DNA, 252 bp, Klebsiella pneumoniae
atgcaaggtacaacccaaccaattgatcgccagacgctgctcgaaaaagccaacaaacttattcgcgaacatgaggatacgttagccggtatcgaagccaccgacgtcgttcagcgcaacaatgtcctggtgtttagcggtgagttttaccttgatgagcagggactaccgacgccgaagagtacagcggtatttaacatgtttaagtatcttgctcacgaactgtcggacaagtaccacctggtcgattaa

SEQ ID NO: 270347 - DNA, 2598 bp, Klebsiella pneumoniae
atgggtaaagctctcgttatcgttgagtccccggcaaaagccaaaacgatcaataagtatctgggtaatgactacgtggtgaaatccagcgtcggtcatatccgcgatttgccgaccagtggatcagcttccaaaaagagcgccgactctaccgccaccaaaggggctaaaaagcctaaaaaggacgaacgtagtgctctggttaaccgtatgggcgtggacccatggcatgactggaatgcgcactatgaagtacttccgggtaaagaaaaggtagtttcagaactcaaacagttggcggaaaaagctgaccacatctatctcgcaaccgaccttgaccgcgaaggggaagccattgcctggcacctgcgggaagtcatcggcggcgatgaacagcgttacagccgcgtggtgttcaatgagatcaccaaaaacgctattcgtcaggcctttgaaaagccgggcgaactgaatatcgatcgggttaacgcccagcaggcgcgtcgttttatggaccgcgtggtgggctatatggtttcgccgctgctgtggaaaaaaatcgcccgtggtctttctgccgggcgcgtgcagtccgtcgcggtccgcctggtggtggagcgtgaacgtgaaattaaagcgttcgtcccggaagagtactgggaagtcgacgccagcaccaccacgccgggaggtgacgccctgccgctgcaggtgacccataaggacgataagccgttccgtccggtcagccgcgatgagaccatggcggcggtatcgctgctggaaaaagccagctacagcgtactggagcgtgaagataagccgaccagcagcaagccgggcgcgccgttcatcacctccaccctgcagcaggcggccagcacccgtctgggcttcggcgtgaaaaagaccatgatgatggctcagcgactctatgaggcagggcacatcacctatatgcgtaccgactccaccaacctgagtcaggacgcgctgaacatggttcgcggctacatcagcgacaaatttggcaaaaaatatctgccggatagcgcgaaccagtacgccagcaaagaaaactcgcaggaagcgcacgaagcgattcgtccgtctgatgtgaacgtgctggcggaaacgctgaaagatatggaagcggatgcgcagaagctttatcagctgatctggcgccagtttgtcgcctgtcagatgacgccggcgcagtacgactccaccacgctgaccgtggctgcgggtgatttcaaactgaaagcgcgcggtcgcactttacgtttcgacggctggacaaaagtcatgccggcgctgcgcaagggcgatgaagaccggacgctgccgctggtcaaacagggcgaccgcctgagcctggtggagctgacgcctgcgcagcactttaccaagccgccggcgcgtttcagcgaggcctcgctggtgaaagagctggaaaaacgcgggattggccgtccgtcgacctacgcgtcgatcatttcgaccattcaggatcgcggctacgtgcgggtggaaaatcgtcgtttttacgccgaaaaaatgggcgagatcgttaccgaccggctggaagaaaacttccgcgatctgatgaactacgattttaccgcgcagatggaggatcgcctcgaccaggttgcgaaccaccaggccgagtggaaagaggtgctgaaccacttcttcggcgattttaccacccagctggcgacggcagagaaagatccggaagagggcggcatgcagccgaacccgatggtgctcaccagcatcgactgcccgacctgcggccgtaaaatggggatccgtaccgccagcaccggcgttttcctcggctgttcgggctatgccttgccgccgaaagagcggtgcaaaaccaccatcaacctggtgccggagaacgaagtcctcaacgtgctggaaggcgatgacgcggaaaccaacgcgctgcgcgccaaacgtcgctgccagaagtgtgggacggcgatggacagctaccttatcgatcctaagcgtaagctgcacgtctgtggtaataacccgacctgcgacggctacgagattgaagagggcgaattccgcatcaagggctatgacggcccggtggtggagtgcgagaagtgcgggtctgaaatgcacctgaaaatggggcgtttcggtaagtacatggcctgtaccaacgacgagtgtaagaacacgcgtaagatcctgcgcaatggcgaagtggctccgccgaaggaagatccggtgccgctgccggagctgccgtgtgagaagtctgacgcctactttgtgctgcgcgacggggcggcgggcgtcttcctggcggccaacaccttcccgaaatcacgggaaacgcgtgcgccgctggtggaggagctgtaccgcttccgcgatcgtctgccggaaaaactgcgttatctcgccgatgcgccgcagcaggatccggaaggcaataaaacgctggtacgctttagccgtaaaaccaagcagcagtacgtggcgtctgaaaaagagggcaaagcgaccggctggtcagctttctttatcgacggtaagtggacggaagccaaaaagtaa

SEQ ID NO: 270348 - DNA, 975 bp, Klebsiella pneumoniae; identical to SEQ ID NO: 134907

SEQ ID NO: 270349 - DNA, 168 bp, Klebsiella pneumoniae; identical to SEQ ID NO: 134906

SEQ ID NO: 270350 - DNA, 2673 bp, Klebsiella pneumoniae
atgtcgtcaaccctacgagaagccagtaaggacacgctgcaggtcaacgataaaacctggcattactacagtctgccgttggcggagaagcagctgggcgagatcagtcgactgcccaagtcgctgaaggtgctgatggagaacctgctgcgctggcaggacggtgactcggtaactgaagaagatattcgcgccctggccggctggctgcaacaggcccatgccgaccgggaaatcgcctaccgtccggcacgcgtcctgatgcaggactttaccggcgtgccggcggtagtggatctggccgccatgcgcgaggcggtgaaacgccttggcggcgatacggcgaaggttaatccgctatcgccggttgacctggtgatcgaccactcggtgaccgttgaccgcttcggcgacgatgaggccttcgaagacaacgtccgcctggaaatggagcggaaccacgaacgctacgcttttctgcgctgggggcagcaggccttcagccgcttcagcgtggtgccgccgggcaccggtatttgccaccaggtgaacctggaataccttggccgggcggtttggagcgaggaggttcacggccagtggatggcgtggccggatacgctggtgggcaccgactcccataccaccatgattaatggtcttggcgtgctgggctggggtgtgggcgggattgaagcggaagccgctatgctgggccagccggtgtcaatgctgatccccgatgttgtgggctttaagctcagcggcaaactgcgcgaaggcatcaccgccactgacctggtactgacggttacccaaatgctgcgtcagcatggcgtcgtcggcaagtttgttgaattctacggtgacggcctggataccttaccccttgccgacagggcgaccatcgccaatatggcgccggagtatggcgccacctgtggctttttccctatcgatgacgtaacgctcagctatatgcgtctcagcggccgtagcgaagaacaggtcgcgctggtggaagcctacgctaaagcccagggcatgtggcgccagcctggcgatgagccggtctttaccagtaccctggcgctggatatgagcagcgtcgaagcgagcctcgccgggccgaagcgaccgcaggatcgcgtggcgctgggcgatgttccgaaagccttcgccgccagcggcgagctggaggttaaccaccttcagcgtcagcgtcagccggttgactatacgctgaacgggcatcactattcgctaccggatggcgcggtggctattgcagcgattacctcctgcaccaatacctctaaccccagcgtgttgatggccgccggtctgctggcgaaaaaagccgtcgaacgcggcctgcagccgcagccgtgggtgaaagcttccctggccccaggctcgaaagtggtgtcggattatctggcccatgccggcctgacgccttacctcgaccagctcggcttcaatctggtgggatatggttgcaccacctgtatcggtaactccggtccattgcctgaacctatcgaagaagcgatcaaaaaaggcgatctgaccgtcggggcagtgctctccggtaaccgtaacttcgaagggcgtattcatccgctggtgaaaaccaactggctggcctcgccgccgttggtggtcgcctatgcgctggcggggaacatgaatatcgacctcacccgcgagccgttgggacagggcaagaatggcgagccggtctatctgaaagatatctggccgagcggggaggagattgcccgcgcggtggaacaggtctccaccgagatgttccgcaaagagtacgcggaagtgttttccggcactgaggagtggaaggcgatcaaggtggaggcgtcagatacctacgactggcaggaggactcgacctatattcgcttgtcgccgttctttgacgagatgggcgccgagccgctgccggtagaggatattcgcggcgcgcggatcctcgccatgctgggcgactcagtcaccacggaccacatttcgccggcggggagcatcaaagccgatagtccggcaggccgctatctgcaggagcatggggttgcccggcgcgactttaactcctatggttcccgtcgcggtaaccatgaggtgatgatgcgtggcaccttcgccaatatccgcatccgtaacgaaatggtcccaggggtggaagggggcatgacccgccatctgccggatcctgaaccgatggcgatctacgatgcggcgatgctgtacaaggctgagggcacaccgctggcggtgattgccggtaaggagtatggatcaggttccagccgtgactgggcggcgaaggggccgcgcctgctggggattcgggtagtgatcgccgagtccttcgagcgtatccaccgttccaacctgatcggaatgggcattttgccgctggagttcccgcagggcgtcacccgcaaaacgctgcggttgaccggagaagagcggattgatatcagcaatctgcagtcgcttcagcctggcgctacggtgccggtgaccctgactcgcgctgacggctcgcaggaagcgatcccttgtcggtgccgtatcgacacggcgaccgaactcacctactaccgcaacgacggcatcctgcactacgttattcgtaatatgctgtga

SEQ ID NO: 270351 - DNA, 603 bp, Klebsiella pneumoniae
atgcagcttaaacgtgtggcagaagccaaactgccaaccccctggggcgatttcctgatggtgggttttgaagaactggcaaccggacaggatcatgtcgcgctggtgtatggcgatatatcagggcagtcgccggtcctcgcccgcgtacattcagagtgtttgacgggcgatgccctgtttagcctgcgctgtgattgcggctttcaactggaggcggctctgtcgcatatcgctgaagaaggtcgggggatcctgctgtatcaccgccaggaaggacgcaacattggtttattgaataagatccgcgcctacgcgctgcaggatcagggctacgacactgtcgaagcgaaccatcagcttggcttcgccgccgatgagcgcgatttcaccttgtgcgccgacatgttcaaattgctcaacgttgagcaggtgcggttattaaccaataacccgaaaaaagtggaaattcttaccgaagccgggatcaacattgtggagcgggtgccgctgatcgtcgggcgtaacccgaaaaacgctcactatctggacaccaaagccgccaagatgggccatctgctgaacagcaagccgacggaataa

SEQ ID NO: 270352 - DNA, 768 bp, Klebsiella pneumoniae
atgctgttgatagcccgacgaactgctctcgcggcggcgctgctgctggttatgcccctcacggtctggctttccgggtggctgtggcagcctggactgccggttgccatgttgaaaagcctgtggtgggtgacggaaacggtgacccagccgtggggaattatcactcatgtcgtgctttgcggctggttcctctggtgtctgcgctttcgcctgcgcgcggcgttgatcctgttccttatccttgccgccgctatcctggcgggacagggggcgaaatcctgggtcaaggcgcgggtccaggagccgagaccgttcgtcatctggctggaaaacacaaggcaggtgccggtgacgcaattctacgcgttaaagcgtaaagaacgcgctaaactggtgcatgaacagctggcgcaggcgcaggacattccgtcatttttacgcaaacactggcagaaggagacggggtttgctttcccgtcaggtcacaccatgtttgccgccagctgggcgttactcgctgcggggctgctgtggccgcgtcgccgctggggcacaatcgcggtgctgctggtgtgggcgacggcggtgatgggcagtcgcctggcgctgggcatgcactggccgctggatctcatcgtcgccacgctgatctcctggctgctggtcacggtggcctgctggctgacgcagcgcctttgtgggccgctctcgccgcccggagaagaggcgcaggatattaaaaaacggatgcctgaagcggaataa

SEQ ID NO: 270353 - DNA, 309 bp, Klebsiella pneumoniae; identical to SEQ ID NO: 211995

SEQ ID NO: 270354 - DNA, 1170 bp, Klebsiella pneumoniae
atgctggagttgttgtttctgcttttacccgttgccgccgcttacggctggtacatggggcgcagaagtgcacaacagtccaaacaggacgatgcgagccgcctgtcgcgagattacgtggcgggggttaacttcctgctcagcaaccagcaggataaagccgtcgacctgttccttgatatgctgaaagaggataccggtaccgttgaggcgcacctgacgctcggtaatttgttccgttcgcgcggcgaggtcgaccgcgcgatccgaattcaccagagcctgatggaaagcgcgtcgttaacctacgatcagcgcctgttagcggtgcagcagctgggacgggattatatggccgccggactgtatgaccgcgcggaagacatgttcaaacagctggtggacgagaccgatttccgcctcggcgcgctgcagcaactgctgcagatttaccaggcgaccagcgactggcagtcggctattgaagtggctgaacggctggtgaagctgggaaaagagaaacatcgtggcgaaatcgccaacttctggtgcgaactggccctgcagcagatggcagccaacgatctggataaagcgatggcgttgttgagaaaaggcgccgccgcggaccgcaccagcgcccgggtatcgatcatgatgggccgggtgtggatggaaaagggcgactacgccaaagcggtggagagcctcgagcgggttatcgatcaggataaagagctggtgggtgaaacgctggagatgctgcagacctgctaccagcagctcggcaaaaccgatgaatgggaagtttttctgcgccgctgcgtggaggagaacgccggggcgaccgccgaactgatgctggcgcagatcctcgagcaacgggaaggcgtcgaagcggcgcaaaactacgtcacccggcagctggaacgccacccgaccatgcgcgtcttccataagctgatggactaccatctcaacgaagcggaagaagggcgggcgaaagaaagccttggagtgctgcgaaacatggttggtgagcaggtgcgcagcaaaccacgctatcgctgccagaaatgcgggtttaccgctcatacactttactggcattgtccgtcctgccgctcgtgggcgaccattaaacctattcgcggtctcgacggccagtaa

SEQ ID NO: 270355 - DNA, 738 bp, Klebsiella pneumoniae
atgacgtctacagctatcccatcttcccgcgctgtcacatcctctcccgttgtggttgcgctcgactatgataatcgcgataaagcgctggcatttgtcgaccgcatcgacccgcgcgactgccgcctgaaggtgggcaaagagatgttcaccctgctgggcccgcagtttgtccgcgatctgcatcagcgtgggtttgaggtgttcctggaccttaagtttcacgatattcccaacaccaccgcccgcgcggtggccgcagcggctgagctgggcgtatggatggtgaatgtccatgcttccggcggcgcgcgaatgatgaccgccgcgcgcgaagcgctgctgccttttggcaaagatgcgccgctgctgatcgctgtcacggtgctcaccagcatggagtccagcgatctacaggatctgggcattaccttatctccggctgactacgcggcgaagctggcggcgctgacccaacgctgcggccttgatggggtggtgtgttcagcccaggaggcggtgcgctttaagcatgagctggggcaggcgtttaagctggtgaccccggggattcgtccgcagggcagcgacgctggcgatcagcggcgaattatgactcctgagcaggctcaggaagctggggtagactatatggtgattggtcgcccggttactcagtcggcggatccagccgcgacgctgcgggcgatcaacgattctctgcgcaagggggcataa

SEQ ID NO: 270356 - DNA, 327 bp, Klebsiella pneumoniae; identical to SEQ ID NO: 138133

SEQ ID NO: 270357 - DNA, 222 bp, Klebsiella pneumoniae
atgatgacttcaacgagcaaaaaaatggctgctgtcgttctggctgtcactgtagcaatgtctctgagcgcttgctctaacatgtctaaacgcgatcgtaacacggctatcggtgctggcgccggcgctatcggtggtgcggtgttaactgacggtagcgcgctcggtaccctgggtggcgcagcagtcggtggtattattggtcaccaggtcggcaaataa

SEQ ID NO: 270358 - DNA, 750 bp, Klebsiella pneumoniae
atgaacgcccgacaacaaagtattttgcaagtggtcatcgataaaggccgcatgagcgtcgccgatctggcgaagatgaccggtgtctctgaggttactattcgtcaggatttgaatttgctggaaaagcagagctatttgcgtcgtactcatggctatgccgtaccgctggacagcgaagatgtcgaaacccgcatgatgacccatttcgccattaagcgtgagctggccagccgggctgcggcgctagtgaataccggtgaaacggtatttatcgaaaacggcagcagcaatgccctgctggcgcgtacgctggccgagcgcggcgatatcaccatcattaccgtcagcagctatatcgcccatctgctgaaagagaccccaggagaggtgatcctgctgggcggaatttatcagaaacgcagtgagagtatggtcggtccgctaacccgtcagttcatccagcaggtgcatttcagcaaagccttcatcgggatcgacggttggcaggcggaaaccggctttaccggccgcgatatgatgcgtgcggacgtggtgaacgccgtgctggagaagcattgtgaggcaattattcttagcgacagttcaaaattcagcgcggtacatccctatccgctcggtcccgccggccgctttaatcgcgttattaccgacgatcgcttaccggacgcctgtcgcgaacaattgctccgcagcggcctgaccgtcgatatcgtgccctacatctga

SEQ ID NO: 270359 - DNA, 180 bp, Klebsiella pneumoniae; identical to SEQ ID NO: 138130

SEQ ID NO: 270360 - DNA, 1935 bp, Klebsiella pneumoniae
atgtttcaggataacccgctgctagcgcagcttaaacagcaactgcattcccagacgccgcgcgcggaaggggtcgttaagggcacggaaaagggctttggcttcctagaagtggacgctcagaagagctacttcattccgccgccgcagatgaaaaaagtgatgcatggcgaccgtatcgtcgcggtgatccattctgaaaaagaacgcgaaagcgccgagccggaatcgctggttgagcccttcctgactcgttttgtcggtaaagtccagaagaaagacgatcgcctcgctatcgttcctgaccatccgctgctgaaagacgccattccctgccgcgccgcccgcggcgttgaacacgattttaaacagggtgactgggccgtcgccgagatgcgccgtcatccattaaaaggcgaccgcgggttttacgcggagttgacccagttcatcacttttagcgacgatcacttcgtcccatggtgggtaaccctggcgcgccataatcttgagaaagaggcaccggacggcgtcgccaccgagatgctcgacgaggggctgacgcgccgcgacctaaccgccctcgacttcgtcaccattgacagcgccagcaccgaagatatggacgatgcgttgtatgccgaatccactgctgatggcaaactgctgctgacggtcgccattgccgacccgaccgcctggattgccgaaggcagcaagctggataacgccgcaaaagtgcgcgcctttaccaactatctgccgggcttcaacattccaatgctgccgcgcgagctgtcggacgacctctgctccctgcgcgctaacgaagtgcgcccggtgctggcctgccggatgaccctggcggccgatggcaccatcgaagacaatatcgagttctttgccgccaccatcgaatcgaaagccaagctggcctatgacgacgtctctgactggctggaaggccgcggcagctggcagccggacagcgaggcgatcgcgcagcaaattacgctgctgaaggacgtgtgccagcgtcgtagcgaatggcgtcagacccatgcgctggtgttcaaagaccgtccggactaccgttttgttctcggcgaaaaaggcgaagtgctggatatcgtcgcggaaccgcgtcgcattgccaaccgcattgtcgaagagtcgatgatcgccgccaacatctgtgccgcccgcgttctgcgcgacaagctcggcttcggcgtttataacgttcataccggtttcgatccggcgaacaccgagcagttggccgccctgctgaaaacccatgatgtgcacgtcgacccgacggaagtgctcaccctggaagggttctgcaagctgcgccgggaacttgacgctcagccgaccggtttcctcgacagccgcattcgccgcttccagtcgtttgcggaaatcagcaccgagccgggcccacactttggtcttgggcttgaagcctatgccacctggacctcgccgatccgtaagtatggcgacatgatcaaccaccgtctgctgaaagccatcattaaaggcgagaccattgcgcgtccccaggatgaagccaccgtgcagatggcggagcgccgtcgtctcaaccggatggccgagcgcgacgtcgccgactggctgtacgcccgtttcctcaacgataaagccgggaccgatacccgcttcgcggcggagatcatcgacgtcagccgcggcgggatgcgcgtgcgtctggtggacaatggcgcggtcgcctttattccggccccgttcctccacgccgtgcgcgacgaactggtgtgcagccaggagaacggtaccgtgcagatcaaaggtgaagtagtctataaagtgactgacgttatcgatgtcactatcgctgaagttcgcatggaaacccgcagcattattgcgcgtccggcggtctga

SEQ ID NO: 270361 - DNA, 1158 bp, Klebsiella pneumoniae
atggagccacgccgcgtgaatggcaaaaatcactggtatcacgaaacccagtcaacaatctgcccggtggatgtcctgccgctcgtccctgaagccgcccatgttgaagaccgctttttgctggacctgacgctgccggccgcctggctacgtgcccacgctgactggctacaccccgcacgccagctggccgaactgctatttcccgaccaggtggcggtgagccgcctgcagacctttaccgcttacgatcgactcagcaccgcgctcaccgtcgcccaggtctacggcgtccagcggctgtgtaaccactacgccgcccgccttgctcccctgccaggccccgactcctcgcgcgagagcaaccgtcgtctggcgcaaatcacgcaatatgctcgtcagcttgccggttcgccctcggttattaacgctctctcccgtagccagctggacgaagtgggcttaaccagtcgggacattattctgttcaaccagattatcggattcgtcggcttccaggcgcgggcgattgccgtcctgcaggcggcccagggctttccggtgcgctggatccccggtatgccccagcaagaggaggcacccgcggaactgttcgccccgccgccgggagcatggcaggcagacattgcggatcccgacctgcagtatgccgatgatgagcgtcagcggcgcatcgccggctggcagtcgctgcccggtctgggcgagctggcgccgctgctggcctgcgacccacagttattcgcgcctctggagaccttgatccgccagctcagcacggatgatacctttggcccgcaggtcgccttactcacggcgcgcaccaatggcagccccacctgttttgacgcctggctcccccactggcagggtgaagaggagttcgccagccatctgcgggagggcgaccaggccctccatcactggctccagcagcatcctcaggcccggtctctcgtgaccgcggtgcagctgttaacccgctcgcctgaccggtttagcgccgcccagttaacgcccctcgcggaatatcgactctctgagcaacaagcaatcgatctgttgatctggagcgggctgtgcggatggatgaatcgtctgaaaatcgccctcggcaatgtgcgtcagcagacgtaa

SEQ ID NO: 270362 - DNA, 789 bp, Klebsiella pneumoniae; identical to SEQ ID NO: 139601

SEQ ID NO: 270363 - DNA, 543 bp, Klebsiella pneumoniae
atgatggtcccttttcaactttcgacgctccccgtcacgccgtggaaaaacggcgccggagagacgcgcgaaatcatctgcgtacccgctccagatgccccttttctctggcgagcgagtattgccaccctgcaggcggatggccctttctccccctttcctggcgtcgaccgggtcattactctgctggcggggcagccgctacggctgtgtggcgagaatatcgaccaaccgctggcgctctggcagccgtgggctttccccggcgaatgggcgctgtccagcgtcgggatcgttgcgccagggctggacttcaatatcatgactcagcgcgggcgcgcgtcggcgacagttcaggtcgttagcgacctgcaatgccctgccagcgagggggtcgcttatgttctacaaggcgagtgggatctggccgggcgacgctgcgcggccggcagcggcctctgctggcgcggtggatccccgcggaatctgcgtcccgtgggcagcaatggacgcctgctgctggcggagatcgcgctcaaataa

SEQ ID NO: 270364 - DNA, 1431 bp, Klebsiella pneumoniae
atgtcttcgttttcgtctacagacgggcagtcaaagagcaattatgctggaatgagtgaaaggcggtcgattgattacatcccggaaagcgaacggcatggacacccttttagccagttcaccctttggtttggcggcaatctgcaaattacggcgattgtcactggcgctttagccgttgtgctgggcggcgatgtagtgtggtcgctggtcgggctgctggtcggtcagatgctgggggcggcggtgatgtctctgcatgcgctgcagggaccgcgactgggacttccgcaaatgatccttagccgcgcccagtttggggtttttggcgcggtggtgccgctggtgctggtttgcgtcatgtatatcggtttttctgccagcggcaccgtattggccgggcaggcaatggctaaactactgaatatcagccacgtagccgggatgctgatattcagtgcgattattatcgttatcgcggtcctcggttataaggtgatccacaagctgggcaaactggcgagtatcgtcggaattctcgccttcgtttatatgttcatcacgctgctactttcggccgatctcagtgcgctcgcgcacaataaccatttttcgctgccgacgtttttattagccgtatcgctctcctcatcgtggcagatcgctttttgcccctatgtatccgactattcgcgctacctgccacgcgatgtttccgccacgaaaacgtggtgctcagtgtttttcggcaccgtattgggtacccaaacgtcgatgacgctcggggttctgacagcggccattgccggcagcgcgttccctggtcacgaggtgagctatctggtgggattaggtaagagtcaggcgatggccttggttatctatttcgccatctgttttggtaaaattaccttcactaccctcaatgcgtacggcagctttatgtcgctgaccaccattgtttccgccttccgccggcaaaccgtgctgtcgcaaaagtgtcgcattgcattcgtggtgctgatggtgacggcttcctgcattatcgcgttgcttagcgaacccgctttcttaaagcatttcacgcattttcttctgtttctgctggcgttcttcgtgccgtggagcgccatctgtctgacggattattatcttatctcgaagggcgccatcgatattccggcgctaagcgacccgcagcaacgctacgggttctggaacctgtacgcgatcaccctgtatatcgtcggtgtgcttatccagttgccgttcattgagaacccgttgttccatggttcgctcacgtggatcttcgccggtaacgatgtctcatggataataggttggtttggcaccggggttctttactacgcgctgcgccgctttgaccgccggtcgctgccggcgcagagtcttttcccttctacctga

SEQ ID NO: 270365 - DNA, 810 bp, Klebsiella pneumoniae
atggtcgaaacattgctggaagttcgccaactcagtaagacctttcgctaccgcaccggctggtttcaccgtcagacggttgaggcggttaaaccgctgagttttaccctgcgcgaacggcagacgctggcgattatcggcgagaacggctccgggaaatcgaccctcgcgaagatgctggcgggcatggtggaacccaccagcggcgaactgctgattgacgatcatccgctgacttttggggattactcctaccgcagccagaagattcgcatgatctttcaggatccgtcgacctcgctgaacccgcgtcagcgcatctcgcagatcctcgattttccgctgcgactgaataccgatctcgacgccgaagcgcggcagaagcagataatcgacaccctgcgcatggtcggtctgctgccggaccacgtcagctactacccccatatgctggcgcccggtcagaagcagcgtctcggcctcgccagggcgctgatcctgcgcccgaaggttatcgtctgcgatgaggcgctggcctcgctggatatgtcgatgcgctcccagcttatcaacctgatgctggagctgcaggagaaacagggcatctcctatatctatgtcactcagcacctgggaatgatgaaacacatcagcgatcaggtgctggtgatgcataacggcgaagtggtcgagcgcggcagcactgccgatgtgctggcctcgccgctgcacgacctgacccggcgcctgatcgccggccacttcggggaagccctcaccgccgacgcctggcgcaaagacgggaaatag

SEQ ID NO: 270366 - DNA, 993 bp, Klebsiella pneumoniae
atgccgttactcgatattcgtcacttaaccattgaatttaaaaccagcgaaggctgggtaaaagccgtcgatcgcgtcagcctgacgctgaccgaaggcgaaatccgcggcctggtgggggaatccggctccgggaaaagccttattgccaaagctatctgcggcgtgaccaaagacaactggcgggtcacggccgaccgcatgcgcttcgatgacatcgacctgctgcgactgtcgaaccgcgagcgccggaagctgatcggccataacgtgtcgatgatttttcaggagccccagtcgtgcctcgatccctctgagcgcatcggccagcagctgattcagagtatccccggctggacctacaagggccgctggtggcaacggctgggctggcgcaagcgccgggccatcgagctgttgcaccgcgtcggcattaaagatcacaaagatgccatgcgcagcttcccctatcagctgaccgagggcgagtgccagaaggtgatgatcgccatcgccctagccaaccagccgcgtctgctgattgccgacgagccgaccaacgccatggagccgaccacccaggcgcagattattcgcctgctgacgcggctcaaccagaacaacaacaccaccatcttgctgatcagccatgacctgcaaatgctcagcaaatgggcggataaaatcaacgtcatgtactgcgggcagacggtggagagcgggcccagcgaagagctgatcaccctcccacatcatccctacacccaggcgttaatccgcgcgatcccggatttcggtagcgccatgccgcataaaagtcgcctcaacaccctgcctggagcgatcccgctgctggagcagttgcctatcggctgtcggctggggccgcgctgcccgtacgcccagcgggagtgtatcgaaacgccgcgtcttaccggggcgcgcaaccatctgtacgcctgtcatttcccgttgaacatggagaaagagtga

SEQ ID NO: 270367 - DNA, 891 bp, Klebsiella pneumoniae; identical to SEQ ID NO: 259629

SEQ ID NO: 270368 - DNA, 966 bp, Klebsiella pneumoniae
atgattatttttaccctgcgccgtctgctgctgctgctgatcaccctcttttttctgacctttgtcggtttcagcctgagctatttcacccctcatgccccactgcagggcgcttccctgtggaatgcgtggctgttctggtttgaaggggtgctgcactgggatttcggcgtatccagcattaacggccagctgatttctgagcagttgcgcgaggttttcccggcgaccatggagctgtgcatcctcgccttcggctttgccctgctgataggcattccggtggggatgatcgccggcgtaatgcgcaataaatggcccgataccctgatcagcgccgtcgcgctggtcggtttctcgatcccggtcttctggctggcgctgctcctgaccctcttcttttccctgaccctcggctggcttccggtctccggtcgcttcgatctgctgtatgaggtgaaaaacgtcaccggtttcgcgctgatcgacgcctggctttcggactcgccgtggcgccatgagatgatcgtcagcgccgcccggcatatggtgctgccggtattgaccctggcggtcgcccccaccactgaagtgatccgcctgatgcgcattagcaccagcgaggtgtatgacactaactatgtaaaagcggccgccacccgcggcgtgtcgcgacgcaaaattctactgcgccatgtgctgcacaacgccctgccgccggtgatcccgcgtctcggcctgcagttttccaccatgctcaccctggcgatgatcactgagatggtgttcagctggcctggactgggccgctggctgatcaacgccattcgccagcaggactacgcggcgatctccgccggagtgatggtgattggcgcgctggtgattattgtcaacgtgatttccgatattctcggtgccatggctaacccactgaaacataaggaatggtatgccctacgatag

SEQ ID NO: 270369 - DNA, 1644 bp, Klebsiella pneumoniae
atgcgcctgaaattgtcatctctcctggcagccgtttccctgctgtgtgggccagcttttgccgcccctgcgctccccgaccgcgccgatatccgcgatagcggtttcgtctattgcgtcagcggccaggttaatacctttaacccgcagaaagtcagcagcggcctgattgtcgatacgctggccgctcagatctacgatcgtctgcttgacgtcgatccctatacctaccggctggtccccgagctggcggagagctgggaagttctcgataacggcgccacctaccgctttcacctgcgccgccacgtcccgtttcaacgcacggcgtggtttaccccgacgcgggactttaatgccgatgacgtcatttttacctttggccgtatttttaaccgcgaccatccgtggcacaacgtcaacggcagcagttttccctacttcgacagtctgcagtttgctgacagcgtggagagcgtccgcaagctggataatcagaccgtggagtttcgcctcaagcggccggacgcctcgttcctctggcatctggccacccactatgcgtcaattacctctgccgaatatgccgcccgcttaatgcaggacgaccgccaggagcaactggatcgccagccggttggcaccggcccgttccagctatccgattaccgctccggacaatatgttcgcctgcagcgccaccccggctactggcgcggcaaaccgttgatgccccaggtggtggtcgaccttggctccggcggcaccggccgcctgtcgaaactgctgaccggagaatgcgacgtgctggcctggccagccgccagccagttgacgatcctgcgtgacgacccgcgcctgcgcctgacgctgcgcccgggaatgaacatcgcctggctggccttcaacaccgctaagccgccgctggataaccctgaggtgcgccatgccctggcgctggcgattaacaaccagcgcctgatgcagtccatctactatggcaccgcggagacggcggcgtccatgctgccgcgggcctcgtgggcctacgataatgacgctaaaattaccgaatataatccgcaggaggcccgcgcccgcctgaaagccctggggctggaaaacctgaccctcaagctgtgggtgcccaccagctcgcaggcgtggaatcccagcccgctgaaaacggcggagcttatccaggcggatatggcgcagattggcgttaaggtgattattgtgccggtagagggacgtttccaggaggcgcgcctgatggatatgagccacgacctgacgctctccggctgggcgacggacagtaacgatccggacagtttcttccgaccgctgctgagctgcgcggccatcgcctcgcaaaccaactttgcccactggtgtaaccgggagtttgacgacgtgctgcaaaaagcgctgctctcgcagcagctctcctcgcggatggacgcttacaaagaggcgcagcggatcctcgcccgcgaactgccggtcctgccgctggcctcgtcgctgcggctgcaggcctaccgctatgatatgaaaggcctggtgctcagccctttcggtaacgcttcgttcgctggcgtatcgcgggaaaataccgaagaggtgaaaaagccatga

SEQ ID NO: 270370 - DNA, 906 bp, Klebsiella pneumoniae
atgcgtatatttcttaccggcgcgagcggatttatcggctcacgtattcttccggcgctgcaggcgtcgggccatcaggttatcggcctcgcgcgcagcgaaagcaccgcacaggccctgaaggcggccggcgccgaggtgcatcgcggcacgctggatgccccggagtcgctgctggctggcgtcgggaacgccgacgcggtgatccataccgccttcgaccacgacttcagccgctttgccgctaactgcgagaaagaccgccaggcgatcctggccctgggccaggcgctgcgaggcagcacgcggccgctggtgatcacctccggcacgctgatgggcgacgacgggagcggcgccccggcccgggagtcgttcttcaactcagggcaccccagcccgcgcaccgcctcagagctcgccggccagcagttgctggaggcgggagtggatgtcagggtggtccgcttaccgcaggtgcatgacaccgtgcgtcagggactgctgacctgctacatcgaacgcgcggtcgccaacggggcggtagccctgcgcggcgagggaagcaaccgctggtcagccgcccatgtcgatgacgtcgcacgtctgtatgtcagcgcgctgcttcagggcgcggccggcgagcgctatcatgcggtggccgaagaggggatcgcattacgcgatattgccgcggtaattgcccacggattaaacctgccgctgacccacctggatgactcgcaggtcgacgcctggttcggctggtttgcgccgtttaccgcccttgacctgcgcgccagctcggcatggacccgcgagcgcttgcagtggcagccggttggccccgggctgctggaggacctgcagaacatggactatcataaagtgacactgtcacaataa

SEQ ID NO: 270371 - DNA, 831 bp, Klebsiella pneumoniae
atgaacacttctgacaaccatgctttaggcgattttctccgcgcccgccgccagcgtctcgatccggcaacgtttggcttcccggcgggacgccggcgcaccccggggctgcgccgcgaagaggtcgcgcagctcgccagcatcagcccgacctggtatacctggcttgaacaggggcgcggcggggcgccttcccgcgaggtgctggagcggatcgcccgcggtctgcggctgaccaccccggagcgcgagcatctgtttattctcgcctttggccatccgccgcagacgcgtctgacggtgacggatgatatgacgccgcggctgcagcgggtgcttgacgctttcaccattccggcgattatccgcaccgccagctgggacgtcatcgcctggaacgcaccggcggccagggtgctgaccgactacagccaactgccgctggcggagcgcaacgtgctgcgccgcctgtttacccggccggaggcccgctgcactctggaggactggcagagggtggggcagcttatcgtcaacgccttccgcgccgacgtcacgcggatgggcgccacgaaagaaactgaccagttgatcgcggagctcagccagcagagcgtcgagttcgcccgtttctggcaaagccatgacgtcgccggccacggcgagggctataagcgcattaatcacccgcagatgggtccgctcgacctggaatttacctcctttgccgtggaaggccgtcccgatctttccctgctggtctttaatccggcaacgacggagagccagcggaaaattcacggtttacttcagggggctgtgggcgactga

SEQ ID NO: 270372 - DNA, 2310 bp, Klebsiella pneumoniae
gtggagcaccattcaggcgactttagcgtcaccgtacgcgatgtgcgtcagctgacccagccggaaagcgatctgctgacgctgctgtgggtgctggagggaagcgtaaatctggcggtggcggaaggtgcgtcgcagccgctcgccgccgacgggctggcgatcgttaaccgcaaccgtcgctggagcctgcgcagcgccggggccaacgccgtgatgatcctcaccctctccgccagctggctggcccgcctcgataatgccttttttgccgtcgattaccagataacgccgcgcacccgggatgccgatgacggcctgcgccgcctgatgcgccagctgctggtgagcggcctggtcaatcatcctggccattaccgactggaggccaaccgctggctgagtgagatagcgctgctgctggccacgcgctttagccagcccatcgcctccacgccccggcgcgataccgaaaaatggagccggagaatagccagcgtggtggcgcggatcgacgctaactatcagcgtcgcctctcgttgcaggaggtagcggccgcggaatttgtctccgaggcctggctgtcacgcttatttcgcaaagaggtcggggtaagttttgtccagtacctcaccgcgctgcgcctgcgccacgccgccgaccagctattaaccacccgcaaaaccgtccagcaaatcgcccgcgaacagggattcgccagtacgcgaatgatgagcgatttgtttaagcgccagcacggcgtgacgccgcgccagtatcgtgaacagcatcctctggagcttgcccgaccgcgcccgccgcaggccgatcgctggcagccggtggcggccgaccggctgtatgcgcgactcaatgagccggaaccacgcgaccgggaaagtccccccctgccgatcaacccaccgcagacccgggagatcaatctgcgcgatcgtccagcgcgccccgcagcgctgcgccatacccggatggtggtgaccgtgcgcgaactggacgatctgctgcgtgaagatgtgcgccgggaactcgaacagctgcaccacgccctgccggtgtatgccatcgatatcaacgatccctttctcagcagtcggctgttcggcaccggctgggacgatccgcagatggccggctacgcctgctggtacaacctgcagcagatttttagctggctggcggcgatgggctggcaggtgatcctgcacaccggcgtcaccacccgcagtgacctgctgcagcgcttcctgcagctcgccgccaaccattttccgccagccacgctcaacagctggcgctttgtctggcactggtcgccgcaggccagcgaagctgcgcgccaggccgcctggcggcagcagcgcggggtccttcatcgcctgctgccgcagccgcagctggggatctggcaccgctttgctcccagcgatcccgggaacgatccgctgttccactcgccgctgctggcagaggcggattttctcgcctgccaggcagatgccaacgaacagctggatctggcccaggcagacagcagccgcctggcctccagcgaacattacccgctgcacaagctgcggcagatccacagcgccctgcgccagcgtcagctcaacctgccgctgtggctgctctcctggaatacgctgactggcgatacgcgggataccaacggccgcttttttcgcggcgcgctgctgatggataatctgctgggggttgcggaccaggtctggctggcgggcttctggttaaattcaggcctccagggcgaagctcgcgccaacggcaagctcgatacctccagcctggcgctgcactatctgcacggcctgccgcgcccggtttactgggtactctggctctggcggcggctgcgcggcgagatcctggttcacgataaaaacctgctgctgctccaccaccagggtcactaccagctgctgctgcgcaatacggtggtctacaatccctggctctccagcgaagcggcctttatccagcgcttcagccagccctacagcgtgcggctgcagggcctggatggcagctggcgcatcaaacagcacctgttcgatcagcaccacggcgcgttgttcccgctggtggacgcctttcgcagccgcagcggccctgacgccgaggattatcagtggctgatgcatcaggcccgtccggcgctcagcgtggatgaagccaggctcgatggctattggctgcggatcgactcgctgcagagcaatgcgctggtgctgtacgagtttacccctcagtcgcccacagccccctga

SEQ ID NO: 270373 - DNA, 1170 bp, Klebsiella pneumoniae
atgacacatccgttgctagaagcattgcaggttaacgaggcgcaatttattgctctgcgtcgtcggttccaccagcagccggagatcggctttgaagagcaccagaccagcagcgaggtcgcccgactgcttggcgagtggggatacgaggttcaccgcggcctggcgggcaccggagtggtgggcacgctgcgcgtcggcgaggggaaaaaacgccttggcctgcgggcggatatggatgccctgccgatgcaggagcggagcggtaagccgtgggcaagccaggttgaagggcgctttcacggctgcggccatgacgggcacaccaccacgctgctctacgcagctgaatatctggcgcgcacccggcagtttaccggcacgctgcagctgattttccagcccgcggaagagttgctgtacggcgggcgggtaatggtcgaggacggtctgtttgatcagttcccctgcgacgccatcttcggcctgcacaatatgccgggtcagccgttgggcaagatcggcctgcgcgacggggcgatgatggcctcctccgatacgctgcatattgaagtgaagggcgttggcggccacggcgcggtgccggagcatacggtggatgccacgctggtggcctgccatattaccctcgcgctacagtccattgtctcgcgcaatatcaccccgtttgaaccggcggtggtgaccgtcggcagcatccaggccggtcatgcgcccaatatcattaacgatcacgtgctgatgaagctcacggtgcgcaccctcaatgagcaggtgcgcgagaccgtgctgcagcggatccatgatatcgccgtggcccaggcggagagcttcaatgccaccgccacgctgacccacgtcaacggcagtccggtgttgcgtaacgatccggcgacgaacgccatggtgcgggaggtggcgacagcgctgtttggcgcagggcaggtgggcgaggtgaagccgtttatgggcagtgaagattttgccttcatgctggagcagcacccgcatggcagctatttcaccatcggcgctggcgatgagccggatcgctgcatggtgcataacccggggtatgacttcaacgacgcgctgttgctgaccggcgcggcgctgtggtgtggcctgacggaacgctatctgcgctaa

SEQ ID NO: 270374 - DNA, 1392 bp, Klebsiella pneumoniae
atgagcactgtcacaataagcgacaccccgtttgtcggcaacgatcgcctgctggtggggattgtgttaagcgttttaaccttctggctgttcgcccagtcggtgattaacgtggtgccggcgatgaaaagcagccttgatatctctcttgaaaccttaactctggccgtcagtctcagcgcgctgttcagcggctgcttcgtggtcgccagcggcggcctggcggacaagtttggccggatgcggatgaccaccctcgggctggggctgagtatcgtcggcagcgccatgctggtggtcgctcagggaccggggctgttcctggccggccgggtgctgcaggggctgtcggcagcctgcattatgccggcgacgctggcgctgattaagacctggtatgaggggcgtgcgcggcagcgggcggtcagcttctgggtcatcggctcgtggggcggcagcggtctctgttccttcgttggcggggctatcgccaccggactgggctggcgctggatcttcgtcttctcgatcgccgttgccctgctggcgctgtttttgctgcgcggcacgccggagagccgcagcgccagcgccagccagcataagctggacgtcggcggtctgctgagcctgattgttgcgctggtgctggtgaatctgtttatcagcaagggccacggctggggctggagcagcccgctgtcgttgaccatgctggccggggcgctggcggccgggacgatatttatccgcaacggcatgcgcaaaggcgaggcggcgctgattgattttgcgctgtttcgtaaccgggcctacggtgcggcagtgctgtcgaactttctgctcaatggagcgattggcaccatgatgatcgccagcatctggctgcagcaagggcaccacctgacgccgctggagagcgggatgatgaccctcggctatctggtgaccgtcctggcgatgatccgggtcggcgagaagctgctgcagcgctatggcgcccggctgccgatgatagccggtccggtgttgaccgctatcgccatcgcgctgatatcctgcacctttctcgaaaaggcgctgtatatcggggtggtgttcgccagcaacgtactgtttggcctcgggctgggctgctacgccacgccgtcgacggataccgcggtggccaatgccccggagaacaaaatcggcgtcgcctcggggatctataagatgggcagctcgctgggcggggcgatgggtatcgccgtgacagcgtcacttttcgcgctgtttttaccgctgggcatggcccatgccgcccagtatgccctgtggtttaacgccgtcttatgtctgggggcgatggcggtgagcgcgctgctgctgccgcgcgcctctcacagctga

SEQ ID NO: 270375 - DNA, 990 bp, Klebsiella pneumoniae
atggcgaaattcatcatggcgcagtacaaggataatctgctgggcgaggccaacagctttctcgaggtgctggaacaggtttcccggctggccccgctggataaaccagtgctggtcatcggcgagcgcggcactgggaaagagcttatcgctaaccgtctccactacctctccagccgctggcaggggccgtttatctcgttgaactgcgcggcgctgaacgataatctgctcgactcggagctgttcggccacgaagccggggctttcaccggggccagcaagcgccatcccgggcgcttcgagcgcgccgacggcgggacgctgtttctcgatgagctggcgacagccccaatgctggtgcaggagaagctgttaagagtgattgaatatggcgagctggagcgcgtgggcggcagccagccgctgcaggttaacgtccggctggtgtgcgccaccaacgctgacctgccgcagatggtcgaggaaggtcattttcgcgccgacctgctcgaccgcctggccttcgacgtggtacagctccccccgctgcgcgaccggcagagcgacatcatgctgctcgccaaccagtttgccatccagatgtgccgcgaactcggtctgccgctgtttcccggctttagcgaacgagcgaccgcgacgctgctcggctaccgctggccggggaatattcgcgaactgaagaacgtcgttgagcgctcggtgtatcgccacggcgacagcgaacatgagctggacgcgattattattaacccttttcgtcagtcccccggctctccgccggaagccgcgcccggcgatgagctgcccgcgctaccgctggatctgcgcaatttccagctccagcaggaaaaacgcctgctgcagcggagtctggagcaggcgaagtatcatcagaagcaggcggcggagctgctgggattaacctatcaccagctccgcgcgctgctgaaaaagcatcagctgtga

SEQ ID NO: 270376 - DNA, 669 bp, Klebsiella pneumoniae
atgggtattttttctcgttttgccgacatcgtgaacgccaacatcaactccctgctggagaaagcggaggacccgcaaaagctggtgcgtctgatgatccaggagatggaagacacgctggttgaggtgcgttcgacatcggcccgcgcgctggcggaaaagaaacagctgtcccgtcgtattgagcaggcggtcgcccagcaggcggaatggcaggaaaaagccgagctggccctgcgcaaagagaaagaagatctggcccgggcggcgctgatcgaaaaacaaaagctgaccgaccttatcgctcagctggatcatgaagtgcagctggtggatgaaaccctggcgcggatgaaaaaagagattggcgagctggagaacaaactcagcgaaacccgcgcccgtcagcaggcgctggcgctgcgccatcaggcggcgagttcgtcccgcgatgtgcgtcgccagctggacagcggtaaactggatgaggcgatggcgcgctttgaatcttttgagcgtcgcatcgatcagatggaagcggaagcggagagccaccgctttggcaagcagcagacgctggatcagcagtttgccgaactgaaagcggacgatgaaatcagcgagcagctggcggcgttgaaagccaaaatgaatcagtccaaccagtaa

SEQ ID NO: 270377 - DNA, 225 bp, Klebsiella pneumoniae
atgagcatgctttttctcgccattccgctgacgctgtttgtgctgtttgttctgccggtctggctgtggctgcactacaacaatcgcggcgccaacggtagtctgacgcaaaatgagcagcaacggctgctgcagttgaccgatgacgcgaagcggatgcgcgaacgcattcaggcgctggaagcgatcctggacgccgaacatccgaactggagggacaaataa

SEQ ID NO: 270378 - DNA, 360 bp, Klebsiella pneumoniae
atggccgggctggatctgaataaaaaactgtggcgtatcccgcagcgcgggatggtaaagggcgtctgcgcgggtattgctcagcatcttgatgtcccggtgaagctggtgcgtctgattaccgtgctggcgatgattttcggcctctttttctttgtcctggtggcctacatcattttgacttttgctctggatccgataccggacagcgagctgtacggtcataaagcgccgagcaatggcgatctgctggccgccgtggatgccgaactggcctccggtgaacagcgtctgcgtgaaatggagcggtatgtgacctccgacacctttacgctgcgcagccgctttcgccagctgtaa

SEQ ID NO: 270379 - DNA, 219 bp, Klebsiella pneumoniae; identical to SEQ ID NO: 137407

SEQ ID NO: 270380 - DNA, 1398 bp, Klebsiella pneumoniae
atgaagcgactgaaaactgaattgaatgcgctggtcaaccgcggggttgaccggcatttacgtctggcggtgaccggcctgagccggagcggtaaaacggcgtttatcaccgcgctggtcaaccagctgttgaatatccacaccggcgcccgcctgccgctgctgagcgccgcacgcgaagagcggctgctcggcgtcaagcgcgtgccgcagcgggactttggcattccccgattcacctacgacgaagggctggcccagctgtacggccagccccccatgtggccaaccccgacgcgcggggtgagcgagatccgtctcgcgctgcgctaccgttcgaatgactccctgctgcgccattttaaagatacctccacgctgtatctggagattgtcgactatccgggcgagtggctgctcgacctgccgatgctggcgcaggattatctgagctggtcgcgacagatgaccgggctcctgcagggacagcgtgcggagtggtcggcccgctggcggcagctgtgcgccgggctggatccgctagcccctgccgacgaggctcggctggcggatatcgctgccgcctggacggactatctccacgcctgtaagcgtgaagggctgcactttatccaacccgggcgctttgtcctgcccggagaaatggcgggcgcgccggcgctgcagtttttcccgtggcccgacgtcgacgccgtcggcgaagccaagctggcgcaggccgataaacacagcaacgccggcatgctgcgcgaacgttacaaatactattgcgaaagggtggtgaaggggttctacaaagagcacttcctgcgcttcgaccggcagattgtgctggtggactgtctgcagccgctcaacagcgggccgcaggcgtttaacgatatgcgcctggcgctgacccagctgatgcaaagtttccattacgggcagcgcaccttgttccgccggttgttttcgccggttatcgacaagctgctgtttgccgctaccaaagccgatcacgtcacgatcgatcagcacagcaatatggtgtcgctcctgcagcaactgattcaggacgcgtggcagaacgccgcctttgaagggatcagtatggattgcctggggctggcgtctattcaggcgacccagagcgggctgattgaggtgaatggcgagaaaattcccgccctgcgcggcaatcgcctgagcgacggccagccgttgaccatctatcccggagaggtgccggcgcgcctgccgggccaggccttctggcagcagcagggatttcagtttgaaaactttcgtccgcaggtcatggatgtcgatcggcctttgccgcacattcgtctcgacgcggcgctggaatttttgattggagataaactgcgatga

SEQ ID NO: 270381 - DNA, 1062 bp, Klebsiella pneumoniae
atgagcgaaccgttaaaaccgcggattgattttgatgggccgctgcaagcggagaaaattccgccgctgaaaggcgctcgcgccttcgacaccctggaggcggacaacttcgcgccagcgcggctggtgaccggcgaagaggaagagggggcggcggaagcggtggtggagtcggtcctgcgacccaaacgcagcctgtggcggcggatggtcagcgccggactggcgatcttcggcgtcagcgtcgtggcgcaaggcgtgcaatggacggctaacgcctggcagacccaggactggattgcgctgggcggctgcgtcgccggggcgctgatcgtcggagccggcgtcggatctgtagccaccgagtggcgccgtctgtggcgactgcgccagcgcgcccacgaacgcgatgaagcgcgcgatatgctgcacagtcacgcggtcggtaaagcgaaagcgttttgtgagaagctggcgcagcaggccgggctggataagtcgcatccggcgctgcagcgctggtatgccgcgatccacgaaacgcaaagcgatcgcgaagtggtgagcctttatgcgcagctggtgcagccggtgctcgatgcccaggcgcggcgggaaatcagccgttcggcggcggagtcgacgctgatgattgccgtcagcccgctggcgctggtggatatggcgtttatcgcctggcggaacctgcggctgatcaaccgaattgccacgttgtacggcattgagctcgggtattacagccgtctgcgactgtttcgcctggtgttgctcaatatcgctttcgctggcgccagcgaactggtgcgcgaggtgggcatggactggatgtcgcaggatctggcggcccggctgtcggcgcgcgccgcgcagggcattggcgccggtctgctgacagcccgtctcgggatcaaggcgatggagctgtgccgcccgctgccgtggatcgccgatgataaaccgcgactcggcgattttcgtcgcgagctgattgggcagttgaaagagaccctgcagaaaagcaaaacccgcccggagaagtaa

SEQ ID NO: 270382 - DNA, 900 bp, Klebsiella pneumoniae
gtgcttgagcaacaaagcatccttgcgctgctgcagacctttgaggtgaccgcccgccacctgagctttacccttgccgcgcatgaaatgaaccttacccagggagcggtcagccatcggatccgcaggctggagatgcacatcgggtttcgcctgtttatccgcatgacgcgtaaactggcgctgacagaggaaggtaagcggctgctggcgacgttaagccattcgctgcgggcgattaacgatgaaattgaggatattcgcgatcaggatctgcgcggcacactgcatattggtattgcgccgacgctggcccatctgtggctgatgccgcgtctgccgcgctttcaggcgcaatggccgggactgaatctgcagtttcgcgtgcgcgccggggtgatggattttaacgaggagcgggtggatctggcaatttactacggcgccacgcgctaccccgatctttatcaacagcggctgatggcggaaagtttgctcccggtctgctccccgcgttatcgccagcagtatcgtccgctgagcggcggcgacccggcggcgctcgtctggatccatgcgtgcgaatccaccgacgtacaggatcaatttgcggaatggcgcctgtggtgccagcacagcggacaggcgttaccttttgacggccggtattacgcggtgaataaccactcgctggccatcgagatggcgctcaatggactcggcgtggtgatggggcgtaaaacgctgatccagccgctgctcgacgcaggcaggctggtggccttgtctgaaaatgaagcgccctcgccctttggctatgacctgatttgtccgcaggagaaccgttcccgcccgcgctttcgcgccttcagcgagtggctggcggcggaatgcgcctaa

SEQ ID NO: 270383 - DNA, 1542 bp, Klebsiella pneumoniae
atgcgtcttgaagtcttttgtgaagaccgtctcggtctgactcgtgaattgctcgatttgctggtgctgcgcggtattgacctgcgcggtatcgatattgaccctattggccgaatttacctcaatttcgccgaactggaattcgccacgttcagcagcctgatggctgagatccgccgtatcgccggcgtgacggacgtgcgcaccgtgccctggatgccgtctgaacgtgaacacctggcgctcagcgcgctgctggtagcgatgccggagccggtgctgtcgctggataccaaaggtcgggtggaactggcgaaccccgccagctgcctgctgtttggccaaagccaggcgaagctgcgtaaccacccggtggcccagctgatcgccgattttaacgttcagcgctggctggagagcagcccgcaggagacgcatgcggagcatgtggtggtgaatgggcagaactacctgctggaagtgactccggtctatctggaaggcgagcataacgagcgagtgctgaccggcgccgtggcgatgttgcgctcaaccgtgcgcatgggacgccagttgcagaccatgaccagccaggataccagcgccttcagtcagatcctcgcggtggggccgaaaatgcgccacgtggtggagcaagcgcgcaagctggcgatgctcagcgcgccgctgctgattgtcggcgacaccggcaccggtaaagatctgctggcccatgcctgccatctggccagtccgcgggcgggcaaaccctatctggcgctcaactgtggctccattcccgaggacgcggtcgagagcgagctgtttggcgacgcgctgcagggcaagaagggcttcttcgagcaggccaacggcggctcggtgctgctggatgaaattggcgagatgtcgccgcggatgcagactaagctgctgcgctttctcaacgacggcaccttccgccgcgttggcgaggatcatgaagtgcacgtcgatgtgcgggtgatctgcgcgacgcagaaaaacctgatcgagctggtgcagaaagggcttttccgcgaagatctctactatcgcctcaacgtcctgacgctgtatctgccgccgctgcgcgattgcccgcaggacatcatgccgctgacggagctgttcgtggcccgctttgccgacgagcaggggatcccgcggccgaagctctctgccgatctcagtacggtgcttacccgctacagctggcccggcaacgtccgccagctgaagaatgccgtctatcgcgcactgacccagctggaaggatttgagctgcgtccacaggacattctgctgccggaccatgacgtcgcctcgctgccggtgggcgaggaggccatggaagggtcgctggacgacatcacccgccgctttgagcgctcggtgctgacccagctctatcgcagctaccccagcacacgtaagctggcgaagcggctgggggtgtcgcataccgccatcgccaataaactgcgtgaatatggtctgagtcagaaaaagggcgacgaataa

SEQ ID NO: 270384 - DNA, 1053 bp, Klebsiella pneumoniae; identical to SEQ ID NO: 224096

SEQ ID NO: 270385 - DNA, 507 bp, Klebsiella pneumoniae
atgtcacaaaccgtgcatttccagggcaaccccgtttctgttcagggcaccattccgcaggcaggcgctaaagcgcagccgtttacgctggtcgccaaagatctctctgacgtcgcgctgagccagtacgccggcaaacgtaaagtactgaatattttcccgagcattgataccggcgtgtgtgccgcatcagtgcgtaaattcaaccagctggccgctgaactggacaacaccgtagtgctgtgcatttccgctgacctgccgttcgcccagtcccgcttctgcggcgcggaaggcctgagcaatgtggtcaccctgtccacgctgcgcggcgcgtccttcctcgctgactacggcgtcgccatcgccaccggtccgctggctggcctggctgcccgtgcggtggtcgttatcgatgaaaacgatcaggtcgtctacagccagctggtgaatgaaatcaccgaagagccggactacgacgccgcgctggccaccctgaaagcctga

SEQ ID NO: 270386 - DNA, 966 bp, Klebsiella pneumoniae
atgcgtaacgtgcgagtgtatgaggaagcctggccgctccataccccttttgtgatcgcccgcggtagccgcagcgaggcaaaagtggtggtagtggaactggaagaggacggcgtgaaaggggtaggcgaatgcacaccctatccccgctatggcgagagcatcgcctcggtcatggcccaggtgatggcgatcggcgagcaactggaggcggggcttacccgcgaacagctgcagcggctgctgccggcaggcgccgcccgcaatgccattgactgcgcgctatgggatctgcaggcccggcgcgaaggcaaaaccttggcccagctgttgggcgtggcgttgcctaaccgggtgattaccgcccagacggtggtcattggcacgccggatcagatggcggccagcgccgcggcgctgtggcaggcaggggcccagctgttgaaggtgaagctcgacgatcgactgatcagcgagcggctaatcgctatccgccaggcggcgccggaggctacgctgattgttgacgccaatgagtcctggcacagcgaggggctggcggcgcgctgtcagctgctggcggacctcggtgtggcgatgcttgagcagccgctccccgccgacgacgactcggcgctggaaaacttcgttcatccgctgccgatttgcgccgacgagagctgccacacccgggagagcctgccgcggctgcgcgggcgctatgagatggtcaatatcaaactggataaaacgggcggcctgaccgaagcgctggctctggccggggaggcggaacggcagggatttgaacggatgctgggctgtatgctctgcacctcgcgcgggatcgccgccgcgctccctctggcgccgctggcgcgcttcgctgacctcgacggcccgacatggctggcggtggacgttgagccggcgctgcggttcagcaccggcgtgcttcatctttaa

SEQ ID NO: 270387 - DNA, 708 bp, Klebsiella pneumoniae
atgtctatttcacgtcctcgcccgcagcgcggcgactttccgccgggaacccggcagtatggcagctcggaactgggcgcgccgctgctgtggtttcctgcgccgcaggccgacagccgtagcgggctgattattgccggtacccacggtgatgagaattcgtcgattgtgaccctctcctgcgccctgcgcaccctgaaacccgagctgcgccgccaccacgtggtgctgacggtcaatcctgacggctgtcagctcgggctgcgcgccaatgcccgcggcgttgacctcaaccgtaactttccagcagccaactggaagcaaggggaaacggtttaccgctggaatagcgcggcggcggagcgcgacgtggtgctgttgaccggcgagcagccgggttcggaacgggagaccgaggccctgtgtcagttgatccatcagattcatccggcgtgggtggtctcctttcacgatccgctggcctgcatcgaagatccgggccacagcccgctgggtcgctggctggccgacgccttctccctgccgctggtgggcagcgtgggctacgacacgccgggctcctttggcagctggtgcgccgatatcggactaccctgcatcaccgccgagtttccgccggtctccgccgacgaggcaacggagcgttacctgccggcgatgaccgatctgctgcgctggcaggcttaa

SEQ ID NO: 270388 - DNA, 1617 bp, Klebsiella pneumoniae
atgaagtatcctgtcgctttgacatgcggcgcgctgtggttagccagcgtatcttctctggcctgggcggctgacgtaccgccgggcacggtactggcggaaaaacagctgttagtgcgccatatcaaagatgaacccgcctcgttagatcccgccaaagcggtgggcctgccggaaatccaggtgatccgcgatctgtttgaaggtttagtcaatcaggatgcgaaaggcaacctggttccaggcgtagcgacccgctggcagagcaacgataaccgcgtctggacctttaccctgcgtgataatgcccgctggtccgacggcacgccggttactgccgaagatttcgtctatagctggcagcgtctggtggatccgaaaaccacttcgccgttcgcctggttcgcggcgctggcggggatcgctaacgcgcagaacattattgacggcaaagccgcgccggagaccctgggagtcaccgccgtcgacgcccacaccctgcgggtgcagctggataaaccactgccgtggttcagcaacctgaccgccagctttgccttctatccggtgcaaaaggcgaatgtcgacagcggggcgaactggacgcggcccggcagcctggtgggcaacggcgcctatgttctgaaagaccgtgtggtcaatgagaagctggtggcggtgccgaacacgcactactgggataacgccaaaacggtgatccagcaggtcacctttgtgccgattaaccaggagtccgccgccaccaagcgctatcttgcaggggatatcgatatcaccgagtctttcccgaaaaatatgtaccagaaactgctgaaggatattccggggcaggtgtataccccgccgcagctgggtacctactattacgctttcaatacccaaaaggggccgacggcggatgagcgggtacgcctggcgctgagcatgaccatcgatcgccgggtgatggcggagaaagtactggggaccggggaaaaaccggcctggcgcttcacgccggacgtgacggcgggcttcaccccccagccgtcacagtttgagagcatgagtcaggctgagcttaatgcccaggcgaaagccctgctggctgccgcgggctatggcccgaatcgtccgctgaagctgacgctgctgtataacacctctgagaaccaccagaagattgccatcgcggtggcgtcgatgtggaagaaaaacctcggcgtggaagtgaagctgcagaaccaggagtggaaaacctatatcgacagccgtaacaccggcaatttcgacgtgatccgcgcttcgtgggtgggggactacaacgagccgtccaccttcctgtcgctgctgacctccacccacagcggaaatatttcgcgctttaacgatccggcgtacgacaaaatcctcgcccaggcggcggtagagaattcggccaaagcgcgtaacgacgattacaacgcggcggaaaagatcattatggtcaaagcgccgatcgcgccgatctaccagtacactaacggccggttgattaagccgtggctgaaaggctacccgatcaccaacccggaagatgtggcctacagccgtaccatgtatatcgtgaagcactaa

SEQ ID NO: 270389 - DNA, 387 bp, Klebsiella pneumoniae
atgaaagtcctcaatatcctgatccgtcgatgcgtgctgattgcccgctttgaagataccgtttcgttctacgaaaatctcatcgcgcagaaggcaaggttgcgtttcgactatcccgaatacgatctcaaactggcgcaggtgggttccgtgcttttaattggcggaaccgagcaaagcctggctccgtttcgcgccaccgaggccactttcctggtaaacgacattaccgcctgggagaaacatctgccttccaccggggcaacgattatcaacctggtgaaggccgtgcccaccggctggaacatgctggttcggcatccggatggcatggttgccgaatacgttgagcatcatgataaaaacccggcggatgagatcttctga

SEQ ID NO: 270390 - DNA, 834 bp, Klebsiella pneumoniae
atggaaagtttaatttcttcgatatggaattttgatggactgataaatagcgcgttaatttttgttacttttggtttattaggagtgtttctctggaaacgggcaggatccgcatattctttattgaaccggctatgggagttctgcctgggagggaaaacgtttcacgacggtaaaataaatgcatatttcaatgagagaaatgatgttgaacgttttaatgttttatttaatgttggcgcaaagaataaagaagagattaaatcactgattaactggacgaaaaagaaaaatatagatattcgtcatgtcacagccgcgaaaggatggtttgaaatatcaacgcttaaggcaataaaaccattatttatcgctagtgttggtgtatttttctcttgtgtgttaactatgctgctattatcaaattttatgttgctggcattgaagccatccgcactagtacgattaggcgacgacaagtcatgggtttggattaatgatcatattgctgagagttcgatctggaccaataattaccttcccctgaactggactgagtggaagctcgataaaaaacagtgtgaaagtgaagatttcgataaaacggttttctcagaaaaagcggggataagtgtgcgctcggttgacaggatttgtgagaacttttcaagtggttcgttgagtgatactataaataatattattaaaaatcaaaaactggcatgggttttggctatttaccccttcatctttacgattatttgcttttttagcttgttacgcagaggtgctgcttctaaactttataatgaagtacataactcacaaaattaa

SEQ ID NO: 270391 - DNA, 1059 bp, Klebsiella pneumoniae
atgagctctgctgagacaactaacccgaatgcgcctgtttcactgattgaacaatgggataaaacgtttgctgagagtttgaaagtggatcaccgtaaggtgaccttccagaaccgctacgggataaccttggttggcgatctctacctgccgaaggatcgcggtgaacgcaaactggcagctattgccgtgagcggtcccttcggcgcggtaaaagagcagtccagcggcctgtatgcccagacgctggccgaacaggggtttgtcaccctggcgtttgacccatcctatacgggcgaaagcggtggctacccacgcaacgtggcctcaccggatatcaataccgaggattttagtgccgcggtggactttctgggcctgcaaaaagaggtggatcgcaaccgtatcggtttgctcggcatttgcggctggggcggtatggccatgaacgacgcggcgatggacacccgcgtcaaagcggtggcgaccagcgtcatgtatgacatgagccgcgcgatggggcatggggtaggcgatggcaaagaccgctacacgacagccgaccgccgagcggtactgcagtacttgaacgcgcagcgctggaaggatgcggcaaacggcacttccgcccccggtgggcatgacatatatgttgatgataaaggcaacgtcagcgctgccgatcgtattttgccggaaaccttgcccgccaaccccaatccggtcctgaaagagttcttcgattattaccgtatgcgacgaggtttccatgcgcgttcggttaattcaaccggggcatggaatgcgacgatgccgctgtcgtttatgaatatgccgctgctgagttacgccagtgaagtgactattccgacgcttatcgtgaccggcgaaaaagcccattcacgctattttgccgaagatgcctttaaggccatcggcagtaaagagaaagcgctggtgattgtcccaggcgcaaaccacgtcgatctctatgacaacgtcgcgggcaaaattccctttgcgacgttcgcgcaattttttaaaaccaacctgaaatag

SEQ ID NO: 270392 - DNA, 291 bp, Klebsiella pneumoniae
gtggcctttaaagcggcagtctcccgggaaattttcgctgccaatgaccgcgtgacgctgcgctttatcgatgcgggagagatctttcctgccgaacgcctggcgctggcgcgtaacgatgagcactttgatgtcgatccgttagcggaaggcggcaggggcttgcggcttattctgcgtgcggtggactattttaatgtggaaactggcgccggggagaacgtgactaccctgatagaagcgttgcctgatacccgcctaagccatgccaccgatgatcgctgcgggtga

SEQ ID NO: 270393 - DNA, 189 bp, Klebsiella pneumoniae; identical to SEQ ID NO: 138680

SEQ ID NO: 270394 - DNA, 915 bp, Klebsiella pneumoniae
atggataaactggatactctgaccttgtttgtgcgcatcgtcgaacggggctcattcagtgccgccgccgcggatctgggggtttcccggccagtagcgaccgcggctattaaagcgttggaggtcattctcggggcgcggctgctacatcgtaccacccggcacgtacggccgacggcagaaggctcgctgtattatcagcgctgcgtgtccattctggcggcccttgaggaggccaaccgcagcgccggggggagcatctccggcaccattcgggtagacgtggcgggcaacctggcgcggaccctgcttctgcccgcactgccgcagtttctcgcccgctacccggacattacgctgcagatcggggaaagcgagcgtgacgtcgatctggttcgcgagggagtcgactgcgtcattcgcggcggccatctccccgacagcgagatgatctgccggccgctcgccgggttgcaggagatcacctgcgccagcccgacctatctcgcccggtacggcaccccgcatacgattgaaggactgacgggccacgtgatgatcgggtttgtttcatcgcgcgcgcaccgtaccttgccgctgatctttacccagaatggccgccagagcgaggtcagtttgccctgtcggctgctgacctccgatgccgacgtcggcgccgaagcggcaaggcttggctttggcctgtatcaggcccccttgccccgccttgaggccgatctggcgtcgggcgcgttaacggaagtgctggccgattttcgccctgcgccgttgccgctctccctgctctatcccagtaatcggcagctctctgcccgggtacaggtatttatcgactgggtgacggcgctgatgaagcctcccctggcgcagcaggcatccggaaggctaaaataa

SEQ ID NO: 270395 - DNA, 762 bp, Klebsiella pneumoniae
atgaacaatagcgcaaaaatcgccctggtgacaggcggcagccgcggcctgggacgcgcgaccgtcgaagcgctggcacagcgcggcgtaaatgtagtactgacctacaaaacgcgtcttgccgaggcgaacgaggtggttacacgagttgaagcactgggcgcccgggcgatcgcgttgcctttcagcgccggcgaaatcgacacctttgacgcatttgttagcgcttttcagggcgcgctgacggagctgggcgccgataaatttgattatctggtcaataatgccggcaacgccagcggcatgggatttcttaacgccacggaagcggaattcgatgcgctgtatcgcatccacgtgaagagcgttttcttcctcagccaaaaactattgccgctgctggccgatggcgggcgaatagtgaatgtctcgtccggcctcacccgcatcgtgatggcgaaccgggcgccctatgcgatcatgaaatccgcggtggaaaccctgactcgctatatggcgtttgagctgggcagtcgcgggatcacggtgaactgcgtggcgcccggcgccatcgccaccgatttcagcggcggggtggtgcgggataacccgcaggtcgctcaggcggtggcgaatatgacggcgctgggccgacctggcctgccagaggatatcgggccgatgatcgcctcgctgttatccgatgatcatcgctgggtgaatgcccagcgagttgaagtgtccggtggaatgcgcatctga

SEQ ID NO: 270396 - DNA, 1533 bp, Klebsiella pneumoniae
atggattttgaaaatgaattgaccagtaagatccttgatcccattcacggcactattcgtttgacgacactcgagattgcctttatcaatcaccccctgttccagcgcttacgcaacattaaacagaactcttttttatataaggtgtttccctctgcggtgcacagccgcttcgaacactctctcggggtgctgcatttatcaagtgaaatactcaataatttacgcctgaatgcgatacggtatcaaaagaaatatgatgatggccatgtgtttggtcatatcgatcagataccaaaacacaacattcaggagttgagactcgctgccctgatgcatgacatcgggcacgggccggtatcccaccagtttgagagttttatgcctggtaagcacgaattctccgatgttctccccatagcctaccattcaatcattgatgtattaagcgagccagaacagaaagttgaacatgaacagctttcgctgttgttcagcctgatgatttatcatgatctgagaaaacaaggtaaggtcgatgacgaaataaatatcgaaaatgtgttaaaaatcatcgaaaaaagatacggtgaccaacagatcattgaggaaattaatggaaaggcaacagatatcctgccgttaatgacctcgatcatctcttcctgtccgatcgatgccgaccggatggattacttgctcagagatggctatttctccggcgtcaagtgtggcatctacgattacaatcgcttgtttatgtcaattgtcccggtcgaggaacagggaaaattgtaccttgcttacaaagagagtgggattgattcgatcgctgagtttattggggcgcgctccagccttttttcgcaggtatattaccataaaacaaaccgcgcctttgcgacgatgttgagcacattatgtgagattatgcaaagcaaggatccacaaaatgtcattatcgctgacgttaccgaccgtatcgttgaccatagcgatgaaagcttcatcgacgcgctgaaggatttttatctggcgtgcagtgatgattattttttgaatgacaaggttggtgaatggatagatatcagcgataccgaggcggttaataaaaaaatacttgatgacattattaaccgacacccatggtcgaaggtctatgaggccaaacactctgtgtataaagctaacatcgctgacaaggaaaataaggcgtggaagagtcaactcaccgggttattgacttctgtattacagcctcatttcaaaccacatgaatttgccgttgatattgtctccgactgcgcctttaaagacctggataaaaccgaagttaagcttttggtgaaagatcttaagaaccgctacgaaataaaaccgttaattgaatgtggtgataagttaaatcagtatcaaatcatcaaatattgcattcgggtatttgttgaccgcgatatcaaagaacgcgtaactcctaaaataatctataaaatcaatgacatagtggtcaagcagatcgcgttgctgaattga

SEQ ID NO: 270397 - DNA, 567 bp, Klebsiella pneumoniae
atgagcaagaaaatcctaatgctggtcggcgattatgccgaagattacgaaacgatggttccttttcaggcactgcagatgattggccaccaggtcgatgccgtctgcccggataaagccgctggcgactatgtcatgaccgcaatccatgactttgacggcgcccagacttatagcgaaaagccgggccatcgcttcacgctgaacgctgacttcgccgcagtaaaggccgagaactacgatgcgctagtgatccccggcggccgggcgccggagtatctgcgcctgaacgaggaggttattaaactggtacaggcattcgacgccgcgcgtaaacctatcgccgccgtctgccacggcccgcagctgctggccgccgccggtattctgcagggacggacctgcagcgcctatcccgcctgcgccccggaagtgcgtttgagcggcgggcactatgcggatattggtatcgaccaggcgcatgtggacggtaacctggttaccgcccccgcctggccggctcatccacagtggctggcgaaattcgccgccctgctggcggaataa

SEQ ID NO: 270398 - DNA, 492 bp, Klebsiella pneumoniae
atggctgatacgttccagaatgaagtccccagggcgcgcattaatctcaaattatctcttcataccggcggcgcgcaaaagaaggtcgaactgccgctgaagctgcttaccattggcgattttagtcatgggaaggaaaaccggcctttatcggaaagagaaaaaatcaacgtcaataaaaataattttaacagcgtactttcggaatttagcccggaagttaacctctcggtgccgaatacgctggccggcaatggcgaagaggagaacgtcagactgcgttttaccgacatcaaagattttgaaccggagcaggttgcccggcaaattccgcaactccgtgccatgctggcgatgcgtaatttattacgcgatctcaaatccaatctgcttgataacgccactttcagaaaagagcttgaggcaatcctgaaagatccggcgctgtcccaggaattacgcgacgaaatgagtgcgcttgccccgaaataa

SEQ ID NO: 270399 - DNA, 1545 bp, Klebsiella pneumoniae
atgtctgttaccacagaaaacgcccctgttcaggggcaaaccacgctgcaggaaaacagcgcgggcgagggcgtttacgcctcgctgtttgaaaaaattaatctcgccccggcgtctcgcctcggggatatcaacgactttctggacgatgccgcgctctccgaggcgccggcggcggaacgtctcaccgcggcgatgcaggtgtttatggaacgcatccgtcagtccggccagcgggtggaaaagctcgacaaaacgctgatcgaccaccatatcgccgagctggatttccagataagccgtcagctggacgcggtgatgcaccatcaggagtttcagcaggtcgaatccctgtggcgcggcctcaaacagctggtggacaacaccgactatcggcagaacgtcaaaacggagatcctcgacgtcgccaaagacgatctgcgccaggactttgaggacgcgccggagcttatccagagcggcctctactggcacacctataccgcggagtatgacactcccggcggcgagccgatcggctcggtgatctcggcctatgagttcgacgccagcccgcaggatgtggcgctgctgcgcaatatctcccgcgtctctgcggccgcccatatgccgtttatcggcgcagtcggcccggccttcttcctgaaagagaccatggaagaggtggctgccattaaggatatcggcaactacttcgatcgtgcggaatatatccgctggaaggcgtttcgcgaaaccgacgatgcccgctacatcggtctggtgatgccgcgcgtgctgggtcgtctgccgtacggtccggacaccgtgccggtgcgcagcttcaactatgtcgagcaggtgaaaggtccggaccacgaaaagtatctctggaccagcgcggcgttctccttcgcttccaatatggtgaagagctttgtcaataacggctggtgcgtgcaaattcgcggtccgcaggccggcggcgcggtgaaagatctgcccatccatctgtacgatctgggcaccggcaaccaggtgaaaattccttccgaggtgatgatcccggaaacgcgggagtttgagttcgccagcctgggctttatcccgctgtcgtactacaaaaatcgcgattacgcctgcttcttctcggccaactccgcgcagaaaccggcgctgtacgataccgccgacgccaccgccaacagccgtatcaacgcgcgtctgccttatatcttcctgctgtcgcgcatcgcgcactacctgaagatgatccagcgcgagaatatcggcaccaccaaggaccggcggctgctggagctggagctgaacacctgggtgcggagcctggtgacagaaatgaccgaccccggcgacgagctgcaggcctcccatccgctgcgcgatgccagcgtggtggtggaagatatcgaggataacccgggcttcttccgcgtgaagctgtacgcggtgccgcacttccaggtcgaggggatggacgtcaatctgtcgctggttagccagatgccaaaggcgaaggcgtag

SEQ ID NO: 270400 - DNA, 1344 bp, Klebsiella pneumoniae
atgatgaaaacggaacgtccgttgtggggccggggcattatggtgtcgcctcagcattttcaacagcaggctgcgtatgcagcctggactgcggaagtgattgcccggatgggtcttaaccacccctggggagtggttgaggcgaccttcgaaccagagatgctcaaactgggccgcctgcaggctcacaggctgcaggtccggttccaggatggcacgatgattgatacggacaatgccgatgcgctgccgtccgcgctgtcgctggacggcgcatccggcgaggcggtgatcgtgctggcgctgcccctgatgcaggcgaatggcggcaactgtctgaagccggaggaggtggccgaaaggccggcgcgcttccggcagcgctggcgcgatgtccgtaaccagtttggggatgatacccggcagattgccgtcatacagccggagctgaccctccgcttcgcccaccaggacaacagcgattacctgacctgtccgcttgttcgcctgcagcgggactcgcagggggcctggcttatcgacgagacgtttctcccgccgctgctgcagatccagggcagccgctggctggcgacgcagcttgaacagctgctcatccagctccgggctcgtctgacgcgcctgatggccatgcgtcgcgaaagcaatgaacggatggctgattttgccgtagccgatgtctctctgttctggttgctgaatgcgctgaacagcgccgaaccggtgctggggtactttctgcgttaccggcaaagcccgccggaacgcctctacccggagctggcgcgcctggctggtagcctgctgaccttttcgctcacccatcaggcgaatgccgtcccgatctatcagcatgaccagctgaacgcggtttttccgccgctgtttgatttactgagcgacctgctggaggcgagcctgccatcgcgggtggtggcgattgcgctggagcatgatgcccggctgcacttctggcaggcgcgtctgcacgatgcccggctgcgggaaggggctgattactacctgtcggttcgttcgtcggtaccggtcgcccaactgcaggagcagtttccgcgacagtgcaaagtgggcagtccggatcatgtcaaagccatcgtcaactcctcgcggacaggggtgcccctcacgccattgcgtcatgtgccggcggcgatcccgctgcgtctggaaaatcagtatttcagcctcgatgtgtcccaccctctggcgacggaaatgctgcagagcggcacctgtatgttttacgtcccggggatgctcggtgagcctgaacttgaactttttgcggtactacgaacgtga

SEQ ID NO: 270401 - DNA, 690 bp, Klebsiella pneumoniae
gtgaatgagcctaaacgcggcaacgccgcgtccattgatattgatgcgctgctgcagaacacctggctgcaggttatcagcctgcgccacggcccgcagttccgcgatgaggaagggtacacgctatggcagcgctgtatcgctgatgtcgagcgcgtgcaacatgagctgaaggcgagcgggcttgatgacgccagctgtcagcatattctcaccgcccagtgcgcgctgctcgatgaagccgtgaaaggtcgcggcgtggaggatgaggcctgcctgcagtggtatgacattccgctgcaggggcacttcctcggcaccatggacgccggcgacaccctgtgcgagcggatgcgtgatgtgttgcgtgaaccggcgcccaacctggccgtggtcacctgttttcagcgggtgatgctgctgggttttattggcagctttcgctccctccacgaccccgagcgcctgaagctggtcaacgcgctcggtgagcgtgttcctccttttcagtgcccggctaccgctcccgtactggtagagagtcgcgccggtctggggataagcggctggctggccccatggccggtacgtattggcctgagcgtggtagtggtactcgccctgtggtgggggctcaaccactggctcgatcacctgctgctgaccttgttaccgggggaggtgaaatga

SEQ ID NO: 270402 - DNA, 1707 bp, Klebsiella pneumoniae
atgagccccgcgcagcagcgtgggctggcgctgtgggccagtctgctgagtgcgctggtgtgcctgctatttttgccggttccccgctggggggcgtggctcattctgctggtcacgctggccctgatcatcgggatctggcgcatcgccagtcgtcgtaccggacgtaacgtcgcatcaaccctggcccctctcccggagggcgcttatcgccagccggtggtcctcgtttgcggcgacctgccgtgtgtctggccgccagcgtcaccggtgcgagtggtcaaacagggctgctggatccgcgtggaaaagacggaggagctgcagcaggtcgcgcgccaggtattgagccagcggccggaatgggggcctcagctgtcggtgctgctctgcgtctgcccgcagcggcatgcgcaaagcgatgcgctgaccagcgctctgctggccctgcgctggcaactcagccagctgcgccagcagacggggtatgccgtaccgctggcgctgcaggggcaggtgggcagcgcgatgagtcgcgacctgttgtggcaggcggcgataccgggtgaagcggtgaaagtctggcagccctcctgcgccccctgttccgtaccggcctgggtacgcgccggcggggcggccgcgctggagcagcaggtgctgatgaacagcctgatgggctggtctgaacagtacgtccatgccgtgttgacggaagagaataccgacctgccacctctgacccctgcggccgtgctgtggggcctcgggccctcgctgcctggaagtctggcatcgtcggcctggacgacgtggttatcccgacatagcggcctgtcgcgggtagctggctggcagccagatgagagcgacaccggggacgcttcagctttgccggaattcatcctgccgcagttaccggcgggacggggactcacgccacgaggcagggcctggcgcgcggcgctcgcggttttcaccctcgcggctgtcgccgcgctgctcagcagtggctggaataatcgacaactgctgcagcgcgtgggcgtcgatattgcccgttatgagcggattgcgatggatgattatcgaccaaaagccagcgctgtcagggtgctgcgtgaagatgccgcgctgcttgatagctgggcgcgtaacggcgtcccgctgcgcctgagtctgggcttgtatcacggggagcagattcgcctgccgttgctggaggcgattcgcggttacgtgccgcctccgccgccgcccaggccggtgcagcgcgtcgcgccggatgtcatccgccttgacagcatgtcgctattcgataccgggaaatgggtactgaagcctggttcgacaaagcggctggtcagctcgctgatggacattaaggccaggcccgggtggctgatcgtggtggcgggtcacaccgacagcgtgggtgaggaaaaagccaaccagctattgtcgctgaaacgtgcggaatcggtccgcgactggatgcgcgataccggcgacgtgccggacagctgctttgccgttcagggctatggcgaaagccgaccaattgcaacaaacgatacgccggaaggccgtgcgctgaaccgtcgtgtcgaaatcagtctggtgccgcaggtagacgcctgccggttaccggaccaaccctctgcgtcatcccaggatgatggcgcttcactacacaatggagagtaa

SEQ ID NO: 270403 - DNA, 492 bp, Klebsiella pneumoniae; identical to SEQ ID NO: 214688

SEQ ID NO: 270404 - DNA, 2655 bp, Klebsiella pneumoniae
atggaaaatccagccaacctgttacgccgtcttaatccctgctgtgcccgcgcaatggagggggcggcctccctgtgccagacccgggcgcatgccgagatcctgcccgagcactggctgcttaagctgctggaacagggggaaggcgatctgacggtgctggcgcggcgctatgaatgggatatggatgcgctgtgggaggatctgctgaactggctggataaacagccgcgctcggtacgtcatcgtccccagctctctgaccataccctgaggctgatgcaggaggcctggctgattgcctcgctcagcggcgaagcgcagatccgcagtgttcacctgctgatggcgctggttgaaaaacagaatctgatccagtgcgatggcctgtggccgctgttaacgctgggccagcgtcagctggaacgcctgcgccccttgcttgatgcccagtccgacgaacgtccgccagcgcagcaggaagcggcgctggcgcagccccatggcggggacgtggaatttgtggggcgtcccgcgggcagcgaactgaaagcggatgggctcaacccggcgctgcagaacgcgctggacaaattcactctcgacgtcaccgccaaagccagagacggcctgattgacccggtgttcggacgtgacacggaaatccgccagatggtggatattctctcccgtcggcgaaaaaacaacccgatcctcgtcggtgagccgggcgtgggcaagaccgctctggtggaaggcctggcgctgcgcattgccgaaggcaacgtccccgacgcgctgaagccggtgtcggtgcgcacccttgacctcggtctgctgcaggccggcgccggggtcaaaggcgagttcgagcagcggctgaaaaatatcattgaggcggtacagcagtcgccttcgccggtgctactgtttatcgacgaggcgcacacgatcatcggcgcgggtaatcaggcgggcggcgcggatgccgccaacctgttgaagccggcgctggcccggggcgagctgcggaccatcgccgccaccacctggtctgaatacaagcagtacttcgagcgcgacgccgcgctggagcgccgctttcagatggtcaaggtggatgagccggacgacgacaccgcctgcctgatgctgcgcggcctgaagtcccgctatgccgaccaccacggcgtgcatatcacggatgatgcggtgcgcgccgccgtgacgctgtcacgacgctatctcaccggccgccagctgccggacaaggcagtggatttactcgacaccgcttccgcccgcctgcgtatgagtttggataccgtgcctcagccgctgacccgcatgaaggcgcagctcaccgcgctggcaatggagaagcaggcgctgctggaagatattgcgctgggcaacagcgcccgcggcgatcggctggcggccattgagcaggaggagatccgccttattctggcgctggatacccttgaaactcagtatggtcaggagctgcagctgacggaagcgctgctcgcctgtcgccgcgatatctcccgccaggcggaaattagcgatctacaaaccgcgcttatcgccgtccagcagggcaatccgctgctcgggctggacgtcgacgtccgcaccgtggcgacggtgattgccgactggaccggcgtgccgctctcctcgctaatgaaagatgagcagacggagctgctgagtctggaagagagtctcggcaaacgggtggttggccaggaggcggccctgagcgctattgcccggcgcctgcgcgccgcgaaaaccggcctgacgccggagaacggtccgcaaggggtgttcctgctggtcgggccgagcggcaccggcaaaacggaaacggcgctcgccctggccgatgcgctgttcggcggcgagaaagcgctgatcaccatcaatctctccgagtaccaggagccgcacaccgtcagccagctgaagggttctccgcccggctacgtcggctacggccagggcgggatcctgaccgaggcggtgcgcaaacgcccctacagcgtggtgctgctcgatgaggtggaaaaggcccatcgcgatgtgatgaacctgttctaccaggtcttcgaccggggggtaatgcgcgacggcgaggggcgtgaaatcgactttcgcaacaccgtgatcctgatgaccgccaacctcggtagcgacctcctgatgcagctgctggatgaacagccgcaggccagcgaatcagacctgcacgagctgctgcgcccggtgctgcgcggccacttccagccggcgctgctggcccgcttccagacggtgatttaccgtccgctgccggcgggagcgctgcgcgccattgtcggcatgaagctcgggcaggtaagtcagcgtctggcttgccattacggaatcaccaccaccctcagcgagagcctgttcgacgcgctaaccgaggcctgcctgctgccggataccggcgcccgcaacgtcgacagtctgctgaatcagcagatcctgccggcgctgagtcagcagctattgagccatatggcggcggggcagaaaccgcgccaggtgacgctggggtatcacgaagaggaaggcgtcgtgatggcgtttgacgagggggcaatcgccgatgagtag

SEQ ID NO: 270405 - DNA, 2379 bp, Klebsiella pneumoniae
atgagtagcgtgaaatcgttgttgttcagccacaaccaccacctgctttcggtgaagggatgtgaagccgggcttgatgtgctggccttcgagggcgatgaagccctgagccagccgttccgctaccgtattgaattcaccagcgcagaccatgccatcagcaaagagatgatgctgatgaaggcagcctccctgacgctgcaggcgccggtggctcagggcttcggcatcaatgttcagcaacccgtgcgggtgatccagggcgtggtgacggggtttgaacggctcagtacctccagggatgaaacgcactacgcgctgacgcttcagccgcgcctggcgctgcttaaccgctcgcaccagaacgccatttaccaggaccagtccgttccgcagattgtggaaaaaatcctccgcgagcgccacggcctgcgcggtcaggattttctgttctcgctgacaaaaacgtatccgcgccgcgagcaggtgatgcagtacggcgaggatgacctgcgctttatcacccggctgctgggtgaggtggggatctggtttcggtttaccgccgacacgcggctgcacatcgacgtcgctgagttctgcgacagtcagcagggctatgagaaggggctgacgttgccttcggtcccgccgtcagggcagcagtcggccggggtggacgcggtgtgggagatggcatgccgccaccgcgtcgtggagcagcaggtcagtacccgcgactacaactaccgcgaggcgacggcggacatgaacgcgcaggtggatgtcacccgcggggagaccaccacctttggtgaggcttaccactggggagataactacctgaccgcggggaatgtccatgaccgccatccggcgccggagtccggggcgttttacgcccggcttcgtcatgagcgttatctgaacggccagacccggatgcaggccaccaccagctgcccgacgctctgcccgggacaggtgctgaaggtcaccggcggagaggaggtggccggggagtttgctgatggcgtgctcgtcacggcgatgcacagccacgcccggcgcgatgccgactttgcggtggagtttgccggcataccggacagcccggacgtcggctacaggcctgagcccggcgcgcgtccggtgatggccgggacgctgccggcccgcgtgaccagcacccgggaaaacgacacctacgggcatatcgacaaacacgggcgctaccgggtgaatatgttgtttgatcgggcgcgctgggaaaccgggttcgagagcctgtgggtccgtcagtcgcggccgtatgccggagacacttacggcctgcacctgccgctgctggcggggacggaggtggcgattggctttgaggatggtaaccctgactggccgtatatcgcgggcgtgctgcacgactcggcgcacggcgaccacgtcaccattcgcaatgacaaacgtaacgtcctgcgcaccccggccaacaacaaaatccgcctcgacgatgagcgcgggaaagagcatatcaagctctcgacggagtatggcggcaagagccagctgaacctcggccatctcgtggatgctgaaaagcagccgcgcggggacggttttgagctgagaaccgacagctggggagctatccgggcacagaaagggatgtttatcagcgcggacggacaggcgcaggctcaggggcaggtgctggcgatggagccggcggtcagtttgctgaaaggtgcggtgaatcaggtcacggaatggggaagccttacgcaaacccatcataatgttatcccagacaccggcccattaagcgcactgaccacaggcgccagcgatcttaaacagccgacattgctgatgtcggccccgcaggggattgccgcagtcacgccggaaacaaccctcctgcacagcggtaacgggctgtatctgcagagcctgggagaggtcaacatcaccacggcacagcgctgttctctgaatgccagccaggctatttcactgctggcgcaacaggaggggatgaggctggtctccgccaaaggtccgctgcaagtagagtcgcacggcgatattctatcgctgaccgcgctaaaagatatcacagtccagtcaacccaggggcatctgcagttgacggctaaaaatggcatcaccctgggttgcggcggcgcatatatccgtcttaccccgcagggagaggtacagatccacggaccgggggtgattagccttaaggggcagcatgatttgcaggggccggtcagcgaggagtttcccttgcctgagctaccggcatcggtgtgtaaagagtgccttaaaaaagcccaggcgctggcgcagggcttcgtgccgcgggaggcatag

SEQ ID NO: 270406 - DNA, 780 bp, Klebsiella pneumoniae
atgaccagacaatggattgaggaggtcgccggaacctgtcgggctttcggaacggattatctgcatgtcattatcgatcaggcgggggtggatttttccgttattccggcgctgaattcgctgtcagttgagtggcagtcgctttttcatggacttccggaagcatttattgtcgatgatgctccgctggtggcgcgctttacgcttgatgatcttgagcaaatgcgctggttacaggatatcagccagcaacttgccatccaggcgccgctgctcctgttctgcacatattggcccttttcggcgctagcgaactggctcacgcagtgtatggatattctgcaggaagggcgcagcggaattttacgcttttacgatacccgggtatttccgctgttgtttacgcacattctcagtgacgagcagcaagagccattgatgcgtccggccctgttttgggcgtggcaggatcttgacggccaggcgaaaggcatcaagggcagtggtctcctgccggaacgcgatgaaaaggcgccaaaaatagaactcagcgatcgccagcttgagcatctgatgtgtatcagcgatgtcatcgtcatgttgtcgcactgtgctccgcctgcgggcatgtttgactcaagacagtcactgttttcggcctgttaccagggcatggtggaggcgacacgccagggtcttcttctggatgacgctcgtgaagactgggtaatgaagaagtggcttgccgacgtaaaaaccagtgagagaccttcagaatga

SEQ ID NO: 270407 - DNA, 1425 bp, Klebsiella pneumoniae
atgagagtctctcccccttacattagaacactatctgcctcttgtttaatcatcttctctgtcgtcgccactcatgcctcggctgaagggcttcagtccgagatggatagactattcaacgaaatgagtaatacaactagaccgggtattcatgagacacaacgccgtggagttattgcgggtgggcgtgtgaccaccaaagcgcgtatttttgatgaaaacctagttagctttgtccctccatcctggaaagctgggtgtggtggcgttgatctattcggtggttctttatcgtttgtgaatgcagatcagattgttcaactgatgcgagctgtggcagcaaatgcaaagggctatgcttttcaactagctctggataatgtttttcctgatggtgccaaatggatagaaaactttcagaagaaagttcaggctttgaaccagcatttaggcaattcttgtcagttagctcagggtattgttaacgattcactaagtgcttttgacacgaaactaaagaacgatactcgtacaaaagcatcgaccaaaggtttatttgaagacatgttttctgcaacgcaggaaacggatggacaaacggcaatcaagacgctgaaagacaactcgccacaggcctaccaagagatgataggtaatattgtctggaagcaactcaaaaagaatagtgtaagttcatggttccagtacggggataacagcctgcttgaagccatgatgtctataactggtgccgttgtcattggtgatttaattaatgatccaaatcttgctggagcaaacaacagtactaatcccatcgtcaccttaccggggaatcgaattacccttggagatctcatttcaggtggctctgttaaagtttattcatgtgacagtgatacggttaactgtatttctgctggttctgagctgaagagtgttcagctcaggggtattggcaatcaaatgtcagatttacttcttggttctgattattcacctggattgatttataaatatgcaaacaatgttggggctttaagttctgccgagatagcttttgtatcaaatctccccagtagctttggctcacttttccgaaatctttccgctgtttccagtgatacagcagagcagtttgctcagcaagcacagaccatcatagcgctagatataacctacaggtttattgaggagatataccgggcaacaactattgcgttagctaacagtgataatgcctatcaacaaaaagctgttgatgtacttgatgcttctcgggctgttgtcagacaagagtatgaccaattaattgtgaggcacgggaagctaagtgatctgatggggtattacaacagcttacttgatgtcacaaagaagcagcggcttttacttgcggcccaagcatcagggaaaaaggagtaa

SEQ ID NO: 270408 - DNA, 3405 bp, Klebsiella pneumoniae
atggattttagtatttattccgtcggtgatgccgcatttctagagcaaataatgattgctgtagcgatggctacaggcaccggtgattttgaacgaatggtaagtattggccttttaattggcgctcttatcatctcatttcagtcgttattccagggagctaaatcctgggatttacatcaagtttttgcttgttggctcgtgtatgccatttcctttggagccggcgttacggtaactattgaggacgcgtacaacggacaagtgcgagtagtggataacgtacctgttggtccagccgccgctggttctataatctcaagcgttggatttggtctcacaaaactctttgaggttgcatatagccctgtcgcgagtgtgactgaatcaaagttcatggattctttagagttattatcaaagctcagaaatcacgaaatggagtcagcactatggactgtctggaatgattccctaggaggcggtgctgttgatatgaagaaaagcctgactaactacatatcagaatgcacagcaattaaattttcattaggtgagtcaaatgaggatcaaatcaacacagagaattggcgtacagctctcagatttgattcacaaatatatgggacccgattgtacctgtctccatctggcccgacagatcccagttgtacagatggctggattcagttgagccaatcctttgaaactgccttcaattctggcctttcgcaacaagctcttggctatttgttgtctaccactgatgctttgaatgctacatctgacgctttatatcgcctgcaggttacgaatgtggccgcaggtgattttataaaagccaattttctgcaacctatcgtacagcgtggctttgctcagtactacagtgatatgaatgatccgtacgcacaaatcatgctcactcaagctgagtctcagcgaaatacgcaatatgcagccgaacagtctttgtttgtaaaatcgattcaacctcttatgaccttggtagaggggtttgcctatgcgattacgcccatagccgcatttgtgatggtgctaggttctaaaggtttgctattggtcggtaagtatcttcaaatgcttatatgggtacaactttggttgccaattatgtcggtaatcaatctattcatttacataatggggcagcaggcgctcgcaaaatataccacagggaacttatcctcatttgaaggcgttgcatatgctggggccgaaattgagcgttggatagggataggtggaatgatggccgcagcaacgccagtcctatcgttgatgttagtaactggctcagtatatgccttcaatagtcttgctcaacgagtgggggcgagtgatacagtcaatgaaaaactaatgtctccagacttagtggaccgtggttctgttttgagtcaacaaccacaatttaatcaatcccggattgctggaacaatgacctctggaggtgagtcgttagttgatagtattaacttagggagtaccgtaagtaatgcccttagcagtagttctgctgctactgcacaggctcagaaaggtttcgctagccaattaagtaatagtgtgttttctggacatggttcagaacagacttattcacaactacaatcattaggacaaacgttgagagcgtctgattcaactcaggctaaaagtattttgtccgcggcgcagaactacgttactgatcgtgggataaatgcttctcacacggatgctgtggcaggagctattgctatgcgtgctagcgctggagtggatgccggaaaacttgctgctgcttttacaggaccggttggtgccgctgtaaatgccgctaatccggtatctatgaacggtagtttagatgtatctgcgcaatcgcagagtcaggatagtagacagcagcttagttctgatattgactctttatctcgcggactcggttttacaaaagatgacagttcagcattaacgagtgatttggcgcggcaagtgtctactgataaaggtcaacgttttacccagagcttaggtgaagagcagagaaagcagctcatgcaatccagttctgatcttttgtcttcgcaacaaacctaccaagagttatctcaggctcagcaaactatcgggactactagcaacaataatattatcgcgttagctgacaaagttctgaacaactggtcagccggtaagtcattgtcagatggtgttagacagtcatcgccagagacaagagattttgcgcaaagaaaagcccagcattaccaagatttaggtattgattcccagagggcaatagttggagggcagttgtttgctatgctcaattccaactctccatctgaacaagcaattgcagccggtgcaatagcaaaggccactggtggtaacagtggtattgactttaatcaacctggtcatagtgcaatgttggtaaaggatgctccgcgctatgtctcgccggttgaaaattcgagcgcactttcggcaccggaaagaatgagcaatgaacaaaagcttttagctgaatcaggcagtattggatctgaaaattctgttcgtgacgctcatgaaaagggtatccaacaacttgagcagagttatgggacaagcagaaatgaatatcttaatgaccgcttgcctgcgttaagagcacagatcatggcatccgatttggccccgtcaacatccagtgctttgtttgcaggtgctgagggcgcaggtcgttttgtacagcaagttgtgggtggcgcaggagccgccaaagaagggttcgcagagagttttgggcaatcgatgtctaagttagcccagatgactccggaacaacgagatcagtttattgaggacacaaagaaaggggacgattacgtcaagcaagagtatggtcttggaggcttcctggctgtaggtgctgcaaatctgggtagggatatcattggtgtggggatcagtggatttgaagccggtaaagaatggttaaccggtaattcagatctttcagaggcagcacagggaatgtctgttagagaaagagggatgttttttgcttcagcattagcaagtgcaagcgaggctggagctggaaaggcggctgagtttgttcagcaatatggtgacgaattcaggcagatagcaatggatactgcaagatatgattatggtttgaatagtcaggcaggagcagaattgtttgctgcatcgttgatgggcggcgattcatcgcgctctggagaactaagagaaaatctcagagaagaggttggtgataacgtattggcagataaaatggctgcgattattgaaagttctgcgggggcaggtaaagaccaagcgggcggatatttagcgcctgtatcaaggtatttgtccgtagccaaaggaggccgttaa

SEQ ID NO: 270409 - DNA, 255 bp, Klebsiella pneumoniae
atgagcaaacgagctgaatatagacgcgcaattaaagagcttaaagtgatgatattactgggggaagggagatggctaaacgaaaagccaatctcctgtggaaataaaaaatttatcgtcgatggttcggtgttgaacaatgtaatcagagagcatccggaacttaataaacacattttgataggttttttttcgtcgcctcaacggtatccgttattaagatataaagataggcagttaacgttaagtctataa

SEQ ID NO: 270410 - DNA, 291 bp, Klebsiella pneumoniae
atgaaaaaggcgctattctctttgtttttaatcgtaagtttgttctattcgtacaaacttcttggcctatggtcgctcatattttttgtagtcggagtttctctgctggcatctttaaagattggtagaagagcctatctaatcagtaattccgggagtaaaacgaacacattatctgggcgagatctgtttgcagacgtcacatacaaccctgccacaggatctccaatggtaagtgacgtagatgtatccggaagcttctatggattgaataaaaacaaaggctcctga

SEQ ID NO: 270411 - DNA, 210 bp, Klebsiella pneumoniae; identical to SEQ ID NO: 67541

SEQ ID NO: 270412 - DNA, 612 bp, Klebsiella pneumoniae; identical to SEQ ID NO: 67540

SEQ ID NO: 270413 - DNA, 534 bp, Klebsiella pneumoniae
atgagtgaatgttttacatctggttcgttatctcgctgggtaaaagcaaggcacatggcattggcgggttatatcacaaagataattatcctagagactggtttgacttataagcaagttcgcaggctgtacgctgagcttgaatattgcggatatgatgtgaaggataagaaatccaggacattccgtggtggagcgacgctgatccacagtcagacatctaaaattcaagcatcgcttttaatgcagctctattcaaatcttggaggggaaaaagttaagcgttctgtagatattagcgctctgaataaagcgtttaggatgtatcacgctatccgtaaagaagtaccaggtatgaagggaggaaaatgggagcccttcgacattacagatgcctggtgtcttgcctctgaactgcgcaatggagaagcaatgatagagcattgcgagcaatgccaatgcactttttttacgtcaattaatcagcgaacatgtgttgaatgcccattctgccgggtctcaaaagctgcctga

SEQ ID NO: 270414 - DNA, 2760 bp, Klebsiella pneumoniae
atgtccactatgccgcccatcatgacgaggtttgttgcctcgctcctatgtttaaccatctcagttcttccgatacattcttatgcgggtaatcaggaacctaacatcggagctgttggtcgtgatgccaaacaatttggtttatctattgcgaacggagttaagcaaaactctgctcaggttcaagatggtaaaatttctctaccagtcggtaatggtcaatcaacatccataaacataaatgaactgtttcctggagttcaacctggtcaaaataccgcagagtatttccctgatgcagcatctccagaggagctagaacagatatttagtgatgctgatgctatggatcagtttggtaatgaggcaaaagccaatttattccaagacgccaacagctccaatccctcaatatcaggttctgcatatcaagttctcatggatgcggccaatcgctcacgccctgatttcagtaatgacccggtattgaatctaagcaaaaagacctatgaggatatggacctcatcgcaggtggctttggggattgttctgccgaaacaaccattaatcagaatactatcaacgcccacattccagagtatgaacggtgtcagcgtgttgtagatcaaagcgcggactgtgaggttgtccatgactacgatgcctctgtggtgaagcactatgatggcccatacaacctcaagtcctgtggtgacggatgcacggagctctggattggtaaggttggggacgattactgggctggtaactgtaaaatctatgaagagtacacaagagtccaggttagtaacccggatgctatcgtttccgcaacacttgaatatgttaagtgggatgattacatgcaagtgtgggtcggtaagtccggccaagaaactaaagtgtggtctggcccagatggcaacttccctccagaaacagccggtagatgtgagctctccacgagttgggagcgaaaccctaatgttgatgtcactccctattttaagaacgtgaaagatggtgatgttgttacattcaagatccgtgtttcagtaactggtgaaggtgagggttttggccgcataaaactccgctatgacccatcgaaagccattaccaaggatgagtgggctccacagagctgcatggattcagccaaaggggttgtagatggttttgccgaaggcgagataacatgtatagatgacccgactgatgctacgggctgcacagtcatcaacggggtcaaagtttgcgaatcccaactgaaaccgtcacctttccctggcattccaaagctgtgcaaaaaggttcgagttaaagccgactatgacttttataaggggcaaatggactgctggacagatcctcaaggtgaaacacactgccctgtaaatactggtggaaatctcaacagttgccagatgtatgaggataatcctcagtgtggatttattagttctgaatgtattgatggagcagagggttcctcgggtaagtgttatgtgtttaaagatacctacgactgcggaacggacatatcaatacctactttagagaaagaaacgacgtatcaatgtggtggacccattaggtgtatgggggatgattgtctcgatataacaaagtcacaaagcactgatttcgctcgtgcatctgcattgttgaatgcagctcagttcatgactcaggatatgagttgtactggtcaaaattatgatgataaccccactggtgaagaaaatgtgatgtgttcagcttttgccggtgaggctggggaatgcaagattgctgtgggtggtgtctcagattgttgtgaaaagccgacgaatatttcgtttgctgattatctcaatttgattatggccgtgcctaagctagacggtgccgttatgggactctctgatggcagtgccgtgaaaggagcataccaagtattaagagaccccgtaatgtctggctggaccgaaataacacagccttttgcaagttatatagaaaatattagtggagcggttgatagttttctccagcctgttcaacagtttgcccaggagactattggcgcattaaaggagcaaattaccaagctgacttctgaagctctaggaaatgcttctgcgacgggagccgctggcgtacctgctggggctcctgaatcaatgactgaacaaatcctcggccaacaaggtgccgccatgctaagcaccgttatgactgtttacacagtctatgtagtgtcgatggtcatgatccaaatgatttggaagtgcgaggaaaaggagttcaccatgaatgctaaaagagcactaaatagctgcacatacgttggatcttactgcaagtccaaagtactgggagcatgtgtcgaggagcgagagtcctattgctgtttcaactcgccactctctcgaatcatccaagagcaagtgcggccacaacttggccttaactttggtgatgcgcgcacacctcaatgcggcggaattccattggatcgaatagcggatattgattggagtaaggttaacctagacgagtggttgggtatacttcagcaaaatggaaaacttcctgatcccgcatcgttaaacttggatgctttaacgggagctggaagtgattttaatattgatggtactcgacaagacgcctcagaacgtattatggagcggctggaagggattaatgtggacaaaattagaaacgacaaagcgcgtgaaatctttcctgacttggatggcaatggtggttga

SEQ ID NO: 270415 - DNA, 228 bp, Klebsiella pneumoniae; identical to SEQ ID NO: 67537

SEQ ID NO: 270416 - DNA, 954 bp, Klebsiella pneumoniae
atgaagccatttagccaactacttgctcagtatcaggcggatatcgaagtagaaaatagtgataaatcacaaggcttgagtcgggctgagtctgaattaatagatgcctcagtaaggattaaatcagatccaccctcgcccaatgatttcacttttatgcactcaatcatgtgccaagtcggtttgcctcgttcaagagtaaatggatctgagtttgagaggcgttgtggtgctgctggtctatacatccgagcgggtaaaatttgggatggtaagcagtttctccaacagcctgttccgtatggtcccatgccaaggcttgtaatggcatatctgaatactcaagcgttgcgttcaaaatcacccgagattgatgtcggcaatagcgccagtgctttcctcaaacaactgggcaaggagtcatcaggaggaaaaaatgggagctatacaaacttccgtaaacagcttttggcgttatctgcttgtagtattacccttggttttagtaccgctgataaagcgttcacttacgatggtaagcccatccaaaaatttgaggcttggattggtaacagcgacaatcaaggtgctttatggcctgctgttattacattttcacacgagtattttactacgctaagcgaacatgctgtaccgcttgatttaagggctctaaatcagcttaatagcagtgctcttgcgatggatatttatgccatgctttcggatcgtttacatcgaattagcggtaggcctgtcgtattgtactggcgtaatttgcgcgagcagtttggtcaagaatataccggagacgacgctgacaggaactttaagaaggtattccttcctgctctaaagagagtccttactgtttatccggatgcaaaagttaagaaagtgactggcggaattctgatgatgtccagccccccaccgattccataccgtaattga

SEQ ID NO: 270417 - DNA, 1218 bp, Klebsiella pneumoniae
atgaaggtatcagtaaacaagcgtaaccctaactcgaaggggctccagcaacttaggctagtgtactattacggagttgttgaaggtgaggatggcaaaaaacgagcaaagcgcgactacgaacctttagaactctatctctacgagaacccaaagacacaagcagagcgtcagcacaataaagaaatgttgcgtcaggctgaggctgcgcggtcagcaaggctcgttgaatctcacagtaataagttccaactggaagacagagtaaaacttgcttcgagcttttacgattactacgacaagttaactgccagtaaagagtctggaagctcttcaaactattctatttggatctcagcaggtaaacatcttcggagctatcacggaagagcagagctcacttttgaagaaattgataaaaaattcctagaagggtttaggaaataccttttagaggaaccactaacgaaatcgcaatcaaaacttgcgaaaaacacagcctctagttacttcaacaaagtcagagccgcactaaatgaagcgttccgggaaggcatcatcagggataacccagtccagcgagtaaaaagtgtcaaagcagaaaatacccagcgaacctacctcactctggatgaagttcgagctatgacaaaagcggaatgtcgctatgacgtacttaaacgagcatttctttttagttgcacaactggcttgagatggagcgatattcagaagcttacttggaaagaaatagaagagtttcaggatggacactacagaattattttcaaacaagctaaattactgaatgccggaaacagcttagtctacctggatctaccagactcagccgtcaagcttatgggagagcgccaagataaagcggagcgagtatttaaagggttaaaatatagcagttacaccaacgttgctttgctacactgggcaatgctagcaggcgttcaaaaacatgttactttccacgtaggcagacatacatttgctgtggcccagcttaaccgtggggttgatatctattctctctctcgccttcttggacactcagaattgagaacaacggaaatttatgctgatatccttgaaagtcgccgggtaacagcaatgagaggctttccagatatttttgaagataaagtacaagaatctggaacttgctgtcctcactgcggaaagtccgtattgaataaaacactttaa

SEQ ID NO: 270418 - DNA, 252 bp, Klebsiella pneumoniae; identical to SEQ ID NO: 15676

SEQ ID NO: 270419 - DNA, 291 bp, Klebsiella pneumoniae
atggctaacctggatacgatgaaaccagaggggccatttgtcctcataacgtttgacggtgagggttttctttttgatgagcgtcacgatgtcgtaatcatcaacggtaagccgaagcaactggacgttaaacgaaattattttgagtccgatcttggtgagggcaaggccaaatactggacgttaaacatcaatgaggcgcataagttcgacacgatagatgaggcgacagcgcagctttgtaagcttaaaaatccgcatcagattaaggtgcggaagctgatagggtga

SEQ ID NO: 270420 - DNA, 327 bp, Klebsiella pneumoniae
atgtcgactactgaatttttgaaaacgctggattatgagcaactgaagttctgccgcgatgagtgcaatgaccgcatgcgagccatccaggaaggaaagaaaaaggttgcctgggctgtcactgatggggggatcaacttcggctggtttcgcactgaggactacctgaaagcagtggagttattggtgataaaggcggcggaacgttgggaacaagctgacaaggaaaacccggagacgaagtatgagcttaaccttgctattgatggccagcgcctgccggtgtctgagtatgaagcgttatttgccgatggccagtgggggtga

SEQ ID NO: 270421 - DNA, 780 bp, Klebsiella pneumoniae; identical to SEQ ID NO: 230646

SEQ ID NO: 270422 - DNA, 165 bp, Klebsiella pneumoniae
atgttcaagttcaagttcgcggcgatctgccgtaccgataaaaaatcccatattcatcatctgtccaccatcgcctcatccgagcgtgaagcccgtcgtcagttcgccagccgttttgttctcgttctgtcagcccgtatccgggttagcggggtggccgcatga

SEQ ID NO: 270423 - DNA, 525 bp, Klebsiella pneumoniae
atggaagggaaggggctgttcaaatattcattaatttcattgctattagggataaccccaataataataatattttttattcatttcagcaatgaaagctcacacatcatttcatacctttttgatattgcaaatggatatcaaagggatttttcagaacaatatttagccgtgagcactatagcttctgcatatactaaaaccgcaccatttttcgtcatattaatgtatataatttgctggaacaagtttgatataaaaaccatcaaactcgatttgaagcgatggcttaaacttctgcctggtgtactccttttaacggcaggagcatactatttaacatatgtaggtgtggaaaatatgtctgatagtatgtatcgcattaaaagaattattgctgacaatgagtgctttctattaatttactacattcttttatttctaactaattatttttttatttggttgcttttgatttatttatatcttttaaaaggtctgcctttttttcaaaagcggagataa

SEQ ID NO: 270424 - DNA, 327 bp, Klebsiella pneumoniae; identical to SEQ ID NO: 270420

SEQ ID NO: 270425 - DNA, 291 bp, Klebsiella pneumoniae; identical to SEQ ID NO: 270419

SEQ ID NO: 270426 - DNA, 333 bp, Klebsiella pneumoniae
atgacagatatcacccggctgattaacagcattaagcgccgcacgtcctcagcaagagagcttggctacgatgtcctgttcgtggcactcgatgatttggatgtcctggctgattcgctggagacggcgctgcgtgcaaacgccgcccaggccgctcacatcgagcagctgcaggacataaaacaccagctggaatcaaagttagccaagccggtgcagttgccaaaaacaaacggctactggactgagccagaacaggcgtatgaagaagctattacgttcgctaagaggcaggttcgtctggctggattccggtgtgagggagatgagtag

SEQ ID NO: 270427 - DNA, 294 bp, Klebsiella pneumoniae; identical to SEQ ID NO: 266485

SEQ ID NO: 270428 - DNA, 342 bp, Klebsiella pneumoniae
atgactaaatcaaccataaccagagagcgcttagaacaactcgctgataacaacactatctgcaaagtttcatgggatgagcggatcgaactagcacaaattgcgctggccgcgttggacagtgagccggtggcagaggtcaccggcgaagagcaccggcagctgcgtgacctggtcatgatggtgaagatgctctgcagaacggtgagaaagtacaacccggaaagccagcaggcggcaaatttcaccgcctatctccaaaaggaaggtctgatatcggcagcggattgtctgcgcgaaaccgatccgctggatactgagtcggaggatcgccgtggctaa

SEQ ID NO: 270429 - DNA, 204 bp, Klebsiella pneumoniae; identical to SEQ ID NO: 267227

SEQ ID NO: 270430 - DNA, 309 bp, Klebsiella pneumoniae; identical to SEQ ID NO: 180595

SEQ ID NO: 270431 - DNA, 231 bp, Klebsiella pneumoniae; identical to SEQ ID NO: 200102

SEQ ID NO: 270432 - DNA, 462 bp, Klebsiella pneumoniae; identical to SEQ ID NO: 216315

SEQ ID NO: 270433 - DNA, 567 bp, Klebsiella pneumoniae
atggcatggtggaaagaccttagcaaagaaactatatcaagtgttattgttgcacttgtaactggcggtggtgtcttttggctatggaaatacgttaagcagttcttccattggcttatgaacatcctgaaattaccggtaacaatgcccttatggatgctcctcatcttatcaatcttactactagtaattttacctactgttggatttttaatgcgccgtcgtattgcctcgaaagctacaggaaagaagaagaactttttggattatacatcggatactatttttgaaatgatagtttcatgggaatggtataaaaggtatggggatagaggtcattctttaaataatcttcaaatgagatgtccaaaatgtggtggtcttctaagtgaacactccagtgtggattactataactattacgcaccatatcctattgttaaatgtaatttcaaaggatgtggttggagaataacttcagatatggagcgattaagctatggagagatgagggccagattgacagaagagatagatcgacgttgttttcagcagtttggtagttaa

SEQ ID NO: 270434 - DNA, 777 bp, Klebsiella pneumoniae
atgataggaatctgtaagctatgccttgaagtaaaaacattaatggaatcacatagtattccaaggagctatttcaaaaggttaaagaaagatagtcctcaactaatgattatacaaaaaggtagtaagcctaagctagaaaatattgatccaaaggaaccactgttgtgtttcgaatgcgagcaatttattagtaatgaatacgaatcctatggtactagactgcttagaaatcctcataatatacgtaaaaactcagaccacataattgttaactctttcaattacaaacggttctacctattcttacttagtattctctggcgagcgtccatttctaaaaacgttcattattcctcggttaatggtgttcctgagcttgatgatttaatgcgacattgcatccagaaaaaagaagtaagaataaataaattaagtaatttgaaaattgataactttattaggatctgtgtgtttaggctcattgatagtaccaacaacattcctgataatgtaataaaagcagtgctaagtaattttgcatttaggcgagttgagcaagtcaatggagtatcctggttctttattgctgagggttttgctattttctatattttgtcatctggaaaagacatacacgatgttcgtagactgaggttggtatctcagttaactagcgggagtcatcaaaaaatttataagatagatatacccaaggatcctctctttgcagggatatttaatgatttaatttcctctgctaaagaaaattcataa

SEQ ID NO: 270435 - DNA, 801 bp, Klebsiella pneumoniae
atgctcgcaggctgtgctacaaccccaaaatcctataattcagagatgtccagagcgttaaacttggcaagagctgggggtatttatgaccaagatctgagagactcagaagatgggcggaactcatatagacagtctctactgatgaaagcgctaaatgtcacaagcctggccacatcgcttgatgctccattaagaggattgaacggtcagcaaactctcatgtttaacactgcaagcattcttacatcaccggataacccatccgctaggccaagtttgatggcttggatgcctgcatcaatggctaaatcctcagaagatgcttatagcaactacataaacctaattgataatgccgttgcggtagccgcgaaatctatgaacctggatttaactaaaatagtggaaagtacagcgcctaagattgatggaaatcccttaattatgtgggcagtaacggctccacaatttggctgtgatggctcaaactgcgtaattgcatacaacgttacaatgcctaatccgtggaaaacaccagcctttgtgggcagtggtaatattgatagctttaatctggccgctaataacacgaccaaatattctcgattgattttctcccaggtcagcgacgtgaaatcatttccaatggacgatttttacaaaagtacgagccgagcgctgccggagtgggcagtcatgtatttcccgcccaatagtgtgttccaggatggcaaagctttaccatatccagttatctatgaaaaaggccagcaattgctatttaggaaggcacaatga

SEQ ID NO: 270436 - DNA, 396 bp, Klebsiella pneumoniae
atgagtctgtggcatgaagaactggaactggctttgctaaatctggaggattcaaaagccggttgtgatgtgatgacttacgtgatcagccacattctagccaaatcagacattccacatcagtgcagagtagggtttgttgaaacagtgcatagcaagactcaaatcaatccgcattgctggatagagctaaagaatggatggggtatagatctgactttacgccggtggttgggtgacgaggaccgatggccgcatggagtatttaggctttcagactatccacaggttcaattctggggaacgcccctgtttgccccgaagctagacgatgaggaaattaacgctatgtccgatcatctaattgagacagtaaaaataccagtttgttgctga

SEQ ID NO: 270437 - DNA, 270 bp, Klebsiella pneumoniae
atgttgggacaaaatcaaacagagatccatcaattcgatgtgtgtggccgcgtgtattatcgtggggttaactacactgaaaaagaaggtgagttggctgttgaaacagtagaagctacttctcatgatgaagctgaagcgctgtttaaaagcctgcaggatgagtatgctcgtgagtgtaatcggactgttgagcgcatcgatatcactttcactattgacttgacgatagctgaaagcgacaacgatgaaccgtacttagtgatgtaa

SEQ ID NO: 270438 - DNA, 966 bp, Klebsiella pneumoniae
atgcgttcagagcggactaatccggattcacggaattttggtcttcgtagtcgagatataaacaaggcagccctgaacgctctcaaggaggggatgaagagttttcagtccatagccactattcatgaccgatggagcgtttttagcgcttggattaagtccgaacagggcataaaggacatgcgggacatagaaaaggctcatttggtcgcttatgcggcgcaccttaatgatcgctacgagcggggagaaattgcgccatccacggcgcagaactacctgagcgcagtgaatcgggtgatggagattgcgcgtggcgaccgacaggtacgtgtagatcctgtctccgaggggggacttccaaagcgctcaggtatcgccactggcgaccgaagtgtttcggaagcttcccataatgccgcaatgggggcagcctccgagcgccttggggctttgctggaactacagcgtaatttcggtctgcggttcgaggaatcggccaagctggatgcagccagagcactaagagaggccgagaaaactggctccgtgagcataaaagatggcaccaaaggtggccgggcgcgcactgttccgatcaccagtgatgctcaaattacggcactccagcgagccgccgccatacaggatggccgcagcatgatccccgcagagaagaattatcgtgagtttcggcaagaagcctaccgggagatcggccgccatccggtgaacttccatggcgaaaggcaccactacgctcaaacgcgctacaaaactttgatgcgtgctgattgcccggtaaaagcaggtgttaaacatgggcgagagcactatgaatatttagccaaagaacttggagtatcaatagctcacgccaaaatgctggacaaagaaatcagatctgaagtggctttggaattgggtcatggtcgcatcgatgtgacaaatagttatttggggtaa

SEQ ID NO: 270439 - DNA, 1662 bp, Klebsiella pneumoniae
gtgattgctgtagatgcatggttgccttctgatgggctaacacttgaacccaatgctctgctggctgcgaaggaacaagcgcgctgtcttgcactgactgcggggccgggagcgggcaagacggaaatgcttgcacagcgagctgacttcctcctccgaaccggaacctgccgttatccgaagagaatactcgctatttctttcaaagttgacgccagcaaaaacttgaaggagcgaatccagcgacgctgtggacaagaattggcttcccgttttgatagctacacatttcatgcgtttgcaaagcgtattattgatcgcttccgagtagtgcttactggtaatgatgctctggatacggattattcgattggcgaaagaaaagtcacaagaaggcaaattacatttcatgatcttgtgccgctagcaattcaaattctcaaggcctctgttgtcgcaagaaatgccatacgccaaacttacagcgatgttttcttggatgaattccaagactgcacggatcagcaatatgaactcgttaaggtagctttccaaagtacaagcattcgtcttaccgctgtcggtgacaccaagcagaaaatcatgggatgggcaggagctttggacggaattttccaaacgttcgctaaggatttttcagccgtaccactaaacatgtaccgaaactttcgttcaaaaccacgcctgcttcggatgcagaacgagataattcgtgtgcttgatccagcttccgttatgccagatcaccaacttgctggtgaggagggagaggttttcgcgtggcaattcgagaatgcacagggggaagctgagtatttggccgatttgattgccgggtggataagaaatgaaaaggttccgttgtccgaaatcgccgtattagtgtccaaacaactagatctttatgccaaccacttgatgacggcattggaagttaggggaataccgtaccggaacgagcaggagatgcaggatattactgttgaacctgccgcgaggctcgttgttgactatttgtcctgcctctacggccagcgagagcccaaagcttgggttcggcttatgaatcaattgattccctttgctgatgatgaggtgcagtctagcgctaggcaaagcttccaacgcttcttcaaggagcagagaaaaatcatcaccatgaccgagctgttggatgagccgttttcgggatggtgggattctgtgtgtagctttctgaagaaaataggaatggagactcttgttgctctctcgcccgactatgagtcacatgctaggttaggtgaagttgtgagagataccaaagcgcgcattgaagaattgcttgaacttacccccgatttgcctcaagccttgactcgtttctctgatgatcaggctgtgcgtattctgactatccataagagcaaaggattggagttcgactcaacgataattatggccgttgagaacgaaatattctttggggatcaagatgctaatcggtgtgctttctttgttggtgtatcccgtgccaagcgtcggcttgttgttacatacgcaaaagagcgagataagcctgataattattcagggatatggcgaacgaatcgctctgctcagttagaatattttggatatacatctccttttgttaagtga

SEQ ID NO: 270440 - DNA, 1926 bp, Klebsiella pneumoniae
atgaaactgcacagtattcggatatcaaattttcaaagttttggtgctgaaccaatagaactgacactggaaaatattacctatctgattggccccaacgggtcaggcaagactgctgcactccaggctttgtgccgactgtttgcatttgatccatcattacgccgtattcagcgctcagacttccatgtcccgcacgatgaacaagaagcgcccgaagaaaggcagttatggattgaggcggacttcgtttttcccgagttggagggtgaagaagataactcaagcgttgctccccatttcagtcacatgcgccttgatgaccctgacggaattcctcgggtacggtatcgcctaagtgccactatgggcctagatggagatattgatgaagctttcgtgtatgtgcttgaagttggtccggacggctcacctataaatcctgaaacagttcctcgatctgaccgaaatcacatacaagtccactatctgccagccaggagagatcctactgaccacatagcatacggaacgagtgcgctgcttggccgcttgctacgtgccgtgaactgggaaaatgaacgagaaaaggtcaaagggttcaccgaccagattagtgagagcctggctgctaattcatcggttaatgcttttagctcccacctgaagaaaatatggggcaccctccataaaggcagctactttacagatcccaagattacttttgtggcatctgagatcgaggcgttgcttcgtcatttgtccgtatcattctcgcctggacatgatgacaatcttgtcgatttttctcgactcagtgacggtcagaagtcgatgctctatctatcgttggttctctcatctcaagctgttggtcgtgctgtccttgccggtgaggacgactcttttgaccctgaaaagttgcgtccgccagtctttactttaatagcccttgaggaaccagagaacagcctctcacctcactatttgggaagaattgttaacgctcttaactcaatgacgagtaacgaggatgctcaggccctagtcgctacgcatgctccgtcgatgttgcgacgtgtcgatccggaacatattcgatatcttcgacttactgaaacccggcaatcaagaattaagaaaatccaattacccgctaaaaccgatgaagcgcacaaatttgtacgtgaggctgtccaggcatttcctgagatctacttctctcgtttgattgtgttgggtgaaggggatagcgaagaaattgtattaccgcgccttttccaagcaaagggtgcgccagttgatgaatcagcggttacgattgctccgcttggaggtaggcatgtaaaccatttttggcgtctgttatccgaactgcaaatcccatttttgactcttctagatttagatgtgggcagatatcaagcgggctggggaagaataaagtatgtaaataaccaacttggtttgtatcaacctgaaaaggtactaccaactactttttctttatcagattggaatgatgacaaagtacctgttcgtacacatcatttctttgaaaacggcactaagagtgtatttttagagctggaaacacgtggtgtttttttctcatttccaatggatttagatttttcaatgcttcttgctttccctaatgcgtacggtgttcagcaggaggtttcagatgagtctacgattaaagccgttttgggtaagagccatcatggctcataccaatacagcggagacgagttaaatcttttctctacgtatcacaagctttttaaactgggtagtaagcccgctgcgcatatagatgctcttgctcaactgagcaacgaggaattgctggcgaacatgccaggatcatttggacgacttgcagatgccgtgatagccaagcttgcggagctgcccgagtga

SEQ ID NO: 270441 - DNA, 2544 bp, Klebsiella pneumoniae
atggtttctaaaaggaagcatttagatgtggctcggtttttcattgacgaaccttttaaatctaaaaggcctggtcgaaattcaggtgttcctggtcgagatagaaaccaacatggaagttatttggctggtttatatcagaatttaataaatgcttacgaacaaaaaagaaaacaacaaattaatcctatcacagatgattctggtatttatgttgaaattatcggagttgatggatgcaagctcccattagatagtttagataacagagattttaaactctgttcttgccaaatgagaggagatagagagttcgcgttaatttttatacctgaagataaacgtgatacattccttaaaaaaatacaacagtatttagaccctcagaaagatggaaaaccaaataaggaaggcgtttcttttcctcgaaatcatacgttaatagatagtatttccgagatcaggcttgcaaatttggagtcattttggacagatcctatagatttatttcctgcagataggaatcttgatgtctggtgggaattatggttgaaaagtaacaccgtagacgacgttaaaaaaatagcagagtctcttgctgaaagagttgatggtcgcttaggaaacacatctctttcatttttcaattcttttgttgttcttattaaagcctcagttaataaacttgagaaagctcctgaattaatttcaaatttagaagaaattcggaaagcgaaggagacaccagttcccatcattagctcttcaccaaaagagcaacaagagtggctgaagagtatttctgatcgagtatctctttcagataatataacaaccagtgtgtcaatactggatactggtattaattacaataacatgctgttaagtaaagtgtgctgtgatgatttttctgtttcttgggatcctgattggcccaaatacgatcaatatcaagcactagcgccgtttaatgagcatggttctttgcaggcaggacttgcagcatttgggaatttgatggatgtcgtattaggaaatagcgctatccaactatcacatgttattgagtcagcaagaattttacctccgcaaggcaacaatgatccctttttatatggggctataacggtaggaacagcatccaaacttgaagtagataggccagatataaatagagtatatagccttgctgttacgtctgatcacgaaagagaaagtggcagaccttcttcatggtctgcagaaattgatcaattcacttctggtatgcaagatggaaagcggagactttttgttatttctgccggtaacaacttagatattcgtcctgaccaagactattgggatcaagtcaatctcgcgcagatagaagatccagctcaagcatggaatgctattactgttggggcatatacagaaatgaccacaaatgatgatccatattttgaaggttggtcaccatttgcaatggcgggtgatgttgctccatcaagtcgttcttcggtgaattgggcgtggagaaagcaagcaccatttaagccagatgtagttgccgaaggtggtaatcgacttttgtcacctgataagactgaactcagtaatgaagatactgttggattattaacaacatcaggaaaaactaccggtcaggtttttgagcggggtagtgatacaagcgctgcgtgtgcgttagtctcgagatgtgcggctcagttaacagccgagtatcctgaactttggcccgagactatacgaggtttgataattcactctgcggagtggactccacgaatgatggaacgatttggtttattaagtgcagtacatagtcctaaagtagcaaaagaaacattattgcgtacggttgggtatggtgtaacaaacattgacagagctagatatagtgctgaccatgcgcttactttgatcgctgaaggcgaaattcagccatttatcaaatcccaagatgctaatgcgtcatctgatcctaaactaaatcaaatgaaactttatcagttaccttggcctctcgcggaattgcaaaatttgccgccagagttagaagttaaactcaaagttactttatcttacttcatagaacctaatcctggtaggagaggttatcgtacaagatatagctatcaatctcatggtttaaggtttgaaactatcagacctggtcaatcaattgctaacttccgttcttacattaatggtttagcaaatatggatgattacgatggaccagaaggtgacaatgatgggtggtttttagggagtcaacttcgaacaagaggttcaattcattcagatcactggactggtagtgctcaagatttagctgatatgcatactatagctatttttccagtaggtggatggtggaaatataaaactgcagaagaacggtgggaaaatagagtgcggtttagccttcttattagtattgaagtacctgatgagagtgttgacatttactctgtaatagagaatcagattgaagttgcaatagaaaatcaggtcgcaatagaaattgtaacttga

SEQ ID NO: 270442 - DNA, 990 bp, Klebsiella pneumoniae
atggctactgcggaacaactaaaagcgcttttaaagagtcacgctgaacgtgacgatcagcgtttttattctgttgcccttcaggttgctgccaaagaagctcgacaggggcataataagcttgcgagcgatattaaaaatcttgttgagaaatctcagcgttctaccaataagctgggtctagcatcgtctagaactataccttttgcgcaacagaatcaaagtgagttaaaaggtctattagagctcacgccacacagtgttcgcctaaatgagcttgttctttctgatgacatacaagaacgtatggagaaggtgatattagaacagcgtcagaaggataaactcagtcagtttggtttgcagccgcgtagaaaacttctttttactggttctcctggaactggtaagacaatgtctgcatctatgttggcaacagagttaaaattacctctttatacaatcgtcctagataatcttattactcgttttatgggagagactgctgcaaagttgcgtttgatctttgatcatataaggcaaacaagagctgtttatctttttgacgaatttgatgctataggaactcaacgaggtgcacccaatgatgttggggaaattcgtagggtgttaaactcatttttgttgtttgtagagcaagatgcatcagagagtattattgttgcagctacaaaccatccagagttactagaccaagcgctttatagaagatttgatgacatcattaagtttgaaaaaccaaaatttgatcaaatatgccttcttattcaaaaccgtctatcacttttcgataccgatgattttgattggaggatggttgctgaagctgcaaatggtttgagctctgctgagattacccgatcttgtgaagatgcagctaaagaagctgttttgaattttaatgcaaaaataacaagtgaaacactgttaaaggccttttctagaaggcagtcaggtaataacaaataa

SEQ ID NO: 270443 - DNA, 585 bp, Klebsiella pneumoniae
atgaatcaaaaaattggctacgctagggtttcaaccgacgatcagaacctgcatttgcagagagatgcgttggctgctgctggttgcgagatcatttacgaggacaaggccagtgggaagaatgccgctagacccgaacttgataactgcttaaaggctcttagacctggggatacgttggtcgtttggaggctggataggttaggccgtagtttggcagacttggtgagcgttgttacccatctggttgatgagcgacggattggatttctgagcctacaagaacagattgaaacgaacagtgcttctggaaagctggtttttcatgtgtttgctgctttggctgaatttgagcgaaatttgattagcgaacgtaccaaggcgggattggaagccgcaagagctcgcggtcgcttgggtgggcggaagccaaagttacagaaaaaggatatcagggagattagggcattactcaaagatggttctattcctgtatctgatgttgctaggcgatatggtgtatctagaacgactatttataatcatgtaggggtggtgagtgtacaaaattctagaggggattaa

SEQ ID NO: 270444 - DNA, 198 bp, Klebsiella pneumoniae
atggagttggtcagtgtgtcgaatttatccagaatcctaacaattgcagactggatggcgagggacttttccggattgttggggcaaggtatggggattgttatttttgccatatctgatgcggaaacatcaattactttcgtcccttttgagtactttcttttttcattaaaaaatgaattggtctgggtgaaataa

SEQ ID NO: 270445 - DNA, 402 bp, Klebsiella pneumoniae
atgaccagagtgtctattagtgaggctgcacggctgacgggtaagagccggacaacgctgcacaggttaatcaaaacaggtgaactgtccacttgtagcggtgaacgaaatacaaaaatggtcgatatatcagagcttttacgtgttttcggaccgtttgaccaaccgaagaatgaacaccttactcgacaagtacctgaacagcgtgatacagcgcctgctgaccagagtgaacatgtcattcgtcaactgaaacagcagattgaacaccttaacatattgattttatcgaaggattcgcacattgacagcctgaaacaggccatgctccttcttgaaaatcaccaggcaaaattaactgaacccccggcgccgtggtggaaattctggaaaaaatcctga

SEQ ID NO: 270446 - DNA, 1248 bp, Klebsiella pneumoniae
atggatgctatcctggggtggattgagcaacatcacgtagctcacaccacgcttgtcggggggggatttatcggacttgaagtgatggaggctctgagcgaacgggggatcagtgtgaccctgctggagatgggggaacaggttatggctccggttgatcctgaaatggcatctgccctgcatcaggaaatccggagtcatggcgtggatctgcgtctcagaacggcgctcaccgaggtactgcggacagagacgggattccgcgttgcactgtctgagggtgggtttctgcagaccgacatggttattctcgccatcggggtaaaacctgagaacagccttgccacaggagccgggctcgcagtgggtaaacggggaggcataagcgtcaatgcctgtatgcagaccagtatccctgacatctacgctgtgggggatgccgttgaaactccagactttgtctttcaggaacccgctaattttcctctggcagggcccgccaaccgccagggacgcattgctgctgataacatgctagatcgtcacagcctttaccatggcagtcaggggacatccatttgtaaggtattttcgctgagtattggcagcgtcggtgcgaatgaaaagcagctgaaagttcatggcacccgatacgagaaggtttacgtccatgccgctgatcatgccggttactacccgggggcaacgatgatcagtctgaaactgctgttcagccccgataccggtaaaattctcggggctcaggcatcagggaaaaaaggggttgataaacgcatcgatgtcctgtctgtcgcacagcgcgcggggcttaccgtcaacgatctcgaacatcttgagctgacttatgctccaccttttaacagtgcaagggacgtcgttaaccaggctggtatggtggcgacaaatgtaatgaaaggagatacggtcatatgtcatgtcagcgatgtgttacaacgggaaccgggcagttattgtttacttgatattcgctctcctgccgaactgaaacaatttggcgaatatcctgacgcgctatccattccactggattccctgcgggagaatcttgaaaaagtgcctaaagataaagagatttttatagggtgccagagtggcctgcgcgggcatgtggcataccgtattcttcaggcccacggcttcaggacatataatctgagtggtggctttataacctggcaggcggtaacggagtcaataagtaaataa

SEQ ID NO: 270447 - DNA, 948 bp, Klebsiella pneumoniae
ttgagaaagtgcgcacagcttgagctgtttcgggagcgcctgccccggaaaccctactattccgacgagcttacaacgggcctacggattgcggatgttgcccgcgcccttggtgcgcgttacatccagccgaacgggccaacgcaccgccactggatcgtttttgacgtagaccatgcagccgctacgttatcttgggatgacgtaggcgctccagcccctaacattaccgtcacgaacaaggccaacggccacgcgcatctgatctacggactggatacgccgatccgcactgccccggatggaaatgcagcccctctgcggtatgccgccgccatcgaggccgcgctccgggagaaattaggggcggatatgggctactccgggctgatctgcaagaaccccctgcatgagcactggctggtgcaggtatgggaaccccggctctacgatttagcctggctatccgattacctcgatctgagctcctacaatggccgcaaatcgcttcctgagtacgggcttgggcgaaactgtaccctgttcgagaaaacgcgcctgtgggcctataaagcgatccggcagggctggccggattaccccgaatggttggccgcttgtgttgaccgggcatcaggatataacgcccagttcgagcagccgctccccgcaaacgaagtccggcacacggccaagtccattgccaaatggacgcaccagcacctaagccccgcagggttcagagaggagcaggcccggagaggtgcgaagggcggcaaggtatccaagggagggggaaggccgagcaatagcggtaaggacaagtccgatctattgccggaggttctgcggcttaaggctcaggggtacaccaaccgcgatatagcggacgatcttcaaatctcccccagtacggtgagcgtttacctaaagcgtgatcgtccgtga

SEQ ID NO: 270448 - DNA, 270 bp, Klebsiella pneumoniae
atgaaagacgagcttaaaaaccaaactgagggataccgcccattaaagaaaagcgccctgattggttttgcatttgccggggcactggccttgtccgtggcgttctctgccggtgcgtatttgtacctatcccacaaagcgagcgcagagcttgaaatggtgctcaagtcgagcgggcaactgatagacttcacccagcagacgatcaaggcgctaccagcgaagcagcaggaagcggccaaaaaggagctggaaaggattatcaactaa

SEQ ID NO: 270449 - DNA, 480 bp, Klebsiella pneumoniae
atgaataccgccgatcgatccatcgcattgctcgacacagcattgaggcggcgattcaacttccgggaaatggctcccgacgcgaccctgctaagtgaagtagaggggatcgatctcaaagccgttcttaccaccatcaaccagcgtattgaatatcttataggtcgggaatatcgcattggacacgccttctttatcaattgtgaatccagggcacaagttgaagatgcagtgcgcaataaggtcataccgctgttacaagagtatttcttcgaggactggagccgaatcgcggcagtgctgggcgatggttttatgcaggaagcgcagattttaccgccacccggaatagagggggaaccattatcaagctggtcggtacgtgcaccgttcagaaatgacgcctttgatcgactgataggcaaaaccagaacgttaaatgtcaccgatcttgaggtggctggtgaatcgaaagaatga

SEQ ID NO: 270450 - DNA, 777 bp, Klebsiella pneumoniae; identical to SEQ ID NO: 121845

SEQ ID NO: 270451 - DNA, 237 bp, Klebsiella pneumoniae
atggaaagtattcaacgtcgcttccagcgctggaaggtcattatgattcctggcggaaaatcctatgaaagttgggacgaaatggtcactggcgaagactttcccgaagaagctaggcagacgtacaaaacgcaccgcaccaaggcaattgaccggacgttaaaacagcctgactacgtccataccatgtctgaaagtggtatcaccgtcagatataggctggagcggtggcgctga

SEQ ID NO: 270452 - DNA, 879 bp, Klebsiella pneumoniae
atgcgcagcgccttccgggttatccggacagtacgtgaaaagcatgcctgtactcagtgcgatgccatcgtgcaggcacctgcgccttcgcggcccgtcgagcggggtatcgccggaccggggctgctggcccgcgtgctggcctcaaagtatgcagagcacaccccgctgtaccgccagtctgaaatatacggccgccagggtgtggagctgagccgctcactgctgtcgggctgggtggatgcgtgttgccggctcctgtcaccgctggaagaggcgcttcaggactatgtgctgactgacggcaagctccatgctgatgacacgcctgtcccggtgctgttgccgggtaataagaaaacgaagaccgggcggttgtggacgtacgttcgtgatgaccctaacgccgggtcagagctggcgccggcagtgtggttcgcttacagcccggacagaaaaggtatccacccgcagagccatctcgccggcttcagcggtgttctgcaggcggatgcgtacgccgggttcaacgaactgtaccgcaatggacagataacggaagctgcctgctgggctcatgcccgccgcaagatccacgatgtgtacgttcgcaccccgtcagcgctgacggaggaagccctgaaacggatcggcgagttgtatgtcatcgaggcggagataagggggatgccggcgaagcaacgccttgcagaacgtcagcaaaaagcgaaaccgcgactgaaatccctggaaagctggctgcgtgaaaaggtgaaaacgctgtcgcgacactcagaactggcgaaagcgttcacgtacgtactgaaccagtggccggcgctggcttactatactgacgacggctgggccgaggcgtaa

SEQ ID NO: 270453 - DNA, 123 bp, Klebsiella pneumoniae
atgagcgagttcgataatactgtcaatcaggatcccggaaaccgcatcagtattaatcttggcaacaaaagactgatccagtttcaggggtctgacgctcagtggaacgaaaactcacgttaa

SEQ ID NO: 270454 - DNA, 141 bp, Klebsiella pneumoniae
atgaaccaggacgtaattgagcgcatccgggagcgctggcaaaagctccgcctctgccggcaccgcggaacggtgatgaccgactatcgcattttacggaattacgttcgcatctatcagaccctgggagagacagcatga

SEQ ID NO: 270455 - DNA, 654 bp, Klebsiella pneumoniae
gtgacgtacatcaacgggactacctgggcagaggagaccgttaaatgccggacgcctgataatcctacgccggtgaaaatagagaattacaaactcgatggggtactgaatcaggatcacgcctaccaaatcgggatgcgtcgcctgatgaaatacctgcagcagcgggtgacgttccagaccactaccgagctggacgcgctgtgctacaacacgggcgatcgcatagtgctcacggatgatattccgggcaacaacacgatttcctgtctggtggaggcgatgacaacggctggtggcgtgacaacgttcaccgtcacggagccgctggactggtctttcgaaaatccccgcgcgctgatccgttatcaggatggctctgcatccgggctgatggtggcgagcagggtgggtgattttcagctgtcagtcccgcacctgagcgagtttgatgatcccatgcgggttgacctgtcgtcggcaaccatcgagccgatccgcctggtgttctgcggctcaacgcgccacgtctacgacgccattgtagaggagatcgcgccgcagtctgacggcacctgtcagatcaccgcaaaagaatacctcgaatcgttctaccagtacgacgacgccacataccccggcgacgtcgcttaa

SEQ ID NO: 270456 - DNA, 912 bp, Klebsiella pneumoniae
atgccagatttaaacggtatgatgctatttgcagccgtagtgagagcaaagggattctcccaagctgcacgtgaaaccggccacccaaaatccaccataagtcgcaaaatcgcgcagcttgaagaacaactaggcgtgcgattgttacaacgcgacacccgtaacctgagtcttacccaagtcggggcactcttttatcaacactgtgattccattcgcaatgaggtggaagcggccaaggctgttatcgagagtacccatgatgatgtatcaggatcattacggatagccattccggtctcttttagccaagaattaattgctaacctctgtagcggattcatgcgtttatatcccaatgtggaattagatgtccagtttaccgacaacgatataggtttggtgggtgaaggatatgacatagctatcaaatatgggccactgcaatcctctgatcttgttgcaagattactgttcgagcgtcaaccaattctggtagcaagccctggctatttaaaagcacgcggcacccccgcaacacctaaggagctgagcgatcatagtggtattctgctaggaacatcccgctcagcacccatatggcccttaggcaaaggtgctcgcaaaaccatggtaaactttcagcgtaaagtcagggtcaatagcccgattatggttaagcagttagccctcgatgactttgggattgcaatgctatcaaactccgcctgcaaaaccgaactcgccaacggccagctagtgccaatcttacaggaatggccgattgaaccctttaaggtctacggggtgtattcgagccgcagacaattagccaccaatatcagcgccttcttggactttttcgtcaaacgctttagcagccaagaaagcctacaatccttgatgggctag

SEQ ID NO: 270457 - DNA, 1131 bp, Klebsiella pneumoniae
atgctggcctctaaggcgctgattgaatgtaagacactgaccttgactgagttaggtcgaaatttaccaaccacggcccgaaccaagcacaacatcaagcgcattgatcgtttgctcggcaacacgcatctgcatcaagaacggttagctgtctaccaatggcatgccagcctcatctgttctggtaaccctatgccgattgtgctcgtcgattggtcagacatccgagagcataaacgcatcatggctctgcgcgcctcaatagccttcaatggccgctctattaccctgtatgagaagtcctatcccctatcagaacaatgctctaaggcctcccacaacggttttttagcggacttagccaagattttacctttgcatgttacccctctcatcgtgactgacgcggggttcaaagtgccttggtacaaagaggttgaggcgcatggttggttttggctaagccgtattcgcggtacagttcaatttgcagatattggcgctgaaaattggcgtgcagttcgaagtacacatgacttggccaacggtcaagcgaagagcctgggttgtaagactttgaccaaaactaaccctatcaattgccatctcacgctttatcgtagcaaacctaaggggcgtacaaatcagcgttcaacgaggactaattgccaccatccatcggcaaaaacgtactcaacatcggcgaaagagccttgggtgttagccagcaatttaccaccagaatctcggagcccaaagcagctggtaaacctgtacgccaaacgtatgcaaatagaggaaacctttcgtgacctcaaaagcccggcatacggctttggcttacgccaaagtcgtaccaacagtccagagcgattcgacatcatcctactgatagcgttgatggttcaatgcctgttgtggctagttggtttacacgcacagcaacagggctgggataagcattttcaggccaataccattgggcatcgaacggtactctcaacgattcgcttgggattggaggtactcaggcggcctgattatcaaatcacggagaaagaattgctggcggcctgggtattattcgccaatcagttgctcaaatatggctatgctatggctgatttatga

SEQ ID NO: 270458 - DNA, 822 bp, Klebsiella pneumoniae; identical to SEQ ID NO: 15325

SEQ ID NO: 270459 - DNA, 393 bp, Klebsiella pneumoniae
atgcttgggcaatacataggtttcgatcttgataaaggtatgatcgaagcgatcgaacactcgttgagaacgcttaacgccccagagggtattgttgtcaaacagggagatatattatccgatccgtcaggcgagagtgatcttctacttatgttcaagctatatactctactcgatcggcaggaagaggcctctggtttgaaaattcttcaagagtggaaatacaaaaatgctgtgatctcttttcctattaaaactataagtgggagagatgttgggatggaagagaattacactgttaagttcgagaatgatcttgttgggtcagatctgagaatcatgcaaaaattgaaattaggaaacgagatgtattttatcgtatcgagattgtaa

SEQ ID NO: 270460 - DNA, 669 bp, Klebsiella pneumoniae
atgtataatcctactgtgaacaagaaaacgcgtgcaaaatatgtattagaagagatggaaaagctttttccggatagtagctcagagttgaggaactgggaaacagatttccaatttcttctttgcatcattttatcagctcagacgactgatttgcaggtgaataaagtgactcataatctattcgctaaatatcctgatccggcttcactttcggaggcggaagtcggagaggtagagaagatattaagctctataaattactatcgcactaaatctaagaatattgtaaatgcggctaaggttgtgaaaactaggtttcacggccgagttcctaggagtgtagaaaaattgatcgaaatcccaggcgtcggattgaagactgctaatgtatatttgaatagtatgtatcaagcgaatcagggagtgggagcagacactcatgtgatgcgagtttcgaggagacttggtttcacggatagtcgtgaccctaggaaggtcgcaatcgcgctacaaaagctgtatccgaaaaaagattggtaccgagttacggcgttatttgtcttgtatgggaggtactattgcaaggctagagtcaagccagaaaatagcaaatgtatttttaaggaattttgtactcactgtagtggtttggatccttatagctag

SEQ ID NO: 270461 - DNA, 300 bp, Klebsiella pneumoniae
atgcagcaaggcacattattcacccggcggacggtcgagcgacattttcgcaaacatcaagctcgctgcccgccggaataccgcgagatcctcatcgaacggattctggccaaacggtggacagaagcctcgctaggcaaggtcgtcggcattgtggcctcaaccttcgcccgccaccaacttaccgactacgatcgacttttggcgatctccggtatggctcgcgccgaggcgcggttaattgtcagccgcgaagtaagcgacattctagaaagctggcgcagcaccgcgctcccctag

SEQ ID NO: 270462 - DNA, 813 bp, Klebsiella pneumoniae; identical to SEQ ID NO: 158561

SEQ ID NO: 270463 - DNA, 366 bp, Klebsiella pneumoniae; identical to SEQ ID NO: 158562

SEQ ID NO: 270464 - DNA, 639 bp, Klebsiella pneumoniae
atgcccgcgaaaatcaagatttgcgggatcagcacacccgaggcgctcgatgcgaccatcgcggcgcgggcggactatgccgggttggtgttctatccagcgtcgccccgtgcggttacgtcgaatgtcgcgggcgctttgacatcgcgcgcagctggccagatcgccatggtcggtttgttcgtcgatgcggatgatgctgtcatcgccgacgcactggtggcagccaagctgaacgcgctgcagctgcacggttcggaatcgcccgaacgcgtggcccagttgcgcgcgcggtttggcaagccggtgtggaaggcgctgcccgtcgccagcgccagcgatgtcgcacgcgccgcagcctatgccggggcggcggacttgatcttgttcgacgccaagacccccaaaggcgcgctgcccggcggcatggggttggcgttcgactggtcgctgctggccggatatcgcggtgccttgccgtgggggctggcaggcgggctaaatccgacgaatgttgccgaggcgattgcgcgcaccggagcgccgctggtcgatacctccagcggcgtcgaaagcgcgccgggcgtcaaggataccgacaagattaccaatttcgcctttgcggtgcgcttggcctaa

SEQ ID NO: 270465 - DNA, 594 bp, Klebsiella pneumoniae
ttgccgggcgaagcgggcgctggcggcttcggctgtaaggcgcgcgggctgcatgattatgtcgtcaagaacggctctgccgatcatcccaacgccgaggtgaaattcgcactgggtgatgtggtcaacaccatgatcggctgcactaatggtgaaacgatcatgctgtgccacgacacctcgctgccgcgcccctattctctcggctttcgggtgcaaggcaccgaggggctgtggatggacgtcaacaagtcgatctatctggagggcaagagcccacagccgcaccgctgggagcctgccgagggctggtttgcgaaatacgatcacccgctatggaaacgctacgccgatctggcggcaggggccgggcatggcgggatggactggttcgtgatccacgcttttgtcgaggcgctgaaggccaaggccccgatgccaatcgacatttacgacgcgctggcctggagcgcgatcacgcctctgtcggaacaatcgattgctgagggcaatcgcacgttagattttcccgacttcacccgagggcagtggcgcacccgcaagccgatctttgcgctgaacgacgcctattga

SEQ ID NO: 270466 - DNA, 123 bp, Klebsiella pneumoniae
atggtgctgactaaggaaggtgcgaataagcaggtcatttcttcccaagctgactcgctgattaaaatttcgcggatctgggccgatttttttcccgcaaacacatcgaatcagcctatttag

SEQ ID NO: 270467 - DNA, 663 bp, Klebsiella pneumoniae; identical to SEQ ID NO: 209734

SEQ ID NO: 270468 - DNA, 1272 bp, Klebsiella pneumoniae; identical to SEQ ID NO: 8318

SEQ ID NO: 270469 - DNA, 360 bp, Klebsiella pneumoniae; identical to SEQ ID NO: 8313

SEQ ID NO: 270470 - DNA, 933 bp, Klebsiella pneumoniae; identical to SEQ ID NO: 8340

SEQ ID NO: 270471 - DNA, 426 bp, Klebsiella pneumoniae; identical to SEQ ID NO: 9425

SEQ ID NO: 270472 - DNA, 435 bp, Klebsiella pneumoniae; identical to SEQ ID NO: 8357

SEQ ID NO: 270473 - DNA, 192 bp, Klebsiella pneumoniae; identical to SEQ ID NO: 14879

SEQ ID NO: 270474 - DNA, 192 bp, Klebsiella pneumoniae; identical to SEQ ID NO: 5318

SEQ ID NO: 270475 - DNA, 1956 bp, Klebsiella pneumoniae
atgaagacggttatttccgtgctgactgcgcatttttttgtcctgagcgcctttatctggctggcatccccagcctgtgctgacagaggaagcgactataaagctggttcggattttgcgaaacaggtgcagggcaatggtctgaactcactgaaaaatttcagtggtgagcaaaacctgccggggtataccgacagccctgatcagacaaaatactatggcggcgtcactgccagcggagacagctctctgaaaagcgattcagccctggagttcagccagggagataccggcaaagcgattacggagtcgttcacgaaccggccaccggatcagatatctcaggatgcgccgtttattcaggccgcaaaggatacagaatcccgtgccgacagcattgtcggcgataccggacagtcctgtaccgcccaggttgtgaaccgcagtgagttcacaaaccatacctgcgaacgtgatctgcaggtggaaaatttttgcacacgggaagcgaccctgaaggataacgccaccacacagaaagttaaccgaacctatcagcaggtggtgacgctgaattatgcccggagtacccggcaatggagtggcaacctgacgatcccgaccaacggtcgtctgctgaatgcctcggtggatggtgagcctctggtgatcccctggattgaagaatgcgattccgaagggaaggtgcgggatagctgcaagagtgcagtgagtgaaagcctgaccctctttgaacgaacgttccccattgatgtgatcaactggccacgttcagaatcgatgtgttcaggcggtcagaacacgcattgtacgaaatatacctatgacgggaaggggaagattcatcagtcgtttggtgtggacaaagcggtcactgctgggcagaacttttcagtaagcaaaacatcacggaccgtatcatcggccagccagaaacccgtacaggtcacggtcaccctggtgatggaagaaaccgaaaccgtctatgcacctgaagtcgtctgggttgaaagctgtccgttcagtaaggatgaaggaaaaaaaacgggcgaggaatgtatcagtccgggaggaacgcgaaccatcaccctcggaggcagggattactcgttcacggaggcctgctggaaatataaggatacctggctcacgcagccggcggacaacggctcctgtgaaagcctgatgaaaaatacggcctgtactctgtcatcccgccagtgcgccttctccagcgaggaaggcacgtgcctgcatgaatatgcaacgtattcctgcgaaaccaggacgagtggcaagcaaatgatctgcggcggtgatgtcttctgccttgatggtgaatgtgacaaagccacgtccgggaagagcaacgactttgggcaggcggtgtctgagctggcggcactggctgccgcggggaaggacgtcgcggcactgaacggggtggatgtccgggcattcaccggaaaagcgaagttctgtaagaagtttgctgccggcttcagtaactgctgcaaagacagcggctggggccaggatgtggggctggcacgctgcagcagcgaggaaaaggcgctggccaaagcgaaaaaagacaagctgacggtcagtataggggaattctgctctaaaaaggttctggggatttgcctggagaaaaaaaggagctattgccagttcgactcaaaactggcgcagatcgttcagcagcagggaagaaacggtcagctgcatatcggttttggcggcgccagcagtcctgactgtcggggcattaccgtcgcggaactccaggggattgattttaacaagctggatttcaccaactttatggacgacctgatgaaaaatcaaaaaataccggaaaacgatgtgctcaccaataagaccagagaacgaattaaggaaatcatgagtcagcaatccgcgcaataa

SEQ ID NO: 270476 - DNA, 390 bp, Klebsiella pneumoniae; identical to SEQ ID NO: 227799

SEQ ID NO: 270477 - DNA, 627 bp, Klebsiella pneumoniae
atgttacgactgaaaggctgtctgctcgccgcctgtctgctatcgccgctgactcaggcggctgatctcggtacctggggggatttatggcccgtccgggagcaggacatgctgcagctcatcacgcagcgtctgcagtcgctgcaatcttctggccagtgggaccagacgatggatgcgtttaagcagcgggttatcgagaacagtcagcgtccggcaccggtggagggcattaagcgtgcggagaaatacgagcagcgctggtttgatcccagcatccgcctgaccgaagacctgaaggacaatgaggggcgggtgtttgcccgcaagggcgatgtggtgaacccgcttaaaaccgtaccgtttgtccagaccctgtacttcatcaatggagacgatgccgaccagctggcctggatgaagcgtcaggtgccggaaaccctgatgagcaaaattatcctggtgcgtggcagtatcccggacacctccgcagcgctggacagccggatctatttcgaccagaacggtgtactgagcaagcgatttggcctgacggcggtcccggcgcggatcacgccggcgccctccggtgaacggctgaatattgaggtgtttcccgtccgttga

SEQ ID NO: 270478 - DNA, 348 bp, Klebsiella pneumoniae
atggaggaatatcgctggtcgccgtcgcagttcgtattcgagcgttttactcccgcggcggaaaataatactgcggcgaaaaatgcgttttatattgagctggcctccagcgggcagcgcctgcaggtggccgcggatcaaaccattgctcaggtattacagcacgccggggtggaggtaatgctctcctgcgaacagggaatgtgcggctcctgtattaccggggtcctcgacgggatccccgagcaccgggacagcgtgctgacggcggaagagaaagctggcaacgaccagatcacgctctgctgttcgcgggcgaaatcgccgggtctggttttggatctgtga

SEQ ID NO: 270479 - DNA, 222 bp, Klebsiella pneumoniae
atgatgcccccccagcggacgcgccaggtaaccggcggcgaaaatgccaaaagtttgcacctggcgcagccattcgggaatatccgcagggaagaagagctcgccgacgacggcggcgaagaaaacgaaaatgataaagtcataaaactccagcgcgccgcccagggcggccagcgtcagcgttttataatcctggcggttgagcggtcggtttacatatga

SEQ ID NO: 270480 - DNA, 219 bp, Klebsiella pneumoniae
atgagccagcatcatctgctggattccaatattcatctcgccagcttcgacgatcactatctgtatgattcgctttccctgcgcattgataccgtgcagcaggataatcgccagctggcctggcactgctacgatctgctcagccagctgatcgacggtcaggccccggagccgcttcagcgctacctgcccgccaccctgcagattcgccatccctga

SEQ ID NO: 270481 - DNA, 798 bp, Klebsiella pneumoniae
atgcgcgccggccaggtgttgggccccctgaatactgtcgtcgagatggaacagcagacgctggcccagggtacgcagatcgccggcccgctctttcaaatagccgtcgctcagcgcggcaaactgttcggcgaacttctcaatgatctttttgacggcccactcggcgacggcgcctttgtcaacttcggcaaacagctcgcgacgcaggcgggcgtcagagagcaggtgcgagcagagatcgaagatcgccgccgtctctttttgcgccccggcagcgtagcgtttgctgtagcgacgaaactcgttggccgcctcttccagcgcaccggtcaggcgttcgcgttccgaggcggtgtccagcgtcgaggcttcatacacctgctccatcagcggcaggctgacgtccatccagccctcggcgatcgccaccccggaagaggccggcagagcgcgaatgcgcgtttgacgatactggccgaacagggcgttcagctgggactgggagaggatcgccgccatctgggtggcgagggtgacgaggaaagactcttcgctttcatcaaactgacgcagctcgcgctgctggaccaccagcacgcccagcagctggcggcgctgaatgatcggcacgccaaggaaggcgcggaagcggtcctctttgacggcggggatatatttgaagctggggtgtttttgcgcatcggcgaggttgatgggttccgccaggcggccaaccagccccaccaggccttcatcgaacgccagcgcaacggtgcgcccgcgaggtttttttaa

SEQ ID NO: 270482 - DNA, 369 bp, Klebsiella pneumoniae; identical to SEQ ID NO: 265659

SEQ ID NO: 270483 - DNA, 159 bp, Klebsiella pneumoniae
atgttaaaacgtctttttaccccgctgacgctggtcaatcaactggcgttaatcgtgctgctcgccacgattattggcgtcgccggcatggcgatctccgcgcgcctggtgatccgcgcgcctggtgaacggcgtgcagggcagcgcgcacgccattaa

SEQ ID NO: 270484 - DNA, 2019 bp, Klebsiella pneumoniae
atggcaaaagcccactccctcatcgtcgccggcggtggacgggcggtgtccagtggggataacgaccagctgcagcccatcgcgccgggccagccgttcaggttgatgcagcagcgcagcgccgccgacgttgccatcatgaaagagattgtacgccagatgcctgagctgcgaccggcggtctacagcctgattgagcgggatgtgcaccgcgccctgaccaccatcgagcaggtcacgccggagcaggtgccgagaaaagaaggcgcatgggcgccgggcagttctgtggtggaattcacgccaaagcaggaaaaggcgatagaaaaggcgctgagcgaggggaaaaccctgccggaaggtcagcccgcgacgctctacgaggcgctggtgaaggactataccggacggaccccggaggcacagtcgcagacgctggtgatcacccatctgaataaggaccggcgggcgctgaacagtctgatccatgacgcacggcgggagaacggggaaaccggcaaagaggaaatcaccctgccggtgctggtcacgagtaacatccgtgacggtgaactgcgcaaactgtcgacctggacggctcacaaggaggcggtggcgctggttgataacgtataccaccgtatcagcaaggtggataaggataatcagctgatcaccctgacagacagtgaaggaaaggagcgatttatctcaccccgggaggcatcggcagaaggcgtcacgctctatcgtcaggaaaagatcaccgtgtctcagggggaccgaatgcgcttcagcaaaagtgacccggagcgcggctatgtggccaacagtatctgggaagtgcagtctgtttcgggtgacagtgtcacgctgtctgatggcaaaatcacccgtacgctgaccccgaaggcggagcaggcacagcagcatatcgacctcgcctacgccatcaccgcccacggtgcccagggggccagcgaaccgtatgccatcgcgctggaaggggtggccggtggtcgggaacagatggccagctttgagtctgcctatgtggctttatcccgcatgaaacagcatgttcaggtctacaccgacaaccgtgagggctggataaaggccatcaagaattcacctgagaaagcgacggcgcacgatattcttgaaccccgtaacgaccgggcggtgaaaacagccgatctgctgttcgggcgggcaaggccactggatgaaaccgccgcgggccgggcagccctgcagcagtccggtctggcacagggaagttcaccaggaaaattcatttctccggggaaaaagtaccctcagccgcatgtggcgctgccggcatttgataaaaacgggaaagccgccggtatctggctcagcccgctgaccgatcgggacggacggctggaggctatcggcggagagggacgaattatgggcaatgaagacgcccggttcgtggcgctgcagaacagccgcaacggagaaagcctgctggccgggaatatgggggaaggcgtcagaatggcccgcgacaatcccgatacgggggtggtggtgcggctggccggtgatgaccgcccctggaaccccggggccatgaccggtgggcgggtatgggctgaaccggcgccggtggctccggtaccgcaggccggggctgacattatcctcccgccagaggtactggcacagcgggcggcagaagaacagcagcgccgggaaatggaaaaaaaggcggaacagactgcccgggaaatggccggggaggcgcgtaaagccggcgagccggcggaccgggtgaaagaggttatcggggacgtcattcgcggactggagcgtgaccggccgggtacggagaaaacgacgctaccggatgatcctcagttccggcgccaggaggaggcgattcaacaggtggcctcagaacgtctgcagcgtgagcgtctgcaggctgtggagcgggacatggttcgtgaccttaaccgcgagaaaaccctcgggggcgactga

SEQ ID NO: 270485 - DNA, 603 bp, Klebsiella pneumoniae
atgcttagtgccgaaaaggtaactattcttgatgaaatattgattgctcatacgattaatcgaaaaacatcattgtcttcaactcgctccgtttcctatcattgcgcgcttgatgctcttgttgctctaagggattttctttttaaaaatggcatgatgcaaaagcgacaaagggatttttataattacattgtcgtattccttgagtggcacttaaatacgctatcgggtgaagcctttaataaactgtttcaagatgtcaaattattcatcagcagttttgatatcaataatgaagacttttatgatgagtttattctttctgcttatcgacgaatcgctgatatgtctgctgaagagtatcttttttctttaaaagatcgggttcttaatgaattagaggatgcccaacgaaatattttgaccttacaaaacgaagttgaggagataaaacagcagcttcaacaaaaggacgaaatgattgcttctatgaatagggagaatttagctattaaagcagataataaaattctcgaaaattacaatgaagaactaaagactgttcaaacaaagtttcttaaactactctcaagcaaagactag

SEQ ID NO: 270486 - DNA, 522 bp, Klebsiella pneumoniae
atgagcgaacgtcgatatagcccgctcgcgacgctgttcgcggcgacctttctcttccggatcggcaacgcggtggcggccctcgcgcttccatggttcgtcctgtctcatacaaagagcgcggcctgggcgggcgccacggccgctagcagcgtcatcgcgaccatcatcggcgcgtgggttggtggtggcctcgtcgatcggttcgggcgcgcgcccgtcgcattgatctcgggtgtggtgggcggcgtggccatggcgagcatcccactgctcgatgccgttggcgccctctcgaacactgggctgatcgcttgcgtggtgctcggtgccgcgttcgacgcacccggtatggccgcgcaggacagtgagctgcccaaactcggccacgtcgccgggctctccgttgagcgcgtctcgtcactgaaagcggtgatcgggaacgtcgcgattctaggtggcccggcccttgggggggggccgcaatcggcctgcttggcgctgcgccaacgctcgggctga

SEQ ID NO: 270487 - DNA, 291 bp, Klebsiella pneumoniae
gtggcgtgttacggtgaaaacctggcctatttccctaaagggtttattgagaatatgtttttcgtctcagccaatccctgggtgagtttcaccagttttgatttaaacgtggccaatatggacaacttcttcgcccccgttttcaccatgggcaaatattatacgcaaggcgacaaggtgctgatgccgctggcgattcaggttcatcatgccgtttgtgatggcttccatgtcggcagaatgcttaatgaattacaacagtactgcgatgagtggcagggcggggcgtaa

SEQ ID NO: 270488 - DNA, 156 bp, Klebsiella pneumoniae
atgatgatctcatatcaggaacttgttcgcaccttccttagttttatggctaacaagataatcacttgcctctctaaaatctttagcggcctgactacttatatcatgtctgctatcgctggaatgtcgaccagactggccaacagtatcagttga

SEQ ID NO: 270489 - DNA, 516 bp, Klebsiella pneumoniae
atgaaactcattggtaatatatgttttgttgtttttgttatttgggtagcgacgtttttctttaaatctgaatcaaaggcatttccggataatgaaaccttaatcgctcaatttgaaaggcaaggaattttaaagggtgatatgtggaagaaaggcaatgttgttgatggcgttcaagtctactcagcccgaacagaagatgacggagttaaatctgtgtggttacttggcgtaaaacaggctggggttttgtctgtatcatctaatcctaatcctgccttctcgaaaaaaacggctttaaccacatgctataagttggttaaaggggttgtagagaaaggggaaaacgatcacttagatgcagtagtacaggcatttaagtatgcgtttgattcggacccagtagacaatacaagacatgatactgagataatagatggatataagtttgagattcaaatggggaaaatgggttctaacctgtatagctataactgtacaatgaaacctaaatga

SEQ ID NO: 270490 - DNA, 408 bp, Klebsiella pneumoniae
atgtttaaatcgttgaataccgactggctgaagctggcattgctccgggtatttcagtccggctggacggtgatcattctggtgggattatccctgattttctgcagcttcaatggtcgtcctgcgtttgcggtctggtggctcacctttgccggtgccttgctggtctgtatcagcatcgctatggggaatctgccttatcgcttactgcagcccacccgggccatcagcaaatgggctgcagtgttgtcctggcttgtctggggtataggttgtctacttctggccattgctccggtttttacaaaagagcctctcatcattttcgggacaccgtttgctggtctgactgcaatccttttctccctctgggtctcgcgtaaggagccgtttaaatggatccgataa

SEQ ID NO: 270491 - DNA, 231 bp, Klebsiella pneumoniae
atgactaaagcgtttgatcgcgccagcgatctggaaatggaagagcgggaacgggtcttaaacaaccatttaaaccgcgttaaagagctgccggataattacggattttgtaacgactgcggcgcagcgattccggctaaacgactccgggcgctgccctccgtggcgacctgtatcacctgtcagtcaatcagagaacacaggggggagcatggactgggaagtcattaa

SEQ ID NO: 270492 - DNA, 969 bp, Klebsiella pneumoniae
atgccaaagcctgtaacacaactcgaatatctggccctgtgctttgagctccctgacctgacggatgccaatacaccgttgccggaatggttgccgatgataccagctggctccttcaccggtcgtgatggtcgttcgtgggttaactcagaccctgccactgtcgtggctgcgtcgttcagttatccaaaactgccatttgatattgaacatgccactgagttacgagggcctaaaggcttcgaagctccggcttacgcatgggttgatgccctgcgagtcaatgacgacggcagtattgatggccatatcgaatggacgccggacggggaagctctcgttcgtggcaaaaagtaccgctattacagccccgcctttttctttaccagtgctggtctggtcacgcgtttatccagcgcaggcctgaccaacaaacccaacctgtatttacccgcgcttaactcggagaacaccatgactgtacctgtacagattgccacggtgctggggctggctgcgacggcgtcaattgatgatgccgtgtcagctatccagaccatcaagaacagcgaatcggtcgcactgaaccgcgcacaaaacccggacctgacgaagtttattccagtggagacacatcagctggccctgaaccgtgcggaaacggcagagagccgcctgaaggcgctggatgacaaaaccgccactgagctggttgatggcgcggtgactgccggaaaagtcgctccggcaaaccgcgatatgtatctggccctgtgccgtactgaagaaggccgccagcagtttaccgacttcatgaaaaccgcgccggtactggttaacgcagacccgaccaaagggaaagaaaacaagggccagaccgaactgaccgaaaccgaactggcgatgtgccgcagcatgggcgtcaccaaagaagagtttctggccgctaaaccgaaacaggagcaataa

SEQ ID NO: 270493 - DNA, 273 bp, Klebsiella pneumoniae
atgtcatttacttttagcaagcaatatgccgtggttaaaaactacccagacttagggatattgaaacagtcgcctcccgaagaaatctcagtaacgtataaggcgattgtagtcaattcagtcgctgctggaacggctgaggtgcaattcagtgtagacgcaggggatattggggaggggataatcacattcgtcttcgctccaagcgggtttgatggactcttggggcaggcagaggaggccttaagacagaaactcgtggaacaactgtaa

SEQ ID NO: 270494 - DNA, 1410 bp, Klebsiella pneumoniae
gtgaacctaaaaaatttaatcatcgaaatagttgaccttatcgacacatacgattttcaacaagaaagacaaatgccagatcttataacaactaggtcaggtcagcagcttcatttcggtgatgaggtgaggaaaaagatagatttattatcctcagttttgaaagacaatctccctgcgcctcttaataatatatcttatgcgactttatacgcaatatgtagagactccatatgcaacttatatactgaaggtgtattggcggaaggtataaaaaataaaagtagagagcatataaaaaaattgaaagcagaaatcaacgaagtgatctccaataaaatagttacattaactcatcacttccaagctcaaacttgtttattccccaattcaccttcgttttccatcggccccgtgtcaattaaatcaactcatcaatgggtaaaagatttagatgtaactaacagatttttcactgcttttggtgcttctcctgatgatgaagccaactggaaagaagagttaaccaaacttatcagtagcaatgggaagcatacatctgagaacttcacctcgataaagctatatgaaataataaaaaaagcaaattcaataatagaggtggaaatagataactatgaaattaaactttctagacaactggcaaaaatcacatcacaggcagcggttgattgtttctcactaatcttcaacaacccaaaaatgtttttacaacagaatctattcgaacatccaactcctcctattgcatataattccctagtatctttttctggaaaactccagttacccgggatgacaataaatgacaaagtcaggacgtacgatggtgacttaatagaaaaagcaattactgataattgtaattttattagtgcaactggtagcatactttacacgattataaataaaaatgaaaatggtaaaaaaaacctatcgctaagatggactacagcattaaattggtatgctgaagcacaaagagaacaggatgatgctatatccttagcaaaaattggaatatctctggatgttttatcaggaggagggacaacaagaggcatattaagcatggttaaaaatttattagatctagatgagcaacatgttgtctttgaacatcccaaaaaaactaccctcattgaatttattattgacctttatgaacatggtcgctcacaaatagttcatggaaatcacatcgacagactaattccttttgacagagagagacagaaagcaacatctctttgcagacttatactttatatcgctgctttgagacttgagacctatagcggggatgattctcatgatgcttttcagaagatgcctttcctagaaaaagatggcgataaagtggcgatggatatggcggataaagggtaa

SEQ ID NO: 270495 - DNA, 573 bp, Klebsiella pneumoniae
atgattgaagctaattttaataacgaagcattgctaaataggatttgtgaggtttatgggtttacacagaaaatccagctagcgaatcacttcaacatcgccgcgagctccctacagaatcgctacacacggggcaatatgtcgtacgattttgcagttcattgcgcactcgaaaccggggtaagccttaaatggctcatgactggagagggtgaaaaaaatctatcaactgatgaagtttctcgttctatcgagctcacttcattcactttaagtgatggagagttaaccaagattgggactatcgcaatcgatcatcagcttttcacaaagcagctcaaaaaaggtatctgcgttaagagcgataacagcacttatatcattgagcaggaatcctctttgtctgacagtctttggttagttgatattgaaggcgcaattagcctccgagagttaacggtgctacctgggaaaagattgcacgtagcgggcggtaaagtgccgtttgagtgtggagttgatgacatcaaaatgattggtcgtgtggtgggtgtatacagcgaggttaattga

SEQ ID NO: 270496 - DNA, 594 bp, Klebsiella pneumoniae
atgactttattcactgaagaagatcccacccaacgccgctatgttgatttgattacagaggtgacgcctttcgaagctacgaaagaaccaatgaagatcatttccgcatccgacatgctgggcatttgcgatgtttttcttgctgacactcaatgccacatagcagaccggctacctctttcaatagctggtcggcgtgagctaggtcggaaaattgagtggaattgtccacatagctggaaaccacgcgaagaatggtcaacacatgttcggcacgccttacaaattttaaatcgacgttatttggataccccagtatctccacaggatgactggcagacctgggaagaactatcgacagatattcatgtgtcggctcgctgtgttcggcagactgttgagttttatcgctctggaaatccccagcatttaccgatgtcgactgagctttttgctgttcccgaagttttttcaaaatttgtagcttcgattctttcaggtgacattcatcctgtttggatgtggcatgctgacgcagccaaaacgccgaaatgctttgatgggctttatcccaaatacacgccgctttcttaa

SEQ ID NO: 270497 - DNA, 948 bp, Klebsiella pneumoniae; identical to SEQ ID NO: 159351

SEQ ID NO: 270498 - DNA, 933 bp, Klebsiella pneumoniae
atgtttgtggcagagaaggggaaaacatgggctatcaccatatctcgggagaataatcgtttctatgaagtgttgatgcatgttttgggggatgttcccgtaggtcgcattaccaaacagcacatacgccaaacactggcagtcattgagagcctaccacgccgcaacctcaaaccgtattctgatatgagtcttgatgaatgcatagattttgatgttcctgaagatgatcttatcagtagtgccaacgtcaaaaaacacctcaaaatttattcatcattctttaaagttttccttaaagatgagaaggatatattagaaaaatcacctaccgaggggatcaaatatgaggtgacagagaacaagggcgggcattacacaaaaccggaaatgaaacgtttgatagaacggttatcaacttttaccgattggcgtaaagactatttcctgactttgatctacacaggtgctcgccggggtgaaatggcggtgatccgtaaagaacatatccgcaaagatgaggaaacgggacgctattacatcttcattgggggcggtaaaactgagcatgcacagcggcaaattcccgtaagtaagaagatagaatcgcttctgttgtcacgtattaagtctcttaaatctgctgatcttgtgtttggagacttgccaacgtatgaacatattgctttccagtggcgtagtctcatggaggagtgcaacatccctaaatacaacgaatttggacagaagcgcgtcatccatgcctgccgtcatacgttcatttcagaagctattaccaaaactggcaatgcaacattagtacagtttgtggtaggccatagccgtactcagtcattggggattactgcgcgctatacgcatagacccccattgaatgaactgcttaaggtggtagatagtgtggattggtag

SEQ ID NO: 270499 - DNA, 288 bp, Klebsiella pneumoniae
atgtcatttactatagtcagagattattcggtggtaaaaaattatcctgaaatgggaataatgaaagcgggcggaggtgaagttatctcttcaacctataccgccatcatcattaactctttatccggaggaactgccgaggtgcagtttagtgtggatgctgacggggtggggagtggtctgattaacttttcatttcctgtagatggttctggcgatttactgaaacaggccgagcaggctctggagtctgatttaaaagaaagagattcagtaagcagtaattaa

SEQ ID NO: 270500 - DNA, 2250 bp, Klebsiella pneumoniae
atgaccagaatgccagaatcctcatcgtgggaagaagagattgagcttatttccagacgcgagcgcgtttctggagggctggacggtgttgcaaacaggccgcttaaaagcctggctaatcgcactcgttacctcaaagagcgggcagacgagtcagcgctgcaccttgacgagaaagtcagcgcggtcaagaccttcgctgaaggtgctacgctggagtctccccgcgatgaaatcctgtacggagtttaccgcctggtctggacgggagattttccaaagaccgtaccagcgggcagcacaccacagggaacgggtggcaccggaggcgggcgctgggcctatacttctgatgcggtgattcggcgggagctggggtcgcatgacctgccaggaggcgcagcggtggcgcttaaatatggcactgttgccgatgcaataaaatgggtcacgccagagatgtttggggccgtcggggatggcgtagctgatgatactgaggcattacaggccgcacttgacgcgtgtgtcgattttgagtttaccacggatgtggacaagactgaccgcagcgcttcaacggtaaattattctctgatgctggttggtaaatatcggtatacccgaacgctctatattaagccgtacacaaaagtagctggcatttcacagtcatatttgggggatgccaccaataaatttactgcgcttattccagactttgacatgacagacgggtacgcccttgaaaccgttaattatgatgcaagcggtaacttgttaattaaagtagacaagctgggtgccagcgccagtgatgacagacttgttacacgctgtccggggctggtattgcataattttgcttttgttgcaggtgctaacacgcgcctgaagggctttattaatctcagaattgccctgggggcctccgttattcgtgtgcaggggcgcgcaccgacaaaggtcgccaccggcatcagcattacctgttcttggaatggtgcattccgggactgtgtttttcgcgccggggctattggtcttgttggtcgggataacgtcacaacgtggaaagtggataactgctacttccagacaacccagggagataatccgttcccttggtttactgacttccctgaattttatggatacccgctaatgcaggtcaaaacaactggcgtagccacgtcctggtgctccatgcattttacagactgcacaattgaaaatgcacaacatggataccggattcatcgttgtcagggaggaagtgagtttggaacatacttcgaaaatattgaagagttttgctatgcaatgatggaaagcgtcggcagcctgacgcctgcatatttctatcacaatacgggcatggtcaatacctgtgaaatggtcttctggtcaggctctgcaagaaactccggcagtatagatatgaccaatacaaactactggtcatataccgttgacccgtacaacttacccggagccagtaaaataaaagtgaagacggctggcgatttgcgtacaaatcaaaaattacgttatccgaataaagttattctggattgttattcacagttcagcggttactgtgacatctacgtatctgcatccgggaacgatgattataacggctacagctctacgtatcctgtcaggacacttcaggaggcgttattgcgttgccagccaaattacaaaaacagaatttatattacagccggaggcgtcgttactacgacaaaatattattctgacggataccagccaaaccgccgtttttttaagaacttcgacattcaggttattggcgatgagacaagcaagcctgcactgcttatcggggaagatgcgggctggttatcaggcattggcattcggggcggacgaatctcattcagtcatctgagcattacgatagcgctgtcctcttccgttagctcagctgcgacagctttcgcggcgctggtgtatgcctatggggactgtgaagtttctcttgataactgcactataaccggcagtaatccagcatataagccatttctggtatctccggcgcagaaaccgggcatcgcaaaaatatcgctcagcgattgcgtattattaaatatggatattgtccagggtaccggttcaggtttgtatcttgcctatattctgaatcatgttaactgtactttcacaactgtaacggaaggtaatacgacagggaagatatattcacgccccattgcataa

SEQ ID NO: 270501 - DNA, 597 bp, Klebsiella pneumoniae
atgaataactcgttgatggcgacagggtcgtcggtgctggaacagcgagcagccgaagcgtgcgccgtcatcagtgatttatctgtcccgctacgtgacttgtggaatccgtggaaatgtccggttaagtttctgccctatctggcgtgggcgttttcggtcgatagctgggatgaaaactggagtgaggcggaaaaacgagccgttatcagtgaagcattctggctccatcagcgcaaggggacaattgctgctattcgccgtgttgtcgagaaaatggggtattcactgaccattgaagagtggtgggaggttgccgaccccgcaggaacctttcgtcttgaggtcgatatcaacgatattggcctgacggaaaaaatactcaatgaactgacacgactgattaatgatgcaaagccggtcagcagacacctgactcaactgaatatagcggcaaaagtacgcggcgatatctgggtcgggtcaacactgtgctgcggtgaaattatcagtatttatccggccgattttgagccggaagaaaacattatttataacggcgtgatttttcacgacgataattttaattacgggtaa

SEQ ID NO: 270502 - DNA, 642 bp, Klebsiella pneumoniae
atgaatacgttatccacgatacaggagctcgctcgcgcgattcgcaacctcatccgctcaggcgtggtgactgaggtcgataccgtgcaggggctgtgccgcgtacaaagcggcgggatccagacgacatggctgaactggctgaccacccgcgccggtcggtcgcgcacgtggtgggctccttctgttggtgagcaggtgctgctgctggcaatcggtggtgagcttgataccgcgtttgtgctaccgggtatttattccgacgacaaccccgcgccgtcggcctcggcggatgcgtggctcgttgagtttcccgatggtgccgtcatgagttatgagccggaaaccggcgcgctgaccgtcaccggcattaaaaccgccgatgtgaccgcatccgattcggttgccgtcagcgtgccggtggtgctgataaaagccgagacccgcgtcaccctcgatacgccggaggtggtctgcaccaataagctgacgaccggcacgcttgaggtgaaacaaggcgggaaaatgtccggcaatatcgagcacagcggcggcgctttcacatcaaacggtgtgcaggtagataaacacggtcacggcggcatcaggcacggcgatgaatggacggagggcacccaatga

SEQ ID NO: 270503 - DNA, 159 bp, Klebsiella pneumoniae
atgccggaaagtgacccgaaaaccaatggcgacctgagcgccgatatccgccgccttgagggcgcgctgacagcctgtgcgctgcaggtcaaaaccgtcaaacactgtcaggatgaactcgatgcagaagcacaaaagcctgcgcaaagcgctgattaa

SEQ ID NO: 270504 - DNA, 204 bp, Klebsiella pneumoniae
atgaaagtctacgcgatgcagggcgacaccctcgatatgatttgcgcccggtattacgggcgcactgagggtgtggtcgagacggtgctgcaggctaatcccggcctgtctgagctggacgtcattttgccgcatggcatgcagattgacctgcccgacgtggcgtcgtcacccgtaacagaaactatcaacctttgggagtaa

SEQ ID NO: 270505 - DNA, 249 bp, Klebsiella pneumoniae
atgactgaaaatcaacttgctgaaatgtttgagaacatcctctcattaaaggccatgacaaaagaagtcatgactgtaaacgagtgcgcccaatacaccgggctatccgtatcgtatctctacaaactaactcatagaaaactaataccttttttcaaaccaatgggcaaacgtctttacttcaagcgtacagaaatagaccagtggttgctgcgtaacaagcaaggagagctctatgaagcaagctaa

SEQ ID NO: 270506 - DNA, 141 bp, Klebsiella pneumoniae
atggcaagagtattagatgaaatcattgagcatgagaaactggaggttgttcagcaagctcatgaaaaagcaaaggaaattataaaagatattgatgagaaggctgaggcgtcagccgctgacgataaatcagacggctga

SEQ ID NO: 270507 - DNA, 2007 bp, Klebsiella pneumoniae
atggcaaaagttaagattccacagcagctcgcccaagcgctattgcccgacaacacagaagacatccttggcaaagatgatcaaaagaaagtcgcagatgttgcgaagaaaatcatcgtcgatgcgatagaacaggggatcaggccgaagatggatgcccagagcgatgaggggagtgtcgcattccactacaacctgacgttcccccaacaagtcagcgccaaaataagaacgctgatgcgagagcacaaacagcctgaggggctactgcttttttatattttgagcgctgggatcgaaaaggagctctacgtcaatcaccagcttacctcggaagaaagtgagcacatgatggacgtctatctgaatccccttgcgatgaggccaagaaaggagcagctcatcttggcggatgcgataaatgacaccctcgccaaagggggcatcggcatggtcgaaggtggaacagggataggtaagacgctgaccatccttgccagtgctaatcagatcgccgctgcaaaagggcagcgctctgttatcgcaacaaacaccataagcaacatccagcagatggctaagacctatgagcgactggtggcggctggtgtgaagatggttccgcttagggttgtgttgggaagaaacagcttcgtgagtgtggacaaactgcgccggtatctggccgatgacgagatccctcaagaagtcctccatgctgtcgaacgatggatgcaaactggcctgcttcaagagcgtgaaatcgacgccgctcccgcatatttgcttgatgagctggtcagccttttccccaatgctgctacgtctgaggtcgtgctgggggtggacgcatcgagcgaagacccagggtatctggcctataaaagtcagttcgtgcgagaagatgtttaccctgaaatcgtgctctgtacccacgcaatgcttgccatagatgctaaaactcgacgcatcaggatcgcacagagcgagcgtgacttgactgacgagctagcccaagatgtgtataaaaatgatgaagatgtgttgcctatataccaattcctttttatcgatgaagcgcacctccttgaggaaacagtgtccaaaatttttggcgacagtaacctcactcaagcttgtatggagggaatgtggcaacaggtgtcagcggccacttgcatcagtgatacactgtatcttcccaagttgggggggttcacatgcagttacttcgcaaacaacttgtttatccccgaacgtcggctcaaaacctatacgcctatcactccgccgtggctgaaaaataacgtccatgaaatttgcctgcctccaatggagctcgacaaggcccagcgttttgtgccggtaggtcgaaagcaaagcaatgatacgcctgagagccgagagaaaatgcacagcgcctggctggacaacattgctgagcaaatcgtgatagctcacggccaaggtgaagggggaacgctggtcctgatgacgtcgtttgccgatgtaaaaggcatctcagaaaggttgggtgaactaaaaaatccgcttgtcaaagcgaatagggacattacaaccgaagcgcagaaggttgcctatctgaatgctctgaaagctggtgagaagccgttatggcttgcattgggcggcgcatggaccggccttgacatcaacggcaagcatattgggctgagcgatgaggaaatcgcagagaaagataatgtgatcgccacgctcatcattccgaagctacctttcggcctgaaccgttcattgtcttaccacgcacgtctggctcgctcccgcaagcaaggggcaatggacgtcatggaaacggttatccgcttcaaacaaggccttggacgcctgatccgcttggagaaccagcctaaaaaccgtcgcatactggttttggatggcaggctgaggatgccagaatacaaaggatttcttgggcctttcatgcgtgagattgagtcctatccaagagtaaggtcgatctga

SEQ ID NO: 270508 - DNA, 2112 bp, Klebsiella pneumoniae
atgaagaaaaaactttcacatgtgaaagtttttgtgcccacagtcttgttggccgcagctttcacactcacagcttcaccaactcgtgcggatgactacctgatgaagtttgtcgtgaacggacaaaacaagggggaataccttgtttctcgtgaagtagatagtgccattgctgaaccaggactatggcatgctgctggtgtaaacacaaaagagcaacttcccttggaaaggttaaacaatcttggtcatgtcaaaattgtttggtcagaacaaaccatctacttttaccctcgtaacagcgtagccaaagccagaaaggtcaccccagatgttacaattgagccagacgtatccagtctggatgtaaaatcctttgactactttctcacctatcaaagcaaaggtgatatttcgggtagcatcacgggaacaggccgagtcggaaacctcgatgtagatattagagctggactaggagggcaagagtcatatttctccagccagtggcacgacgaggagaacagcaacgtcaaaggcattgaagccggtcgtgttcagcgttacgggctggatggtttctcactcacgaatgaaagtagccttgccactggatcattttctaatgaccaaattgagctttattggcctgttggaacaagggtagatgtttaccgtgacggaacctatttacaatctctggttctggatagcgagccgttctcttacaaaatcgaactggattacagcaataatcaatataaatttgacgctgtattgcccgatggcacaacggacaccaaaacagtagaaagagccatttctggacgacttgcacccgtaggagggctcaactatcaattggctctaggcaagtctccaaccacggatgaaagcaaactaattggacacttagcctacggcgtgactaatgaattgtcacttttcgctggtcaggatgagcaggaaagacagtatttttccgctttatattcaagtgataacttttcatttgagcctgcttggtatggcaatagtggatacgctctgagcggttcttggcaggatgacgatctttcgatctttggacaactaagtgatttagacaactatcaattacgctctgttagtgtttcatcacgctctctgtttcaaccaactattcagtactcttcccgcacgcacgacggctatgaaactcaggaaacgacgctacgcacgtatcacagcacgcgcattgagacactgaatacatcaatatctttatctccatactattcgaatcgtttagccaatggtgtcagatccaacatctttggagggcggatgcttgctagcatggaagcgggttggcaggttttggcgtcttatgagcgtgaaaataaagatcttgatggtattggagatatagaacgcttcagtggagaggtatcaaaacgattcagtttggggcggatcacctaccgctacacggcaagcaattttggtcatgggtgggaaggtcagcaacaaagcttgcgtgctgatctttggagttggaggtttgcaaccctgtctgcttcgttcaatcattcgcctagtgctggtaataacattactttatcaattggtggtagctttggccgcaccggattccagcgaactccccagagaagtcaagccacgcttgtgttgtccacatgtcgggatcttaatgctgatggtatttgccaagaagatgaaccggaagttaagggggttgttgctagtttggatggtcgccaagtgaaaactccagccattattgattctctgactccgtaccgtcggtacgatatagaagtatctggagattttggattgtcgcctcgatacaattccattcagtcaggtcggctagttcgtggagggataaatcatcttcgcctgcctttgtctgaagttagggaaattgaaggccagcttgatcgagacggaattagagttgctcttgttgacacagaaacgggagattttctggaggaacaaaccactgaatttgggggatggtatctgttttatgcaccggctggacgcaaggtcaaggttgtggaagaacctgagttaaaaccggctaaaaactttcacatgtga

SEQ ID NO: 270509 - DNA, 585 bp, Klebsiella pneumoniae
atgcaagtttttaaatacaccgccctgtcagtagttatttccctatcgtccgccgcttttgctggtacaggcacgggaacttctcaaatctcggcaacgccgccagctttgtctgtggtcgaagttcagccgtacacaatgacgttggaacgcttgccgggagccgccccaactggcgggttctctttaaaaagttgggcgacttatttggcgcaaaatccggaggacacagtacagcccggctgcttaaaagtgacaggagatatggataaatcggtcgggattaccatcactaacctgtcaaatcccacagctccaggtggagcagctttaagcttttcgggaacaccgaaaattaacctaactacttcaactgttgactgctcagatgcgatctcaaaaacgagtacaggcgtgggagttaatgcagcgccagtggcagcaaccacatcagcttctggtgagctctacatagcctggtcgtatcgtcagccagccacggcaagcaccggatacatgcagctcagcacgtgggaggaagggatcttttctggaaccgtcgatcttcaaatcgactaccagtaa

SEQ ID NO: 270510 - DNA, 567 bp, Klebsiella pneumoniae
atgcaatccaacatcttcaaaccattgccatttttgccagctcgacatcatcttaaccgttgggcgtttggctattaccttgtaaaaaaagggttttctacttgtattgtcatggaagaaacatcttttacttacaaacaaatcagaaaaataagagaagatttagccattaaggagcatcgcagagcgagttacgggcaggatattctgtcaaaggaggactgggtgagttattcatctgcaatacaagtttactgtgaattacgcgagaaactaactcatcttgaatcagttcttgaagcatatacatggctcaaaagtaaaaaagactttgatatttcagggttctacaaagcttgtgaggaaatcagtataggtgaggctttttttgttgaatgtgcacattgtaaaaatcaagtttttagcgggcctggactaagagataaagttgtcagtaaatactgccctgcttgtggagaaaataattgggagcatccaaaaagtgagcatcgcatagggcatattacttcaactcccaagcgtagtcagcaacaggctttattttaa

SEQ ID NO: 270511 - DNA, 126 bp, Klebsiella pneumoniae
atgtacagacaaattacaaaaattgaaatggtaatcgctggattactagtcgcaagtttgtttggagtggacataatcagaatcgctagcaagatttttacttcaatactgatggcgagcttttaa

SEQ ID NO: 270512 - DNA, 747 bp, Klebsiella pneumoniae
atgagcgtcatccgtcgagctcaggggcaggaattcaccgtcctgccaaaccccactattcgcgatcaacgtctctcgctcgacgccttggggctgctagtgaaactgatttcacgtccaccaaattgggaggtgcgcccttaccaattacaaaaggagtgctcaattggcagagataagttgcgccgcctgctcgctgaactggaaaatacaggctatctggtacgaatcaaatcgaggcgatctgatggcacatgggactgggtgtccgaggtgtatcaggaggctcaaacaaccacgaacggaaattcagggcatggtgcaaccatggacgtgtttcccgttgatggatcagccgtcaatggttcacccgtcgccggtaaacacggcgatataaaaaagacagaaataaaaaaaacagaatcaaaagaacagattagagagagtagagaatgctctccctcgcaaaaatttacgcgtcgcgatttagttatcaccgatgaaatgcgtgactgggcggcatctgtaacaccgctcgtgagtgttgaatgggaaagtcagatttttgttgatcatcctagtggtcaatcccaacgattcaattcaactgaagcgctactcggcgcttggcgcacatggatgatgaggggacaaaagtacgctgagcaacaacagccgacgtcccaaggacaatcccgctctctagttgacgagttgagcgacacatcatgggcggagggactgtaa

SEQ ID NO: 270513 - DNA, 705 bp, Klebsiella pneumoniae
atggccgctagaaaaatcgctgaaattatttctctggatagtcatgcccggaccgtcaggtttgggcaaaatgaagaggacgctagaccttctcgcaaagaacgtcagccggatcctgatcaactgcgggccgcagcgagtgtgataaatcatttgttctcggagcttcaaagctgctttccggcttggcgtcagaccttcacatgcaaagcagatatcgattctgccaaacgcgtttgggtgcgtgggcttgtggaggcaggaatccattctgagcaacaactccaatggggactgagaagagctcgacaatcagagtccgccttttggccgagcgtgggccagttcattaagtggtgcaaaccagatccagaggcttttggcttgccaacatctgaagccgcgttcaaagaagcgtctagaaactcccatccggcgtcggctgactgcaagtggacgcatccggctgtgtacgtcgccgcgcgggaggcaggaaagttcgagcttgccaatcttcctcgcgataagagctggccccttttccagcgagcgtacgctatcactgtccgccgagtcttggagggggaggacctcagcggagaaattccgaaggccctaccacaaaaaccggaaccgcgtccggtcgatccaaaggtagcgcagcagcacatcgaccgcattaagcggatgctgaaacgacgttag

SEQ ID NO: 270514 - DNA, 2121 bp, Klebsiella pneumoniae
gtgtcacgattgactgacctaattgccagcgtaaaagcaaaagacccagctcttggggcagacctggataaagaattcaaggttctctctactcgtcttccgtttggattgaattttgagcgtcatagaccggaggcggtagagctgccacttcgacctgtccgtcgaggagataaggtaagagtgcttccaccacgaggagccacggagagaggtgatcagcgtctttggaaagtcgtgtcgatagcaaaatcggataaaacggctgaattagagttgattgagagcaaccagaaagagcggctagtgtcctcattagctgatttggtagtcgtggctgaattccgagacaaaatatatccgggccttactagtacgggcggagtgaagcgtggcgaaggaaaaccatgccatacggtaatcaatggggaaaactaccatgcattaaaagcccttacatttactcaccggggaaaaattgacgctatttatatagatcccccttacaacacaggggccaaagactggaaatacaacaatagttacgttgagtctgatgatctttataggcacagcaaatggcttgccttcatggagagaagacttcttatagcgaaacagctactcaacccagcggactctgttctcattgtaaccattgatgaaaaagagtacctgagactcggcctgttactggagcaaatctttccagaagcctccatccaaatgatcagcagcgttattaatcccaagggatcagcgcggtccggcaggtttagtcgagtagatgaatacatttattttgtctactttggtaactctgccttaactgcttggcgaaccgacatgcttcgcaatgaagagataacaaaccgcaaggttcgctgggctggtctgatgaggaacggcgaaggaagccggagagaaaggattcccagcatgtttttcccgatttttttggatgctaagagcggagaatttcactcagtaggtgagccgcctgaagctgaaacggatcgaaacgacgtgggagtacctgaaggtactgtagcattatggcctgtagataacagcggtcaagaacttatgtggcgtcttagccctggatcgctaagggaatacttgaaattgggtcatgctaaattcggacgtcgagatcccaaaaccgggcttagacctgcatactatttgcagcgtggcatccgtagcatgctgaagtcaggtgaggttgtggtcgctggcaaggatcaggagggcgcgctggagcttgaatttgccgacagcgtcggaacaagaagtccagcgacagtctggaacatggtttctcacagtgctagcgaatacggcgcagggcttctgaaagtccttcttcccggtcgccgattcccgtacccaaaatcgacttacgccgtggaagattcactaaggtttttccttaagaagaaacccaatgcaatagtgctcgacttttttgcaggttcaggcacaacgtgccatgcggttatgcgcttgaataaacaagatggtggacagagacagagcatctctatcactaataacgaagtatctgctgatgagcaacgagcgcttcgcaagcagggatatcgggctggtgacccagagtgggaacgcctcggaatttgtgattacgtcactaagccgcgaatcgaagctgctattacaggtaaaactccagaaggcgaagaggttaaaggaaactataaatttacagatgagtttccaatatcagatggtttcgaagaaaatgctgaattctttacacttacatatgaagcaaaggaagccgtaaatcataatttagctttcaaccgcatcgctccattgctttggctaagagcaggctcggctgggtctagaatagaccacatcccagataaagggtgggcagtcagtgaaacatacggagtcttagccgtgatagacaaagctactgcatttatagagcacatacgcgaagttaaagggctgcgtatagcctacatagttactgatgatgacaggcgctttcaggcgattgcgcgtcgattgccaaaaaatgtacagccagttcgtctttacgaggcatacctgaccaactttagctttgccaacggagaataa

SEQ ID NO: 270515 - DNA, 2583 bp, Klebsiella pneumoniae
atgaagtttactctaaaagactatcaaactgatgctgttagagacgcactgagtaacttaaataaggctcacagatattggcatagcgaagcagacaagacagccttttccttaactgccgttactggtgccggtaagactgttatggcggcggcaacttttgaggcgttgttccatggcgacgatgagctcgattttgatgcagatccaaccgctgtcgtagtatggttcagtgacgatccgtctttgaacgaacaaactcgattcaggctcatggagtcaagcgaccgtatcaatcatagcgatatggttgttgttgagaacacattcaacaggcccaaattcgagcccggcaaaatctattttttgaatactcaaaaactaggaaaaaatagtttgcttgttaggggccacgatcaagctgagttagaggaaaaagcaggtggcctatttccagagacaagacccgatctgagggcatacactatctgggataccatacaaaatactgtggaggaccccgaacttacgctttacctcgtgctagatgaagcgcatcgaggtatgggtaaaccaaacaaggaaaaaggaactattgttcaacgtcttatcaatgggtttggcggtgttcctggtattccagctatttggggtatctcagctacagttgagaggtttaaccaagcgatagaaaaagcagttaaaagaaccaaactccctgacgtaattgtcgattcatcaaaggtacaagagtcaggcctgataaaagacacaatattgcttgatataccggatgaggttggtgatttcgatacagttttggtgagacgagcagcggataaactcaaggaatgctcgattttgtgggcagagtatgccaaacatcaaaaggacgcagaaacggtcgttccgctgatggttttacaggttccaaatactccggatcccaatgaaattggtcgagcccttgaaacagtttttgagcgataccccgagcttcctgcaagctccgttgcgcacgtttttggagatcacactacgcaaagatttggtgaccgagatgtgccatacatcgaaccccagcgggttcaagactcgacatgggttcggatcctgatagctaaggacgcgattagcactggttgggactgccctcgggcggaagttatgatttcattccgagcagcgagtgacaaaacacacatcactcagctacttggtcgaatggttcgctctccgttggctcgcagagtcccaggtaatgagagattaaactctgttgactgcctgttacccaaattcaataagaaaacagtggaaagtgtcgtagagaccttaatgagtggtgacgacactcttcctgctacacctgggcggattctggtcaaccctgtggaaatgcttccgaaccctgaagtagatgatgtcatttgggataaattcgagtccttaccttcgcaaagccgaccacagcgaggtgcaaaaccagccaaacggttaacggcgttggctcaagagttagctgatgacggcttgcttgaaggcgctggaagtaaagctcatgctgcattacacaaagcactcgacgattttcggatccagtatgaagataaaatccaagctaaacgcgagtcggtaatgactgttgatggacgcacagtagtcgctgacatgaagggtaaaaataagaccttcaatcagttctgggaggatgctgatatggctgtcatcgacgacgcctaccgacgtgctgccagagtatttacgcctgacgtttcacgcacatacgtcgagcaccttgcaagtcaagttgcaagtgttgaggaagaccctgaaggttttcttgaggcaatagtggaagcgagggtaacagtcgccggtttaggcctcgtaattgaagttcaagactatttcgacgacaaggcgaacacgctcgttaaaggttggttgcaggaatactggcctaaaatcaaatgcctgtctgacgatagaaaagagtcctatcgtcaaataatagaaatgagtgaagagcctcaagatattgaactaataaagccagaagcgaagttcgagatgacacaggctaggcatggtgataaggaatatgatttaccaacgtggaaacggcatttgttgtgcgatgagcatggtaacttcccgtctgatttcaatgactgggagcagcgcgtaattgagaaagaatcttctcatccaggatttctattttggtatcgcaatccacagactccggggcaatcatcgctcggcatcgcatatcaagatgcggaacagcataagattatgcggcctgactttctgttttttgctgaagaggacgggcaggttgttgcagatatagtagatcctcacggactacaccttgcggatgcgcttcccaagctacaaggtttagctgtttatgctcaggctcatgcggactctttccgtcgaatagagtccgtcgcagaggttaaggggaaactacgagtattggatatgaccgatgacaatgttcgcgcagccgttaaagatgcgcaggatgcaactagtatctttatgagcccgctggcggacgattattaa

SEQ ID NO: 270516 - DNA, 171 bp, Klebsiella pneumoniae
atgagtatgagacacgtaaattggcaatttctttcctgcgaatggttgaaacaattcaccccgctctatcgagcgggggccccatctcacagcaagaaaaatccgagctttacccggatttttctccacaccccactcaccgcgagtggtctgtctcatccggcgcagtag

SEQ ID NO: 270517 - DNA, 1077 bp, Klebsiella pneumoniae
atgattgcaataggaaatatcattgcagaccgctataaggtattgaaatatatcggtaagggtggtatgcaaaatgtatataaagttcttgatctcaaactagatttggatctagcgttaaaaactccattaccagggctagaaagcaaaagatttctcaaaagtgcaaaaattgctgcaaaggttaatcatcataacgttgcaaaaacatttgattatgttgaagagaatggaagcatattcttagcagaggaatatgttgatggtgaaaatcttgaagagaaattgaagcattttgatttcttagatcctcattatggtgcgtgtatactacataatcttgcgaaagggatattagcctcgcatagagctggagtgattcacagagatttaaaacccagtaacattatggtatcgggcggtgtacaaatagctaatttaaaaattactgattttggaattgccacactaactcaagagcttttcgatgaagctgctgcaagcggagatctcacaagatcaacatctggaacaattaagggtgcattaccatttatgtctccagaattgatgtttggtgaaaaggggaaagctatagaagcttctactgatatttggtccttaggtgcgatgatgtttcggcttttaacaggcgaatatccttttggagtttacttagatgcggcagtaaatgtaaagacaaaaaataggatgggctggcctaactttatgacttctaacccacaatatcaaaatctttcaatggagttgcaaaaaatcatagatacctgtttaaattacgatccaagctcacgaccaaccgctgaagaccttgtaaaatactgcgaaacattatgttatttatcagagaagcgttttgtcggtcgagtaaataatttaatacaaggagggatcagtggtttcatagatggaacacctaacaactcattttttagtatggaaagtgtttacggttctaaaacaccaaatacgtcagatcgtaacactgtttgttattctacttttgaagggcatccttgtcctagggcccatcctgtaattctttggaaaaattga

SEQ ID NO: 270518 - DNA, 1059 bp, Klebsiella pneumoniae
atggcgattaagtatgtactccctgatagatactcgctaaatcactcagaaattagtggagggatgggcgatattctaacctgtctggataatcacttagatagaaaagttataattaaaattcttaaggatggcgaagaagagcggcgcttattggatgaacaaaaagcgttactcaaattgcgttcgaaacatgttgtccaactttatgatttaattgacttacaggttgaagggaaaactaaaaaaggtattgttctcgagtacattgatggacatgacataaaatatgatgctaaagaaaacataaaagacacattgaaaaatctatggcagatatcatgtggcctaagtgatattcattcagctggagtaattcatcgagacataaaaccaaataatatcagaacaaacattgatggtattataaaaatattggattttggtttagcaagaagctctggaacagaagcattcacgcattcagtgatcggtacattaggatatatggcaccagagttatggaagagaaaaaatattagcttcgatgaaatgattgacgtttacgcatttggtgttgttgtcctagatttattagggattgaaaaacctgacgagttatatgaacaaccacccatgcctatcactggtatcgatagcctagaaaaaatattaccaaaagatctagcagtcatttttaatagttgccttgactatgataaagccaaacgtcccaaaatgtcattagtaagagacctcattgcgaagcatttattgaaagatagacacagagctttgttcgtgcttaatagcaagaaatacgagattaattcaaaaaatagaaacgtaacaatcacttggggtggtggtggatctatgcagatcttttatgatggtttcgattttttagttgtaaagattactggcagtgcaactattaataacaaagctgttgtagttaataaaaaattcccgagttgcagtgtaattacattgataaatggtaagtccagaacatttgtaacatttgatatatcccgaccggaggtaatatcatga

SEQ ID NO: 270519 - DNA, 1152 bp, Klebsiella pneumoniae
atgtttacagaacgacttgcaagttggttagctcgtccttcaggaaaaagggctatcaaccagcccgaaggacttagcgccattgtcggcacagacattgggcttgttcgagatgagaatcaagatctcattgcagcaattagggtaaatactccatcaaatgttggtaagccattctttgcaatggctctacttgacggtatgggaggtatgcaagaaggaaagaaatgtgcaacaattgccctttcaacttttttttattcactcataaaatatagaggtgaaaaattagagcaacgaataaataaggcgactatcgaagcaaaccatgctgtatatggatatgctaaagggaatggtggttctacattatcagcgattatcattgaaaatgaagtcaatcctgtaattgtgaacgttggagatagtcgaatttatagtttttctcaaaatgaaggtttgaatgcgataagtaatgatgattcactcgaagccttaggtggtcgaggaagagggctactccaatttattggaatgggtgaatcgcttaaacctcacattaacacattagatattagtaataacaaaataatattaacttctgatggtattcatttcattacccataaagcttttgaagagatactattaaactcgcctaatgcttacacatcctctcagaggatatctgaatatgttcgctggtgtggcgcaaaagataacgcatcactaggaatagtaagcctcaatgatataaagaataatctcaatgagcacaaggacataggcgtcgagctttgggatccgcatggaaatctacatataatgtggatgaaaaattatcctgcggctcaaaattatttctctcaaaatattgttgatgaacaagataacccctcagaaaacaatctagctgaaatggaaacacccccaaccaaatctgatgatatttccacaatacatcgggattctcaaaaaaaacaaggagaactcttctcacctcaagaaaataacgacatcaatgataatcctgtcaaaaaaaatatcaacaaaagaaagccaagagggaaaaagaaaactatttctaaaaatagtgaagaccaatcagtgattataaatatcacggacgaggaaaataaaaatggcgattaa

SEQ ID NO: 270520 - DNA, 567 bp, Klebsiella pneumoniae
gtgaccaccatcacattgcagcaggccgcagcggcctgccagaccaacaaagccgcctggctgaaccgtaaatcagagctggccgcggcagaacaggaataccgcgaacagcttctggccgttgatgaccccattccggccagaatgcaggaactgcgcgacatcactgacatcaaaaaatgggaagtgaatcaggctgccggtcgctatatccgctcacatgaagaagtgcagcgcatcagcatccgcaccgggctgaatgacttcatgcagcagaacggcgcagcactggccgccattcttgccccggaactgatgcacctgagcggccagcctgaaatggtacgcaaacgcgccctcgaccgttcatcagaatacctgcgtgaagccctgtcagtgtggctggccggagggcatgacatcagttattcagaacgggacagcgagattttaacggccgccggataccggccggaagcgccctcacgcgatgacagccgcgagcaatttacacccgcacagaacatgatttacacccgccgacgtgccgacatggccgcgcagtaa

SEQ ID NO: 270521 - DNA, 246 bp, Klebsiella pneumoniae
atgatgtgctgcccgttctgccgtcaggccgcccatgtgcgcaccagccgctacatgtcggaaaacgtcaaggagcgttatcaccagtgccagaatctggagtgctcggccaccttcaaaacccatgaatccatttttgaagtgattcgctcaccggtcgtggaagaaaaacccgccccggtgccgccagccgccacagccaccggcagggttaaaggctgttaccgctcaccgttccgccactaa

SEQ ID NO: 270522 - DNA, 735 bp, Klebsiella pneumoniae
atgaccaaaccgcttatgcctgattacctgaaaccggcactgaaacaactggaaagcgccagagccgcccatcttgaaaacgcccgccggatggatgaaaccaccaccgccatcagccgggcagcagagcagaaaaccgcactggagcaggaaaacgacggtgacaccggcgcatggcgcagtgcctttcgtgccggtggtgccatcctgaccgatgaactgaaacagcggcatattgagcaggtgacacgccggacgctggcgcaggaatgtgagaacctttcggaagtgctggcatttgagcgcgaccacctgcgggcagactgtgacagcacggccagagcgtggcggcaggcacatcaccatgtcctgagtcagtatgcagaacatgaactggatgccgcattacgtgaaacctgcggggcgcttgtccgggcgatgaaattaagtgtgctggtacgggagaatccccttgccaacacctccggccatcagggctgtaccgaaccggaacaggcggtgatgcagcaggtaaaaaactggcttgagcggtcagttaaaaactgcaatatccgcctgacagatgaaccggtgttgtacaaaaccgggttgtcagcggccacactgccgcatatggaacacggtgtggcggccacgcccgttcagcgtcaggtctggcaggcgaaaatgcgccagcgtgagtctgacctgaaagcgcgggggttactgtcatga

SEQ ID NO: 270523 - DNA, 228 bp, Klebsiella pneumoniae
atgagacataccaccattagcgtcagtgacctcgaatgcctggagcatatgcgcaatgtcggccagctcgtcagcgacctgatgcaggtgcaggactgcgccactgtacatcgtgacccggcgcagcagttacagctcacctcggtgatttacctgatgaccgcccagctcgatggcgtggttgaacgctgtaatgagcgctggctcactgaggaggtacgcgcatga

SEQ ID NO: 270524 - DNA, 534 bp, Klebsiella pneumoniae
atgattagaccactcagaaatgtttttattgtgatttttattctattgctaaacggatgttccatacttgagaatggaaaacggtacagaaccgacttaacgcaaattccacttaatgaagatttaacaagggagtatccaaatagtaatggtagtcatccacacttgtacattccaggttcaaggaagtttgctgaactcgtgcaagatactggtgataactacattgatcatgcctatacaaccaagaaaatgcttcctcagtgggacgatatttttcaaagatttatagactggaagccgactaaaaatgaggtaattgaactgacagacccagtaactactgccacagcatttaggccattagggttaagtcataaagtcagcttcatggagataagaggggaaaaatatttggttttcactcaccatcaattacctccttttagtaatgatatatatgcatataatcaaaaaaatgtccttaagatgaggcaattatttaaagatcttcaatcagtcttggtagactag

SEQ ID NO: 270525 - DNA, 678 bp, Klebsiella pneumoniae
atgcggacacgctttagtctacggttatctccctttacttcatttcctttctcacaggccagaaaacataactggcctgaatattctctctgggacttcggtcccatctgtatcgtcggtcagcttatctgcatgggaccacggtcccacctccgtcgtcggttagcttatctgcctgggaccatggtcccacctccgtcgccggtcaggttatctgcctgggaccacggtctcacctgcatcgccggtcaggttatctgcctgggaccatggtcccacttccgtcgttggtcaggttatctgctgggaccacggtcccacctccgtcgccggtcaggttatctgcctgggaccacggtcccacttccgtcgttggtcaggttatctgctgggaccacggtcccacctccgtcgtcggtcagcttatctgcctgggaccatggtcccacctccgtcgccggtcaggttatctgctgggaccacggtcccacctgcatcgtcggcacattattagtttgggacaacggttcaatcaatgcctgtcacgaacaggtattggcttgtcgccatcaacccgttgagcggagtaatcacgcagcagggcggctattacaggcgatggtgaaagctctgttgggatctgaacgaagcatgttgagtgaaatttgcaaaatttag

SEQ ID NO: 270526 - DNA, 1227 bp, Klebsiella pneumoniae
gtggcatctatgacagcaaagcaggtggccgcacttgcaaaatcaggtgaaccaattagaaagtccgacggaaaaggactctactttgtcgttccagattcaggagcgccctattgggcccttcgatatagtggcaacggcaaacgtaaacaaatgactctggggcagtaccctagtatgtcgttggccgatgcaagaacagaagccgaagtgtttaaacgtgacttaaggcaaggcgtagatcccctcattgcaaaacagcgtcaaaagtggactggtatcatatcggtcgatgatttatttgaggattggtataaaaacgatttagcgccaaggctaaagcatcccaacattccagcgcgaatatatcggaaggagattaagccagtcatcggcgagtttaaaatccaggacgtcacagctctggatgttcgagagataattcaaagagttagggatagtggccgtttgaccattgccaatgacacgcttggttacatgaagcaacttttcaagcacgcattaaagcttgagctaaccgctaataatcccgctgcacctttcacaataaacgatgctggagggctcgaaaaaactcgtaagcgagcattagagctcaatgaaatagagaaaatatttaaagtatttcgtagtcatctaaacagttttggtagagagaactatttgttgtgctgtctcttcttggtactaggtaataggaagagtgaactgtgtgaggctccctggtcagagttcgacctagaggaatctgtctggcatatcccagagtggcgggtaaagacaggcatcgctatatctattcccctgccaagccaagcaatgacatggcttagtgagctaaaagtaagatcgatgggttctgaatacgtttttccagcccgacgccgaagcagtctattacatatggggcctgacaccctgaatagcgcaatctcaaagttgtttggacgagaagctgggaggaaggtccagccacccaacgtaatgggtgatatcgagcattttacagtacatgacttacggcgaacattcaggagtctcgctgcatcagtaggaacaccaaaccacgtcgctcggctatgcatcaatcaccggcagggaggtgtagacggtatatatgatcggtatgagtactttgaagaacggaaagctgctcaccagaaagttgccgatctagttacacctctcattcatctaggccaataa

SEQ ID NO: 270527 - DNA, 2040 bp, Klebsiella pneumoniae
atgagctacttaccaattgaaaggttagagcaattaagaattgggactgttggttttgtatcgcctagtgaaatcagagtttctttagagattgactctccagattctgtatcgcttcaaggaggttcacctcgtaattttcctcgaataaatagttatgtgcttataagtagtgatgatggatttcttgttgggcaggttgagtggattgccgtagaacattcaccataccctaaaagaaggggattgcaagattttggcttaatagaccttccttttccacttaagaagctcagcatcaatccagttggcacgttaagagttgatagaaaaaacgaaggtttcaagttcacaagaggaacagatgcttttccatcggtaggtgactcggtgctcctgcccactgacgagcaattaaaatcaataatcgagtcaggtgacaatagaagagtaaaaataggggatagccccctagctaacaatgcagaaataaaagtggaccctgataggctttttggacgacatatagctgttttgggcaatacaggtagtggtaaatcatgctcagtggctgggttgattcaatggtctttagatgcagttttgcaacagggacaaactcctaatgctcggttcataatacttgatccaaatggagaatacagtagagcattcggaccagaatcaagatataagggtaagctgttacgtgtagaagctaacactgaagctgaagagattgaacttaaagtgccgtcatggttatggaatagttcagaatgggctgcttttactcaagcaagttcaaaagttcaacttcctttattgcgccgagctctgagggctatgagaaatgatgttttgtcagaagatgatgtgacaattcaagctaaacacttctgcggcatccttcttgtgtcgataagacaattagcaagccaagggcagatatatgtaaatggcggtcatgcgaaaggttttgttgaaagtttaacctcatgggttaatagcctctccacgttaaatgaaaaaatcgataaaaggccttttgatcccataataaatacgattaacggatatctttccactcgaacaggagtccagtggcctgaaaaacccaaagtttccgacacagaccagttgattagcgaattaaaaaatgcacatgctgcgcttggcggcgatgagcaagagcttcttccgaaaagtgaagacgcgcctattcgttttaaaggtgacgattttgtagcatatcttgaggccttagctcaagaaacaggtacagagcagttcgtggagttccttctgactcgtattcgcacaatgttaggtgacactcgaataagcgcagtgacaaatgattcggaagagcctatcagtttaacagcctggttagatacttttctcgggaaagatagacaaggttctataactgtaatcgatttatcactagttccaaatgaaataatacatctggtaacagctgtaatttcgagagtaacttttgaagcacttcaacgttatcgaaggctacatggaaaaccacttccaacagtcatggttgcagaggaagcgcacacatttattaagcgctataaagaagatagtgaaagtcagtcagtctctgacgtatgttgcaaagtatttgagaaaattgctcgtgaaggaaggaaatttggtttaggtcttgtggtttcttcccaacgaccttcagaactatctcctacggtattatcccaatgcaatacttttttgttgcacaggattagcaatgatagagatcaggagcaagtccaccgacttgttcctgataatatgcgagggctattgagggaattgccatcgctaccatctcgacacgctattttactgggatgggcttctgagcttcctgttttagttagaatgaaagagcttaccgaaaagcaaagaccacaatctgacgatccagatttttgggatgtgtggtctaacactacagaagaacctcgtgtggttaattggcagccgatagctgatagctggcagaaccaagactaa

SEQ ID NO: 270528 - DNA, 1419 bp, Klebsiella pneumoniae
atgagcaatcagtatatcaaggttggcagtgtccctgaaattgttgagctgttaccaaactctaacgagcaagctgactttcacccttttatcctatcggcaaactgcgcatggggggagcaagacgcagaaatatcgatagagaaattgcgccaaaatattgagccttggctaacagctctcttccaatccgagcatttaaatttattgatcggggcaggcttaagtacatctattcaaatgtctgctacaggtttacctccagcaggaatgggctggataagcgacctagcagtatgtcaaagtgaaatagatacatttgctacccaagccgcccaaactgctggccgcgataagggaaatatagaagatcaaattagagctattaatgaacttattaaaggtcttgaaattctgacagtgctgaatacccctcaacctgaaaaccctccagctcctcatgttgcttatagaaatctaaaagctgatttggaagcactcaagggagagctttctcgatgcctaggtgagttttcaagatctgtaagtactggagaatacttgattaaaaatgctgaccctaagcgaaaagaggaaacattcaactatctggtgagcttcttgatgagctttgcaagtagaactgccactcgcgataggttacatattttcacaacaaactacgaccgtattatcgaagtaggtgctgagcttgctggtttaagacttatagatcgctttgtaggaagtatcgctccagtgtttcgatcttcgagattagaagttgattatcattataatcctccaggaatccgtggcgaaccaagatatttagagggagtggcgcgttttactaaactccatggttctcttgattggcatgaacaaaatagcgcgattaggcgctttggtttaccttttggggcacgctctgttgatccatttttagaagcagaaggtcataagagcaacagctatgaacaactcatgatttaccctaattcagtaaaagacagggaaactgctgagtacccttatgttgagctatttcgagatcttgcagcagcaaccagccgtccaaacagcacattagtcacctatggctatagctttggtgatgagcatatcaatagggtaattgaagacatgcttacagttccctcgactcatatagtcataatagccttcggagatccacttggaagaattatgaatttcattactaagagtggaaggaaagctcagatcactctgctaatgggagaccatttaggagatctcaaaactttagttgatcactatctacctaaacctgctattgataaagcatcaataaagatggctgaattgctcaagcaaaggggattcatgcagtcaaaagaattagttaattcaactgacgccgaggtatcgctatga

SEQ ID NO: 270529 - DNA, 387 bp, Klebsiella pneumoniae
atgaagttaaatggcattgaactgctcaatctagctgtagcacatgagctaaaagaagtttgggtcgtcaggttagatccgcccgatcagcccggcaatcgggggccagatggtgacctgctctggccggaggttttgctgtgcaaaagttctgacgatgctactcatttggctgagtatttaagcaaagcagcctttgatgatttttctgattttatggccgcagaagaagatggggaaatccattcagaaccccaggacgcagatcagtacatagttgcgctctgtaaaagcattcaaaggtacagatacgcttggctggtagagccgagcatcaatagcatctcacaaatcaccatgctcaaggaggcttttcaacatgattaa

SEQ ID NO: 270530 - DNA, 1017 bp, Klebsiella pneumoniae
atggagttacaacgccaaaagggagaggaagcaagaaaaggtgaggaaaaaagagacacgacttccacgtcagctcgacatgcaagcgaagcatcatctaggcagcaatatcaaaatgctcgccgtctttcagtaaaaacagcaccactttctattctcatagagctatttgcctatgtcgaaaaaggcaaatctataagagggaaaacagcaaacctcatcagaaattgttcgctcattacaaacccacaagcgccacaatttccagagctagaacccaaacccttagttacaagcgtgcaggcctgcatggcctggaacaaagaaaaaacactgggacaatgccaagttgagttgcagcaggcagctttcaactgggcgaccactggcatgccttcatccataagagttccatctgaacgactgaaaaaagaaggggtttgctgggcagtctacggacttgtagcagaagcaacgctggatgaaatatcaaacgggatttcggtcaacggaagtgacaagtccgcgataaaaatggcacttgcgaaggcgatgagcaaacagctcatacgtaatgacttaccagaaaaagcaatgaagatagtagatagacaatttggaaggaactgcgtagtgccatcgacacgagggtatcagtatgaaggaaaatacgaatggtcatgtggttctttttctgctgatccaaaaaatctgtcagcttcaattggcgagttcactgtctttggccgaggaaactcactctttggagagtcatgggagctggagacatcattaaatcacgacactcttttttcgttatcgactaccagaactaactcaaaagaagcatcaacgtctaatgctcagtatgcaagcaccgacaaccgctcatccaagtcccgtaatctttcaatgagaacgtccgagcgcttacaaactgaggaagcatccaatcttagcaactccacggaggcaagcttcacagtgtctcagccaggcataaaagggggtaattaa

SEQ ID NO: 270531 - DNA, 357 bp, Klebsiella pneumoniae
atgaaatctgtactgtatggcatcatcattgcctgcccaataacagccattgtgatctactttgccttaactggtaggcaggaagttcttatccaacaaaaaacacatgaagttcaacaacaaattcgctcggaagaatttcatcgtgacttctctaaggcttggtctgagtttgatctacccaaccagcatgataaggccctcctctcgttggaaaacgctgaacggaacgagcgaataaagcagctcaagaaacttcgctctcagttggaagcggctaacggtgagtcaatggatgacctcaaaggagacttagcggagatgagaaaagcgttaaaagaagctgataaaaattaa

SEQ ID NO: 270532 - DNA, 666 bp, Klebsiella pneumoniae
gtgccaaaaaactatcgttcaaagataagcaaagcagttgcttacaagaaactacaagggattttagaaaggctaaaagattggaatgagctttactcttcctactatgaaatagaggaggctgcattagttggcagtttggctagggatggggaaaaatttggtgatatagatgtgtgcttaaaaataaggcgcagccagcaattcagttacagtgattgtaaaaacgactacataaaatggagggagcaagttttaggctataagcctccagcgccttattcatcagcagagcgctgcatgtttgaaacggatgtcagtcgctttattaagaatagtgatgggcgaattgaaatgttgcgttgggaccagtttgagccaatatgcttaaccttacagccatttataaaaatagtagaaaatggccgcgtgatcgttgccaatgttgaagagttagaaggtcatagaataactttcaccgcagaacaagctctcgatatagtaaagaatggtgtgccagagaatccaagaggaacagaaggcatatactgggagtcttactgtgctgcactgaagctatatcctgcgtttataagagacgcaatattagatcgggacgcatactgtgccgcataccattcatttactgaaaagaatgaagcatag

SEQ ID NO: 270533 - DNA, 390 bp, Klebsiella pneumoniae
atgaaaaaagcaatcttagcagtggctaccgcatctatgctctctttggctgggtgcgcgacaaagcctggaattaacgacgcttcacttatggtttttaagttcccagcaagtggtgacactattaatgttacttacaagattgagcatggaaaagactgtcttattaccatggcgctcggccctcaaagtaatgagcagaaatatatggctgctctttatatggaatctcgacattgcctggaggatgtaaccggagagagccaagtgggattacatctggacctctctgatgttcgttacaataatccggcggtgattaattttagccttacagggccaagcccattagaggaacttgtagcgctcaaaccggataagacaaaataa

SEQ ID NO: 270534 - DNA, 813 bp, Klebsiella pneumoniae
atggaactgaatgaaaaagcgaaaattgcagcactctatcaggagcttagtaaagctgatgtttctgacccaaataagctggttggacagcttgaatcggcggccaaatcgatgatgcagagtatgaatagtcatctcattaaagatgagcagattaaaaccagtgtttttgatcatgctcacatgaatgagcagtatcgacagttatctgagcagcagatgaaaattgttgattctgtccagtcgctaataaagcaagttgaaagcatggggcacgaaaaaccaactcaagataactggctatctaaaacgctttctaactatcagcggggatatttagagaatgatatttttaccgaggccgcaggtgctttggtttggatggcggcaaaggctattcagaaaatcttttttgagtcagacaagacaaagcagcaacaatctgcacaggaactaaaaaaagatattgggaaaatgacaaaagcccttggtgttgagttatcacgccttcaattagaggtcaaaacagaacagcggcatgaactgatgtcagatgcgataagcaatgccaaacggttggaacaaagcggccaacagaaggaggctgataagctgatagttagtacctataacaagctatctcattctgccaagaaagagtacagccaatatcaacctcgcccagagcatcaaaaatctatatcccaggctcaatcgagagaaaaagaacgccaagctgcatcgtcaattcagcaccagcaacacagtgaaaaaagaatcgaccgcgacaaaaaccagtcaattggtcgttga

SEQ ID NO: 270535 - DNA, 228 bp, Klebsiella pneumoniae
atgattatcagtattttcagaaagattttcagaagagagcccacccctgatctgtactctcaactgtccagtcttgtggatgaaatgcggacttatcaggctgatatcgagcgctttcatgcagacatagaggcgtcagctagccattttgaacacattctcgaacccaataatttcattagcgcagagtgggttaacggaaatctacatgtaaaacatcgtcattaa

SEQ ID NO: 270536 - DNA, 1524 bp, Klebsiella pneumoniae
gtgaaagttctttttacgtcaatagttgtaatgactgcactggcaggttgctccgcgaccatgcctaacatcgccggcaagactaagacagatacgtcggtccagaaaattgaaaaaacagatccggacacacaagcggcactagccgacatgaaactcgttggattcagacaggaagacttcggcagtgaggaggcattcaactcggcagctaagatggtggcaaatttaggtgccgagtggcaaacctttaactcttggaccgaggcgttgctagagccgggttatcaatcagcagccctagaacgcattcgtacagccaacgatgagcgacgccaaaaagaaaggaaggtgaatttttcaaaaatagatcgctattccgacgaagcagataaggccatgaagtacggattccatgattgcttcaatgattctggtcaaatgttctcagtagacgatttcatcagccattatgcgcttaccaatgttgcctctttcaaaagcacggttgagttttatgatcgttgtctaatcaacggaggtagtgagtgtacggagaacggtcaggaactgagcttggataaattcttggtgaaccacaatacagccgctccacaagcgcgtaaggatctagcctttaatgaatattacgaatactgtgcagtgcggactccagtttcatctgttcaatacactatctcggctcatgataatgatgtgatgggcagccttattgcggcagcggcgtcgcgggttggttgggatagtgcgcttaaaatgtctcgtgatgtgttaaacatgcaatccagatctggagcaatgaatatgattgctgccaacttctataattatcaacgaactggctactttgatgcgtttgatatcagaccgttcgcaattgggcgctccagtgtcatctccgtaatgcacgtgggtggtatgtgtgcagcgtttggtacaggtagtagcagccaggatagtgacatcgaaattgatgagctcgctatcgcgctgggagctaaacctcgtcaaacgaatgggggttaccactgtttgaaatggacagacggtaactggaaacgtgttgctgattacattgctggcgaaagcgagggtcttcgtgggtttatgtcggtgtactctcctgcattcaacaactatcaggtgccgtattggagctatcccggtccgtaccagcacaactcaactattcagactcaactccagaaaaaaggaagtggtattgcaagttacacagagaaagtcatggagcgggaaacctgctctacatatgcggcaggccattcaggactcgcaacgtggtcttatcctgcctgtgattacctagaaaaggcaagcgagtcaatgaaggccaaggaaaaaatgatgcaagccgcaggtcggtttgatgcctacatatgcagcagatcagaggctgtgaatggttatggaaaaccggatctgtcacgttgtcccactgtcttttctcgcgaacagatagaagctggcgaacacaaacgctag

SEQ ID NO: 270537 - DNA, 3108 bp, Klebsiella pneumoniae
atgatgtcacccaaagcaataaaaagtgcctcgcaggcaggtcattactttgaaaaagacgattattatgtcgatggcctatctccgtctgagtgggttggttcgggagcagaagcgctgggtttatcaggagacgtgcagcgagaaactttcaaatctcttttggaaggccagcttcccgatgggcagagagttggaactatcagagatggtgagtggaagcatcaaccaggaacggatgtgaccttctcagcgcccaagagtgtttctatcctggctgaaattgctggtgatcaaaggttactgagcgcccacgataaggccgtgcacgccgctctgcgctatatagaacaggaatatattgttactaggaaccgtaaccgaaccgagaatagagtcgagtacgaaaaaaccggctcgatggtggccgccaccttcaagcacacaaccagtcgcgccctcgacccacaactccatactcattgcgtcctgatgaacataacacagcgcggtgatgggcagtggcgttccactgagaacaagcccctctttgttgatcagaagcacttaggcctcgtttatcggcaatatctcgctgaagaggtgcgctctttggggtatagcctggatcatgcaaaagatggaacttgggaaattacaggccttgataaagatgttgtccatgaattctcgaagcgttcagaggctattggggatgccttggaagcccgtggaaaaaccagagacacggctacagccgccgagaaagaggctgctactctagacactcgggatagaaaggttcaggcagaacggggtgaacttcttgaacgctggcatgctgaaatcagctctgagaagctgaccgagttgaaagaagtaatagctctgtcacggaaaaacattccaagcctagagcagcaatccgaggcaattttattgcgggttcaattagctaacgaagccgtcatgtgggcgactgaacaccttggggagcgcgacacatcttggacgcaccacgatttagttaaagtggctagccgttatgccggatcgcgagtgctactttctgatgtaaagaatgcgattgatgctgcaatcggcagtggtcagctaatagagaagtcggttagaacctttgataaggtcagcaagcaagagattgatgtgcgtggatatacgtcgaaatcggccatcgacatcgaggatgaggtactcaaggaggaataccttggccgcgaccgcgttcaggcattttgcagccgggagcaggcgactgtagccatttccaatgccgaggagaaggcgagtgaacttggatatgagtggaatgctgaccaaaggaaagccacggagggcattctgcttaccgagaaccggatcgtcggagcgcaagggttcgctggtacggctaaaactacctccgtcttacgaaccgtagctgatacagcgagggagatggggtatgacgtgagggggctcacacctacgaattctgctggtcagagtctgatagagggtgctggaattcagtctggaacgattcagtcttttctagcacaaaaccgcaacgagtgggttcaagaacggaaaactcgtgcccagatcgacaaaattaataagcggttagagcaaatcgaaaaagccctcgccaatccgtatgtggatgaaaaaaatggggttcgtattcccgaaaattcaccgctctatcaaaaacggctcgacgaactccgttacgaacgaacagagttgcagggagagtgggaggagcttaccaaggggctgcaaaaaaatccgcagctatgggtggtcgatgaggccagtatggtgggaactaagctgatgcgtgacctgctacagcgggctggtcaagtgggcgctcgcgtcattctgacgggtgatgtccggcagctcgcctcagttgaggctggcgcagcgtttcggcagctacagaaccatgggatggaaacctaccatctggaagaaatcgttcggcagacgaaccgaggtactcgggatgcggtgtatctctcccttatgaagaatgcctctcacgctctcagtcgattagaggagagcggtagcacgataaaggaaatggtctctcgtaaaaaaagcggaaagatcgaccatgagaaaagcggtgaagcccgcagacaagagcttgtgacggactacatggctctcgcaccggaggaacgagccaaaagtattatcctcgaaccaagccgagagggccgtcgtcgcacgaatgaattggttcgtgatgcccttaaaaaagaaggtgctctgggcgaagagctgcatactaaccagttgtcaccagtcgatgcaaccgaagctgaacggcgtgtggtgacgtcatatcaaaatgggcaaatcgtccggtttgcgcgtagcttcaagcgtgagggcatcaagaagggcctgtattatcaggttgttggtcgagataaccacgatatcttgcttgagaagttcggggccaatgagcaggctgagctgattcgcttctcccctgaacgatatacggccaagaacatccagatctttaacctaactgaaactggcttggccgttggtgagaagatcgtgtggcgtgataatgataagccgactggacgattgaacaatgacacggccactgttgagaagatagaaggcacgaacgtaaccttcaggctttcaaatggtaaaactggtgagtttgacatgtccaaactggctaattcccactgggatcacggttacgccatgactgttcacgctgcccaaggtaagacagcccagaacgtgtttgtgcacgcggaaaccaaccgggaagctttattgaacacggaacagttctacgtgcagatatcaagagcaaaggaccgcgtgtatctctataccgattcaaaagaagggctggttcgagctgtagagcagcgatcaggccaaaaacagacggctaaggaaagccgttaccagtctctggaaccgctggatcacttgattgataagctatggcaacaaccagagacaggacgctcgtcaacgcagacaactggtaaatctgaggctaaaggtatatcaagaggcggcagtgaacgcagtctaacaagataa

SEQ ID NO: 270538 - DNA, 1974 bp, Klebsiella pneumoniae
atggcaacgattagaaaaggtcgagtcggtgactttgttcgtggtgcggacacatggcttcatagccagcagatgttgttattcagcggaatttggatctttctgcctggtgttttgttggcgattgtcggtggcctgttatacctctggatagacgccgataaatgtgttttgcaaaacgctagtacatatctttgggcacaattgaaggcactagtacaaccattttcaagcgtgactataggaacctgtgttgccctagatgggcgcgactctctgccatcctctgtggtgataaatgaaccactattccaggaagctgctgttaatcttctcagttcatttggatgggctttcagttcggtctttgtattgtacttgcctattggtgtttatcttgttgtgaaggccgttaaaagaggtaaggaaatcaaagaagacaaatatattcgaggggcaaaactcgtttcagccgaaaagttgaaaggagaaatcgtagaaaagtatggtatttctgatttaaccctcggcgatttccctttacccacaggattttcaaaaaagcataccttgattagtggcaccaccggagccggtaaatctacagcactaactcatttgcttaaagctattcgcgctcgtggagaccgagccgtggtatatgacaagaaaggcgagttcgtagagatgttctatcgggacggaattgatcacatactcaatccggcagatagccgctcacaccaatggactccatgggaagaaatggcctcaccatttgatgcagactggatagcggagacactcattccggaggacaaatctaaaggaggtgatccattttttagggactcgccgcgccatgtgttttccgctgtgttacaaaaactctatatggatggcttccgatctttaaccacccttttgcgggctactgcttggagtgatttagagctattaacagaattagttgcagggacaccggctgaaactcatttttccgaaggcaatgagaagacgttagcaagtattcggtcaaccttagttaatggagtcttaccactgcggttactgaaagaagaaaatacaaaggggtttttctcaataagagattggatagcagaaggcgatgaacctaatgccgatgatagttggttattcttaccagtacgtgaatctgaaatagaaatacagaaacctctcatctcaacgtggatacaagctgcggccaaagggttgatggcgcgtggggttaataacgagcggactctttggattgttgtcgatgagctaccaagcctcaaaaaaattcctgctctttcaatgttgatggccgaaggacggggcttcggtgcggctgttgttttgggtattcaggaaataaaccagctagaggaagagtttggaaaaaatacctctaaaaccatacttggcctgtgctccacacagtttcactttcgtttgaataatgccgacactgctgagtgggtctccaaagtacttggtgaagctgagcgtgaggaagttgatgaagacttaaactactccgccgatgacattcgagacggtgttcgggtcagttctaaacgccaaaaccgaaaaattgttcttcccagtgaaatcatggacctgcctgatttgtcttgttttgccaaaatttggggcgtggagagtaaagcccgtattgatattccattcttgagacttccaaagatcgctgacggttttaatcaaggtgatgagaatgagactgttggtatgcgcctgctcaatgccgcaagagcaatgaaaatggaagctgatacagactttgttccgaaagaactttctaacgtgcaggctactgatgagcctaaagagcaagtgccaagcccaagtgacattgagcaggaagtacattcagtattgggaacggtcggaatggatgatgatttggtatttggtctgcttgggaaaggaggcaaaaaatcatga

SEQ ID NO: 270539 - DNA, 813 bp, Klebsiella pneumoniae
atgaaaaaatcactgacgttactcgccgcagcaaccttaagcgccctgagctttgcctcctgggctgatactctgaccgttggcgcgtctaacgtgccgcatgcggagatctttgaacaggccaaaccgattctggcgaagcaggggatcgatctggagattaaaccgttccaggattacattctgccgaacactgcgctggctggccgtgagattgatgccaactacttccagcatattccgtacctgaacagcgtgattaaagaccatgcaggcgataaaacgtatgacttcgttagcgccggagcgattcacattgagccgattggtatctattcgaaaaaagtgaaatcacttaaagatctgccggaaggcggcaaagtcatcatgcgtgatgcggtatctgaggaaggtcgtattctgtcgattttcgaaaaagagggtgtgatcaagctgaagccgggcgtggataaattaaccgcgcgcattagcgatatcgtcgaaaacccgaaaaagctgaagttcctgccaaacgtggaagccgcgctgttaccgcagatgtataacaacgacgaaggcgatgcggtggtgattaacgccaactacgccatcgatgccgggctggatccagtgaaagatcctattgccgttgaaagtggtgaaaacaacccgtatgccaacatcattaccgtgcatcgtggcgacgagaagaaaaaggatatcgtagcgttggttgatgtcctgcattcaaaagagatccaggactggatccgtactaaatataaaggtgcggtgatcccggtaaacaactaa

SEQ ID NO: 270540 - DNA, 3066 bp, Klebsiella pneumoniae
atggctaatttaacccgtcgtcagtggcttaaagtcggccttgccgtaggtggcatggtgacttttggcctgagttatcgggatgtggcaaagcgcgcgatagacggtttgttggacggaacctcgggcaaaattacccgtgaccgcatttttgccaacgcgctcatccccgaagccaacgcccggcctcactggcagcaaaacccgcagcaggtgatctcgatgacgcagtgctttggttgctggacgcagtgtggtgtacgggttcgcgttgacactgagcaaggcaaagtgctgcgcattgcgggcaacccttatcatccgttgtcgcacgagcaccatatagacgcctctgtcccctttgccacggcaatggaacagttgaccggggagtcaggtcttgacgcacgttctaccgcctgcgcccgtggtgcaaccttactcgaaggtctgtacagcccgctacgtattctggagcctatgaagcgcgtcggtaaacgcggtgaaggaaaatggcagcgcatcagcttcgaacagctgatcaaagaggtggtggaaggtggggatttgtttggtgaaggccacgttgatggtctgagagctatccacgatcccactacaccgcttgatgcgaaacatcccagctttggcccaaaatccaatcaactgctggtcaccaataccagcgatgaaggacgtgatacctttttacgtcgcttcgcactgaacagtttcggcagtaaaaacttcggcgctcatggcgcttactgcggtctggcctatcgggccggttcaggtgcgttaatgggcgatctggataaaaatacccacgtaaaacccgactgggataacgtcgaattcgcgctgtttatgggcacctctccggcgcaatccggcaacccgtttaagcgccaggcccgccagctggccagcgcccgtttacgtgacgacttccgctatgttgtggtggcgccagccctgccattaaccacggtgctggctgacgatcgcggccactggcagcccgtacgaccgggaagcgactccgcgctggctatggggatgataagctggattatcgataaacaacgctataacgctgattatctcgccattcccggcgtgcaggccatgcagcaggcaggagaaaaaagctggactaatgcaacgcatctggtgattaccgatgaaattccaacgcttgccggacaacacctgaccctcgcccatctgagtgcaaacgcagcccaggagccggtggtcgtcaacgaggccggtgagattgtcgccgccagcagttgcccgcgcgctcagctgtttgttacccgtgaagtgacgctggccgacgggcagacagtaacggtaaaaagcagcttccagtgtctgcgtgagtccgcagagaaactgtcgctaacgcagtacagccagcagtgtggggtgtcagaagcagacattgccgttctggccgacgcattcacccgccacgggcgtaaagcggcggtgatcacgcacggcggaatgatggcaggcaatggattttataacgcctggtcggtgatgatgctcaatgcgcttattggtaacctcagccttgaaggcggcgtgttcgtcggcggcggcaaatttaatggtgccaccgacggtccgcgctacaacatggacagcttcgccgggaaggtaaaaccgaaagggttaagcatcgcgcgcagtaaaaccgcttatgagtcttcggaagagtaccgcaataaggtggctgccgggcaatcgcccttcccggctaaagcgccgtggtatccgtttgtcgccggtcagcttaccgaactcctcgtctcggcgcttgaaggttacccttatccgctgaaagcctggatctccaacatgaccaacccgttttacggcattgcggggttacgcggcgtggcggaagaaaagctcaaggatcctgctcgtctgccgctgtttattgccattgacgcctttatgaacgaaaccacggcgctggcagattacatcgtgccggatacccacaacttcgaaagctggggattcagcgctccgtgggcgggcgtggccagcaaagccaccaccgcgcgttggccagttgtcagatcggcgaccagcctcacggctgacggtcaaccggcctcgatggagtctttctgtatcgcagtggcaaagcgcatcgggctacctggattcggcgacaatgcaattaccgatccgcaaggtaatcactatccgttgaaccgtgcggaagattactacctgcgtctcgcggccaatattgcgtttatgggcaaagctccggttgctgaagcacagccggaagacatagcgctgaccggggtccagcggatcatgcctgtgatgacccaaacgttgaaaaccgatgaaatcagccgagtggcgtttatctactcccgcggcgggcgctttgcgccggacaacagcgggcgagttgataaccgcgtcggcaatgcctgggaaaaaccgctccaaatctggaatgcgaacgtcgccgcgcaccgccatgcgattaccggcgagcgctacagcggctgcccggcctggtatccatcacgtctgtcagatggacgtgcggtcgaggagttgttcccggaacaagagtggccgttgaagctgatttccttcaaatccaataccatgtccagcgccacggcggtgatcccacgccttcatcatctgaagccggttaatctggtggcgctcaatccacaggatggtcagcggtatggtttagcacacggagatatcgtgcgtatcaccacccctggtggtcaggcgcaagcgcagataagcctgctgcatggcgtcatgccgggtgtcatcgccattgaacatggttacggacataaagaaatgggcgcggcacagcataccctcgacggtgagccgatggcgtttgatgagcagattaagtcggggattaatctcaacgaattgggttttgcggacccaacccgacaggtagccaatacctggcttgactgggtgtcgggtgcgtcggtgcgtcaggggttgccagcgagaattgagcgagtgtag

SEQ ID NO: 270541 - DNA, 1023 bp, Klebsiella pneumoniae
atgaaccattcactgattatcgacgaggttctggcccatccccaggacgtaagctggttaccctgggccgtacaatatttctttttcatcggcattgccgcctgcgccgcgctgttcgcatgcgttctccactggtgcaaaaaagaaacggcagacctggagaatctgacgctgctaatcgccctgacctgcgcgattaccgcgccgctggcgctgactgctgatctacaccaaaccgcccgcgtctggcacttctatgcgtatccgacgccatggtcctggatgccgtggggcgcgctgtttttaccgctgtttaccggttttttaggtctgtggtttctggcgcagcatgtgaaacggctaacgctaaaaagttacagcgtcacaaaatggttagcacttggtagcgcgctgtccgccatcggattgctggtttacaccggccgtgaagtgtcggtggtacaggcgcgtcccatttggttcagttacgcctttccggttgcgatgttcctcagcgcgctgcaaacatttcttgccctgcttattgccacgacaaatagcaaggacgcactaccgcgtaagctagcgtgggggcaaatggtcacgttgatcgcgctggctatcgtggtggcgatctgggcgagtgggaatacgctttccggttcggctatccgtcagtggctggatgttgcctcttcagcacaacactacgctatcggttgggttgcgctatggcttgtttcgcttgctctttgcgggttggttgtacgttaccccttatcgctaccgctgcgcatattactcgcttttagcgctatggcgctgtgctggctaatgcgctggacgttactcatccaggtgcagaccgtaccgaaatttaacgcgcagtttaatccctataccctgcccggcggcaccgatggctggctggctattgtgggtaccttcggcctgtggatagcactgattattattgttcgtgaagccctgaacgcgatcgcaaggagaatgcaacatggctaa

SEQ ID NO: 270542 - DNA, 735 bp, Klebsiella pneumoniae
atggacagcagtaaacggcagtttctccagcgactgggcgtcctgaccgctggcgcatcactggttccgctggctcaggcgcaatttcccttttcgcctgaacgccacgaaggctcacaacagcatcgctacgccatgctggttgacctgcgacgctgtatcggctgccaggcctgtaccgtcagttgcgccattgaaaaccagacgccacagggcgaatttcgtaccctcgtcaaccagtatcaagtacagattgaaggccagcaaagcgttaccaacgtcctgctgccgcgactgtgcaaccattgtgataatcccccttgcgtgcccgtttgcccggtacaagccactttccaacgcgaagacggcattgtggtggtcgacaacacacgctgcgtgggctgcgcctattgcgtgcaggcctgcccttatgatgcgcgattcatcaaccatgaaacgcaaaccgccgataaatgtaccttttgcgttcaccgcctcgaagcggggctgctcccggcctgtgtggaatcctgcgtcggcggcgcgcgcatcattggcgatattaaagatccgcacagccgcatttcgcaaatgctgcatgagcaccatgacgccatcaaagtcctgaagccggaaagcggtacgtctcctcacgtgttctatctggggctggatgaggcgtttgttaccccattgatgggacgtgctcaacccgctctctggcaggaggtttaa

SEQ ID NO: 270543 - DNA, 1782 bp, Klebsiella pneumoniae
gtgggacgcaacgtagtaagatgtctgacggtactggcgtcgctgtggatgctaagtggcgcggtcagggcgcagacatggaacattggcgttttggcaatgcgcggggaggtttctacacgtaatcactggcagccgctggaaaccttgttgaatcagcaaatccccggtgagcagtttcatattcaaccgctggacctgcggcagatgcaggaggcggcgaatcgtggaacggtacactttgtggtcaccaatccggcgcagtttgtccagcttaacagccgctcagcgctacgctggctggcgtcgttacgatccacccgtggtgggaaagccaccagtaacgtgattggcagcgccattctcgtcaggcgcgacagtgggttaacctccgcacacgatctgatcggcaaaacggttggcgccattgatgctcaggcgtttggcggctatttgctgggatataaagcgctcagtgatgccggtctgcgccctgaacgtgatttacgtctgacgtttaccggatttcccgccgatgccttactctatttattacgtgaaaaagccgtgcaggcggtgatcgtgccggtgtgcctgctggaaaaaatggatgaagaaggcctcatccgtaaaaccgattttatgaccgtgttgaatcatccgacttcaattccctgtttaaccagtacgccgctctatccggactggtcatttgccgcactacctgcagtgagtgacgagctggccgatcgcgtcacgcgggtactgttcaatgcaccgcaaaacgcgacgtttcgctggggtgcgcccgcctcgacccgtgaagtagaagcgttgctgcgcgacgtccgacagcatccgcagcagcgtcagctgtggctggatgtcaaaagctggtttattcaacaccgactggcgatggggggcgtggtcatcgtattgctgttgcttacgctcaattacatctgggtgatgctgttggttcgccgacgtggcaggcagctggagcggaacaacgtgttgttgcacaaacaggaacaggcgctggagactgcccgccaaatgagcgtgctgggggagatgacctccggttttgcccatgaactcaatcagccgttgtctgctatccgtcattatgcccaaggctgtctaattcgcctgcgtggtcaggatgagcagcatccgttgctgcccgcgcttgagcacatagacgcccaggcacaacgaggagccgatacgctgcgcaatctccggcagtgggtcagccaggcacagggcaatccggtactcaccgatgactggcaagccatcaacgttcacgatgctatccatcacgtctggcaattactgcgtatgccccagcaattcccggcgataacgctgcacacgcaggttagtaaggcgttaacgttgatgctgccaagcgttcttcttgagcaggtgctggctaacctggtactcaatgccgcccaggcaggcgctacgacggtatggtttagcgccctgcataaggatggcggcgtgcgtattcaggtgcaggataatgccggaggtattgacgaggctcagttgtatcaggcgtttcagccgtttatgaccacccgcaaagaaggtatggggctaggactggccatttgtcagcgactggtgcgctacgcaaacggagatattgagatcaaaaatcagcaggccccggacggtaaagcgggggcgagagtgacattgtattttaagccaaatcaggaaggaggccgtagtggcgataattcatctgctggatga

SEQ ID NO: 270544 - DNA, 585 bp, Klebsiella pneumoniae; identical to SEQ ID NO: 26727

SEQ ID NO: 270545 - DNA, 204 bp, Klebsiella pneumoniae
atgggaaatcagacgaaagacgacgagttgtaccgtgaaatgtgcagagtagtcggtaaagtagtgctggaaatgcgcgatctgggacaagaacctaagcatatcgtcattgcggtagtactgagaaccacccttgctaaccagcgcgtgaagcgcagtgagttagggaaggtgcgaataagcggggaaattcttctcggctga

SEQ ID NO: 270546 - DNA, 1575 bp, Klebsiella pneumoniae
atgaaaagagaaaaatctatattcactaactctagactttatcctcaggcatatgaagctcatgagtctttcttaaaataccttttacttaccgtcgaaaagccttacaggtgtctttttaagaaaaatgaagagaagataattattgaaaacattcaagttttgaatgaaatgattgaaaaaattgacaggaaatgtacgagaatcagtcttgaacttgagtcatatagtactatccctaaacttatcgagattatatcaaaatattattattctacaacttacagccacttggatttgccatacttaggaatgggagtcaaatctgcgttatgttactcatatggcaatataagtactgggacaggttccgctaatgttaaggtgtttcagtttattgaatattgcatgcttaaagaaagtctgatcggcttaaaaaatattatgatcatctcccctggagaaacaatagaattaacttgttatggcatgctattatctgataggttaagatcgatagctattgatctatcgagtgttaacaagtcagatcataaaggtttacgacttggaaagtatggtgctgatttgttcttgaataaaaactcagattttttacgaagtgtaattgatgttattaataaaagaaataatttaattcctgatgtttttaagaatacaccttttgaatacattccatttaatgttgaaaccagagatttttggataaagacttatttatacttaaaactattagtgtttatagcttcagtaaggaagtcagttgcagactcagattatacgggggtggttattttaaatgactgcgccatactatcaaatgaactaactatgccactcattgaaaaggacttgcaaagattaaatatgacattcttttggcaaaggccgtggttcaaaaaaagaattggcaactggaatagtaatatgatcaatgaaagacctatagttaggattgataataattcgaaaggtctatatgctacatctgtaactttaatttgtgattcatttaattggtttttggagtcatccattttaaactactcagaaaaatcggcaggtataaatttacctcaggaaattttccaaaatgcagtatcaaataaatttgaagaagatgtggtttcatttttaaaagaacatggctttagagctggcaaagttagtgaaaatgccacatggtttgttgaaacaccaactaagctcataaatatcaataatgaaaaaatccctggtgagattgattgcttagcagtcaaaaataaaagtgtattattaattgaatgtaaggtgcttacagacggggtcgatgaaaataaaatccgcaatttatcgaacaaacttaataatgatgatcaagaattgtttttctataagcaagaatgtaaattcaattggttaatgaacacggtagaatttagaaatgactataagataacaaaaatagtcctccttgataaaaagcatttagcgaaattaagtgatactcatatagtattaacgtttgacgaactcaaagaaatagttagcaagcaagattccgtgatgtaa

SEQ ID NO: 270547 - DNA, 705 bp, Klebsiella pneumoniae
atgccgggtggcggctgcgccttacccggcctactcgtccggttccgactgtctgtaggcccggcaagcaacggcgccgccgggcgatggcatcaggcacggagctgcatttatgccgggtggcggctgcgccttacccgacctactcgtccagctctgactgtctgtaggcccggcaagcaacggcgccgccgggcgatggcatcaggcacggagctgcatttatgccgggtggcggctgcgccttacccggcctactcgtccggctccgactgtctgttggcccggcaagcaacggcgccgccgggcgatggcatcaggcacggagctgcgtttataccggatggcggctgcgccttacccggcctactcgtccggctccgactgtctccaggcccggcaagcaacggcgccgccgggcgatggcatccggcacggagctgcgtttatgccgcgtggcggctgcgccttacccggcctactcgtccggttccgactgtctgtaggcccggcaagcaacggcgccgccgggcgatggcatcaggcacggagctgcgtttatgccgggtggcggctgcgccttacccggcctacaaccccaaatcaccactggcgctggggctgctgaaactgccggtgctggcggcctcaacatcgctgagacgttcccggaaggccggggcagcccgcatggatgcgggctga

SEQ ID NO: 270548 - DNA, 1923 bp, Klebsiella pneumoniae
atgcgtaaggtgaagattggtgagctaatcaattcgcttgtgaacgaggttgaggcaatcgacgcctcagatcgtccacaaggcgaaaaaacaaagaaaattaaagccgcagctataaaatataagaatgcattatttaatgataaaagaaagtttcgcgggaaaagcttagaaaaaaggatttcggctaatactttcaatgcctatatgagccgggcaaggaaaagatttgatgataaattacatcataactttgaaaaaaacgtaataaaattatccgagaagtatcccttatacaatgaggaattatcctcatggctttctatgcctgcggcatcaattcgacaaaatatgtcagctctgcaagccaagctaaaagaaataatgccattagcagaagatttatcaaatataaaaatcggtgcgaaaaacagcgatgcaaagttagccaaacttgccaataaatatccagaatggcaattcgctattagtgatttaaatagcgaagattggaaggataaaagagattatctttataaactattccaacaaggttcttcgctcctggaagacttgaataacctgaaagtaaaccatgagattctctatcatctgcagcttagttctgccgagcgaacctctatccagcagcgctgggccaacatactcagcgagaaaaagcgcaacgtggttgtgattgactatccgcgctatatgcaggctatctacgatataatcaataaacctatatcttcttttgatttaaccacccgtcgtggtatggcccctctagcgttcgcgcttgcggcgctatctggtcgacgaatgattgaaatcatgcttcagggtgaattttccgtcgcaggtaaatatacagtaacattcttagggcaagctaaaaaacgctcagaagataaaggtgtatcaagaaaaatatatactctttgcgacgctgatttatttgtcagtctggttaaccaacttcgttcctgccctgctgctgcggattttgatgaagtggttaaagggtacggggaaaatgatactcgctctgaaaatggtcgtattaacgctattctagcgacagcgtttaatccgtgggtaaaaactttcttaggcgatgaccgccgcgtttataaagatagccgcgctatttacgcccgcattgcctatgaaatgtttttccgcgttgatccacggtggaagaatgtcgatgaggacgttttcttcatggagatcctcggtcatgacgatgaaaacacccagctgcactataagcagtttaaattggcaaacttctccagaacctggcgcccacatgttggcgaggaaaatacccggctggcagcgctacaaaagctggatagcatgatgccagatttcgccaggggcgacgcaggggttcgtattcatgagaccgtgaagcagctggtggagcaggacccatcaataaaaattaccaacagcaccctgcgaccgtttaatttcagtaccaggctgatacctcgctatctggaatttgctgcggatgccttgggtcagttcgtcggagaaaatggccaatggcagctgaaggatgaggctccagcgataatcctgcctgatgaggaagttcttgaaccaatgggtgaagccgatctcgatgacgaaactcaagacgatgaaacgctggatgacgatgagatcgaagtagacgaaagcgaaggagaggaactggaggaagtggacgacgctgaagaggccgaggaggctgagcaggaagagaaacaccctgccaagccaaactttaaagcgccgagggataatggcgatggcacctacatggtggagtttgaattcgatggccgtcattacgcctggtctggtgccgccggtaatcggatagaggcaatgcaagccgcctggcgcgcttacttcaaatga

SEQ ID NO: 270549 - DNA, 801 bp, Klebsiella pneumoniae
atgaacgcactctctgttttctcgtttcaggaaaaccaccccgtgcgggtggttctggttaatggcgaaccgtggtttgtagcggttgatgtatgtaaggcattaggactaacgaatccgacgaagtcagtatctgcactcgatgaagacgaaaagcagctttttagcggtgactctaactttaagttagggtcagcaggaaaaggggcgcagtcattgataattttgaatgagtccggcctatacacactgatcctccgctgccgcgatgcggtgaagcagggaacgacggcctggcggttccgcaagtgggtcaccaacgaggttctgccagctattcggaaaagcggtgaatacagctacgtcgaacccgcgccaaaaagcgccggtgaaccattggactggcggcaaaaggaagaattacgcggcctgataaacgatatagcccaaagttttcagtacaggaacgcgtggatcagtggcgtctggctggcgcttcgtcgcgcctgcaggaacccttcacctaacccgattacggtcgacgatctcccggctatcattgccgaattgcgccggatattagcggcggcagaaacagcgctgggtaatatgcgagcttacgaacgggagctgctgcgcaaagtcgttcgcggtggccatcagagtatgtcgtgcggggagttgccaattaccgatatcaatacggaaatggagaaggtgctgccagcgcatttcgagctggccatcaataaactggaggccttatccacaaaattagaggctcctgccgtctcttcctga

SEQ ID NO: 270550 - DNA, 336 bp, Klebsiella pneumoniae; identical to SEQ ID NO: 237217

SEQ ID NO: 270551 - DNA, 4005 bp, Klebsiella pneumoniae
atgaccttacaagaattctatgcggctcgcttcggtagcgatccgtattcattgcttgaagcagcgcgggatgagctgtcagagctggccacaatggctggcattaactgggcagcatgtgctgataacattcagttgaacccgcgcggcggggaagaacgttattcaaaatataacggtggcgcccccgaggctctggaaaagagcctcaaagggcgtgtggaaatctactcccgcaaggaacaacacaaaagcggcatcagctacccattcgtcaactttgtccagaaagggcatgacgaaggttcctggagcggcttctccttcctgttcgccgaataccgccgtgaacaacaaagaaatcatgcgaccgtggtcgcacaacctgatgaagaactggcgcgtattgaacgccaggcagaagcccgcaagcgccgcgccgaacagcaacggataaatgaacttaaaaacaatcagttagagcaagaacggttgctcggatggttggcgttccacagtgcatgggaacatgcgccagctgaggacgggtcgtggccttacgcagtgaaaaaaggcattcgtgacgtattcagcgcttgcgatattcgtcgcgtgaccagtcacgacaacgcaaaatggagccgtggaccgactacatacatggcgattccgctggcccacctggacggacgcaaagacggacaaattgtcggctggcagcgtatcgaccagcgcggcggtaaattccagaccagcgcgatcaccagtggtgatttcgtcggggcgtgctttgttatcggcaacctgaacggcgcgcaaaatattgcagtggtggaaggtttcgccaccggcgcgtccgtatggctggctacccgtaaggacccgaaaaaaagctttgatgctgtcgtggtcgctgtggccgcaaacaacatgatccatgttgttgagcagctggtgaacatgtacccggcagcaaaaattacctgcgccctggataacgaccgcaaatcatcggctgaaggtaaaggcaacaccggcttacgtaccggcttcgacattctcgcaaaatttagcggcatcaaatgcgtttatcccacctttgaagacgatccccagctggagtgcagcgacttcaacgacctgcacagattacgtggactccgcgaaacctgtcgccagctattcgccaaagggaaccgcctgagtaacagcactgatttgctgtctctgacgctaaacaagctgaaaacggctaaacgtgacaaccgcaggacgtttgctaaagaactgctgaacgcggtggatattggcatgctgacctgcccggtaccgaatagcccggcggatctgtttaacatgttctgcatcgtgctgcgtgatatgggactggaaagcgtctatcgcgccacggttaaagaccacatcgcacgccgcctgaaccgcaaatgccgtactgcccaggctccccgttcctttagcgagcggatcaccgacccgaacaagcgtccccagcacatcacgtataaacgctttgaaacatccgtgatgacggatgaaattctgcaatacgtgcagcagctgcagggcatcgttattgttcgcgccggtatgggatcaggtaagtcgacaggcctgctgcgcccactgatgcataacgctgatcgcggcgtttccgttgcgcaccgcgtaagcctcatcggtggcctgtgggaaatgatgacagagcagaaagggaccaaggccgatattctgcattaccaggaccccggctatcaggaaatggcgccatacgcgaataagctgaccatttgcatcaactccatcgtcaaaggctgctggcagccgctgatgcgccagcatgactatttcggctttgatgaggcaacgcagggacttcgcgccatcctttctggccgcgcaatggagaacccggtcgccgttttcaatacgctgatcgacgcgctggccagaactgaattgcaccctatcatggtagacgcagatgctaacgatctgctggtcgacctggcagaactggcgatgaagcgccgcgaagaaatgggcctgccggcatggctgcaaattcacgttatcgaattgccggtcgacgttcgcaaccgcgaaacgggcgaacctatccgcgtattctacaccgagaaagatcgcatcatgaccgaggtgattaaagcggtggaactcggtgaaaaaatcatgctggcgaccgatagctcaacgtttgccgaagacgttaccgccacgctgcgccagcgctacccggagaaaaaattcctctgcgtaaaccagaagagcaagccggaacccgaggttgaagaattcaccaataaaccgaagaagatggtgaagaagtacgacggtctgatttacagcccgtcgatatcctccggcgtctccatcgagcaaaagcatttcgaccgccatttcggcatgttctgcggcgaagtggtccccagcgatgctatccagatgctgcgccgcgaccgcacagccaaagagttcatcatcggctttgacaaggttcgcgcacgacgcgaaaccgatccgcaaaaaattgagcgtgcatttgtccaagcattgctggccactgccggcatgaacggcgaactaaccgacgttgttttcgacggtgaccgcatttctatgggtgtggccaacaccgattttacccggatgaaaatcaaggcagcagcgattgaggcctccgcgcgtaatgactacgctagcaatatgatctgcataatgcacagcgacggctacaaggttgcccccctggcatccgacgagctggcgaactgcgtcggcaaggagctgcgcaaggaagcccgcgaaattgtctgggaacaaacgctggatctccacctgaatatcgaaacgccgaacgaatctgaacgggaagccattctgaagaaacgcgccctgaccctggaagagcaggcgaagctggtccgctgggacatcgagcatgagctgaaactgccggtcaacgaggacaacctgaaattctacttcgacggcgcccgcgataaggttcgccgttatgaaaccatgctgctcgatgagatcaccgcgcggcgtttcgaccgcgaggaatccgcgatcaacttcacctacgctttcaggcaggcgggccaatggcaatactttaccgccaccgcgatgacccgcgagcaggctgatgaagcattccaggcgaaacaccctggcatcaccgagtacaaagtcaaatcgacacccgcggtcgaggtcggtatgcgcggcttctacggcctcaaatctacggtgctacgccagtacttcattgactgcggcatcgacccggaaaccatgaccggagaagccacccaggcgcgcctggcatacgccagggataaactcatgaccgccgaacggcgagacctgttaaacaacgtcctgcgcattggtggctttatgacgcccaaaggcaagccgaaggtccccgaggcactgtttaaaaccatctgcgagtcgctcggcctgaaaaccgacaagcgccgcgccagggacggagacaagcgcccgaccatacgctttgtggatcagcagtcggcggcgttcatgatggaaattctggagaaccgtaaagacgacggcctgtctctgcagttgcgtaaagccgagaaaaccaccaccgaagtggatcacggtttagatctcaatatatatatggatcataaaacgcgatccacaaacgggcaggatttggacgcccctcattcagtaataactgaggcgctggccgaactgccggtgccggtgccggaggcctgggcgatgaccgcgctgtctgatgatgagctggccacaatgacctcctggtcgccagccagcatagctatgaccttcgcgtccctgtacctcacagagttcatggaccgcctctccagcaacgaactgcgccggctgcgtgaatacatcaccggcacggttacgggcggctacgacgcgcaggaggcgttctatggctaa

SEQ ID NO: 270552 - DNA, 423 bp, Klebsiella pneumoniae
atgcgatcacctggtggcggacgcaaatcgaataacactggaaatcaggttagttctttaaccagagcggtttctccgccggatgaattactgggcgatatggctatcgatgcctggaaacggacgtgcaaaattcttattaaccgtggcacgttcgaaatggaagattgttatttgctgatggaatactgcaacaccgtgcagctgctgtacgacgccaaccaggaaattaaaaacgatggccttggtgatgataccgctgccggcggccagaaacttggtgcggcagtgaaggcgcgtagccgttatatcagcgaattaattcgactctccgttgtgttaaagctggaccccaatagccgcatcctgaagaaacagcccggagataaagacaaatccagcggtgagttcgacgagttttaa

SEQ ID NO: 270553 - DNA, 1710 bp, Klebsiella pneumoniae
atggccgcatatccaaacgtcaatgtggcgaacaaatatgcgcgggatatcatagacgggaaaatagtcgcctgcagagctattcggctggcatgtcagcgccattttgacgatttaaaaaaatcacttgataacaattacccttaccggttcgacagagatttagctgagcgggcctgccggtttgttcagaagttaccgcactccagtggcgatttggcggggcagaaattaaaactggaaccttggcaaagttttattttttgttcgatttttggctgggtcacgaaaaaggataaaaaacgccgatttcgcgaagcgtatatccgggtagccaggaaaaacgggaaatcgttttttgctgccgggattggcacctacatgttttgcgctgatggcgaaaacagcgcagaagtgtattgcggtgcgacaactatggcgcaggcgaaaaaggtcttcaccccagccaggcagatggccagccgcctgccggcacttcgctccagatttgatatttcggtatggaccgacagcctgacacgcccggatggttccgttttcgcacctatggcggggaaacccggcgatggtgacagcccacattgtgcgatcattgacgagtatcacgaacacgatacggatcatatgtacgaggccatgacaatggggatgggcgcccgttcgcagccgttaacgctcattatcacgacagccggctcgtcactggagtccccttgctatgacaaggacaaggaagtcaaagaggttatcgaaggcataacccgtaatgatcgcctttttggcatgatttacgaactggatgctggcgatgactggaccgacccgaaaaacttaatcaaagctaacccaaatctggacgtttcggttaagtacagcgacctggttgagcttctggaagtagcgaaacaggttcctcgcaaggttaacgccttcaaaaccaaacgcctcaatatttgggtctccggtaaatccgcgttctacaacatggagcagtggaaggctgctgaagaccccgaccttgagctggctgattttgcgaatgacagctgcaacatcggtctcgatctcgccaaaaagctggatatgaacgccgggatacgactatttacgcgggaaattgaaggtaaacggcattattactgcatcaaacctaaattttgggtcccggaagacactatccatacaaccgatccaaaactgctgaaaactgctgacaggtatcagaagttttatgaaatgggcgtgctggaagcgacggatggcgcagaggcagactatcgcgagattctggccagtattatcgatatgcaggacgaaaaccgcattgacgagattgatatcgaccctgcaggcgcaacagcacttcgccaccagttggaggacaacggatttaccgtagtcgatatccggcaggattacaccaatatgtcaccggcgatgaaagagcttgaagcggctctggccggtggtcgattccaccatgatggcaatcccattctgacctggtgtatcagcaacgttatcgggaaatttatacccggtagcgatgatctcgttcgcccgacaaagggagacaatcaaagcaaaatcgatggagctacagcgttatttaacgccatgactcgcgcaatgctgcacgaaagcagcggcggcacatcggtatatgatgaggaagacatagcgtgttaa

SEQ ID NO: 270554 - DNA, 1287 bp, Klebsiella pneumoniae
atgccacatattgaagaattgcgtcgtcagcgtgcgggtatcaacgaacaggttcaggccctggcaaccattgaagccagtggcagcacgctgactgcggagcagctgacggagtttgcgaacctgcagcagcagttcactgatatcagcgccaaaattgaacgcctggaagccgccgaacgtgctgcggcgctggtcgcaaaacccgtgaaagcgactcagcaggcccccggcattattgttaagcaggagccgaaacagtacaccggtgctggcatgacccgactggtgatgtctgtcgccgcaggcgcagggaatctgcaggacgcggcaaaattcgcttcagaagagctgaatgaccagtccgtatcgatggccatttccaccgctgcgggttccggtggagcgctcatcccggagaacatgcaaaacgaagtcatcgagctgctgagcgaccgtaccattgtccgtaagctgggtgcccgctccgttcctctgcctaacggcaatctgacgttaccgcgctcggctggcggtgcaacggccagctacaccggcgaaggaaaggatgccaagacgtctgaatcaaaattcgacgacgtaaaactgagtgccaaaaccatgatcgccctggtcccgatgtcgaaccagctgattggtcgcgccggttttaacgttgagcagctggtcctgcaggatattctgaccgccatcgctgttcgtgaggataaagcgtttatgcgcgatgacggtaccggcgatacaccgattggtatgaagtcgcgtgcgacgcagtggaaccgcctgctgccgtgggaagcgggttccacgatcaacctgaacacggttgatgagtacctggacaagattattctgatggcgatggatggcaacagcctgatgatccgttgcggctggggtatgtcgaaccgtacctatatgaagctgtttggcctgcgtgacggcaacggcaacaaagtctacccggaaatggcacagggtatgctcaagggctatccgattcagtataccagcgcgatccctgttaacctgggcgaaagtggtaaggaaacggaaatttatttcgccgacttcaatgatgttgtcatcggtgaagatggttccatgaaggtcgatttctccagagaagccacctatctcgatgcagaaggtaacccagtttccgcgttctcgcgtaaccagtcgctgatccgcgtcgtcctcgaacacgatatcggcttccgtcatccggaaggcctggtgctgggtaccggcgtcctgttctaa

SEQ ID NO: 270555 - DNA, 339 bp, Klebsiella pneumoniae
atggctattgagatattcacctggagtccgcgggttaatccccagcagaccgttaactttcgtgtccggaaggcgcagttcggtgacgggtatgcgcaggtatccggcgatggtattaacacccgatcacaggattgggagctgagttttgtcggtacggaggactatatccgtccgattaagcagttcttcgaccgtcatgccggcacccgcgcgtttcagtggaccccgcctctggaagaggtggggctttaccgctgcgaacaatacaaaccggtgccgctgggcggcggaaattactcactttcagccacttttattcaggcatttaaaccatga

SEQ ID NO: 270556 - DNA, 498 bp, Klebsiella pneumoniae
atggcatccaccaatgaagagctcgcttcagcacttaaaatgttctctcgttttttcgatctgatacatcaaccgctggccgtgattaatgaacgaggtgaatacgtgtattacaaccaggaaagcgcggatctggacgggtacagtattgaacaagcgatgggtaaacatatgctggatgtctaccccagtatgaaagaaaaccaaagtacgatgctttcttcactaaaagacggggttgagtatattggccattaccagatttactacaatgcccggggccaggcggtggattatcagcataccaccgccccgctctactccagcaagggcaatatggtcggtgtcatcgagatcggcaggaatatgtccggcgtccggcgattacaggaacaggttgttgagctcaaccatctgctttacgctcagggccatgaaaagcaccatgcaatcattactgaaaacgcggaaatgcttgccaatattgcaaaagcttaa

SEQ ID NO: 270557 - DNA, 195 bp, Klebsiella pneumoniae; identical to SEQ ID NO: 36234

SEQ ID NO: 270558 - DNA, 735 bp, Klebsiella pneumoniae
atgaggattgatatattaattggacatactagtttttttcatcaaaccagtagagataacttccttcactatctcaatgaggaagaaataaaacgctatgatcagtttcattttgtgagtgataaagaactctatattttaagccgtatcctgctcaaaacagcactaaaaagatatcaacctgatgtctcattacaatcatggcaatttagtacgtgcaaatatggcaaaccatttatagtttttcctcagttggcaaaaaagattttttttaacctttcccatactatagatacagtagccgttgctattagttctcactgcaagcttggtgtcgatattgaacaaataagagatttagacaactcttatctgaatatcagtcagcatttttttactccacaggaagctactaacatagtttcacttcctcgttatgaaggtcaattacttttttggaaaatgtggacgctcaaagaagcttacatcaaatatcgaggtaaaggcctatctttaggactggattgtattgaatttcatttaacaaataaaaaactaacttcaaaatatagaggttcacctgtttatttctctcaatggaaaatatgtaactcatttctcgcattagcctctccactcatcacccctaaaataactattgagctatttcctatgcagtcccaactttatcaccacgactatcagctaattcattcgtcaaatgggcagaattga

SEQ ID NO: 270559 - DNA, 267 bp, Klebsiella pneumoniae; identical to SEQ ID NO: 5180

SEQ ID NO: 270560 - DNA, 480 bp, Klebsiella pneumoniae; identical to SEQ ID NO: 5181

SEQ ID NO: 270561 - DNA, 1635 bp, Klebsiella pneumoniae; identical to SEQ ID NO: 211563

SEQ ID NO: 270562 - DNA, 978 bp, Klebsiella pneumoniae; identical to SEQ ID NO: 211565

SEQ ID NO: 270563 - DNA, 579 bp, Klebsiella pneumoniae
atgaatttaccttcatatagccaattttttcatactatctatgatgaacagtctccagtaggtcgaattggtcgtggtacacattattccgtatttgaaaccgctcagtggctctcaccaaatctcgggcgatataaatatccaaaggttcaaaagttcgcaattatctgggatgaggatcacgacacccggattgtggatgttttagaaatagcattcatgcgaaacttattaggtcctgttgtatttgcaggtgagcgaaagggatcattaagcatcgtactttcaccagattttgacaggctgacttctacagagaaaagtgagtatctggcaaattggcaagatctggctcagggtggatacgcctctgacagttggggctttgactggtgttatctttcttcgccagcaacctgctcgattattcaggattccaatgcaaaaacagaggcctacttatttaacatttgtaacctctgggagcttgggcactcggtctatcatgagcgtaacccttgggaagacgaggaaaagatgcggcagtctatagataggctgaactccttatctaaataa

SEQ ID NO: 270564 - DNA, 390 bp, Klebsiella pneumoniae
gtgactaaccgccgtcgtggaaaacccagcaataaccagctgcctgatggccttgcacagtatgcgctcaatattttacgagaacgctataccgacttcgggccgacgctgctggcgtgtgagatacttgcagaactgcatgatgttcacctgtccaaagataccctgatcgcagcaggcgcagacgcgctggaactggggatccccttttcggatccgctggcagatggcccgaccattcagactgccgcactacgagccttcgccgcaaacgtcacaccaacgctgtgctttgagatgctggctaatgttcgacaaaaacacccgaacattcccattagcctgctggtgtatggcaacctcaggctatcagactatctttcgatttaa

SEQ ID NO: 270565 - DNA, 738 bp, Klebsiella pneumoniae
atgcctctcatcaccattaatcagatgcagaagtactacggcgacaaccatgtgctgaagggcgtcgatctggatatcgacatgggggaagtgatctcgatcatcggccgcagcggctcgggtaaaagcaccctgctacgctgtatcaatggtctggagggctaccaggagggaagcatcaagctcgggggcatgaccatcaccaaccgcgattcccaggcccgggagatcagccgctccatcggcatggtgttccagaactttaatctctttcctcacatgacggcgctggagaacgtcatgctggccccgcggcgggtgctgaagaagtcccaggcagaatgccgggagctggcgcagcggatgctggagaaggtcgggctcggcgaccgtctggattactacccggccaacctctccggcggccaacagcagcgcgtggccattgcccgggcgctggccatgtcgccgaaagttttactctgtgacgaaatcacctcggcactcgacccggaactggtgggtgaagtgctgaaggtgctggagcaactggcggcggaaggtatgacgctgatcctcgtcacccatgaaatgaattttgcccgcgaagtgggcgaccgcgtggtgtttatgcatcagggacgcgtctgggagcagggcgacagcaaaacgctgttcgccagcccgcagaccagcgaactgaaacagtttatctcctcggtgcgcggtcttaactaa

SEQ ID NO: 270566 - DNA, 975 bp, Klebsiella pneumoniae
atggctgattctgaaacttctggtgttcttgctatcgtacaaaaagttgcgaagccactttacagcattgttaagattactggtcccttcataatggctcaatctaaaactgctgtcgaaaattactctgacttcaaattaaacaaatctcgtttggaggcaatatctacattgcttcaagaggaggttaaaaacatatcctccgacagggcgatgctgcgtgagaaaatcattaattctagcggggttgaaagagttcgggcgcaggaggattacaacttattaactaaggaaataaacaaactatctacaatagacaaaataaaaaacttcattggtgatgatgatatcatcgacaatgacaaggagatcgctgatagttggattaataaattcaatgaacttgcctcgtctcttaatgaagaatggagaaagcaattgcttgctaaagcctttgcattagagttaaaaaaatccggcactataaatattctaactttaaatagtattgcttcgtttgatgaaaacacattcaaactatttggatttttagttaactcaagcatcagaatgtatgaggtcaattgcttgccgccagtagataaaaatgttgaattttcaattgatggcaaaatcaaaaagctaagcactatcgaatatgaacttggacacctcaatttaattgagctcagcaacaataacttcatcaatattgagaatagagagatttacttaagatatggacgccgtgtattgaaaataaaatatacgcgcgaacaagtcccggaagcgcatcgcatcttagcaaacgtattcacaccacttggcaatagcattgccaatctatatacaagacaccttaacgattttggaaatgataatttcgaaaaattcctgcgcatagcaactaaaaaaggctatatatgccaagaaatagaaatgtctcaacaattatatagcgaactcggaaattag

SEQ ID NO: 270567 - DNA, 153 bp, Klebsiella pneumoniae
atggcaaaactggcggcatttgatatggacggcaccctgctgatgccggaccatcgtcttgcggcgccccggctgagggctgccataggcgctggtattgatttaaacggtgtaagagtcgcatgggggccgtcgtccaccgggccgctgtaa

SEQ ID NO: 270568 - DNA, 486 bp, Klebsiella pneumoniae
atgaaattatctaaattctctgagctagtgagccgcatctggtctaacccactgacgcaacgtcgcgacccggatatcaccatcgtcatccactcgcccggaagcatcggcgccactccatccatcgaggttgagtccattcaggctggcttcgactgggacgcggggcaggtgttgatttacccggctcagccattgaccacgctgacacccgaacaagttgctgacatcaccgccagcgtgcgcaagggccagtcctggcatgcctttgaggcgtacaaaaaacacaaagcccagcttgagaatgcagcgtttgagcatgcgaaaatcgctgggcggcgcgacgaactgttggcggcgctgcagaaatacaatgatgcattcatggagttcgacggggaaaacagggacagtcgaactcgtatgcgcagagcggtcacaaaggcaaaatccatcatcgcccgcgctaaaggcggtgcagcatga

SEQ ID NO: 270569 - DNA, 147 bp, Klebsiella pneumoniae; identical to SEQ ID NO: 240343

SEQ ID NO: 270570 - DNA, 867 bp, Klebsiella pneumoniae
atggcagtttcatcaacgaccacatcaaaagagcaggagaaacaggaaaagaaagtcagtgttgacttcttccatattgatatgatcccggatgccatggataaaatgaaatggccggttgctgcaaaattaatgcgacattggtttaatacaaaacctgccttggcttttactgtggaatccaaagatcaatatcttaaagggaacgccctagatattcctgatgctatagttagctctgatattgtaaaaatgtcatgggcaattcagtttgagcaagtaataaatgggattaaacacctaagtgaagcatgggacagtccaaaaggcagagaacaactgaaaaagaggttatctcaaaaaggcgattataaaaagaataatgtatcaattgggtattccaatgacataagggaactagaagatacagcacaagtcaatatgacacttattggtagcaaaaccgacacagttaatgaatggtacggtgccatcggcaatgccaacctaaaagtttgcgttcgtggacatgttgaaaatctaaaagatgaatcgtttttcaatgttgaatctgtcggctattatttaaaagacacttacgactttattgatgatggatatcctgaacctttaggtatttggagtaaagatcgaattctgagcaaggcagagtcatcgatatatatatcatcttatctgtcagaattttggggacaattggctcgtcaattttcgggatttgttcccgtttttaatgctgattttcggaagtggcaaaaaaagcacaattcaggagggggttttattattttttcagatgtgtactggactgatccattgcctcagaaaaaggtgataaaattatga

SEQ ID NO: 270571 - DNA, 360 bp, Klebsiella pneumoniae
atgaaaataaaaataaccattattctttctcttctttttttattctgggcgtttcttccatctacattattcgtgaatggcaaggataaagtattttcacatgttagccctgacagagaattcacaacagtagtgtacagaaccaaaatcatatccccatactcattttataaatttctaaaaaacgaaaattactactttatcgtttatgggaagaataatcgcattgtatttaaaccatctgtgttttatggaacgtcagacttaggggcatctgatgggattgaatatatttataatgaaaaacattatctcttctatccgggcgggaatggttatgattcgtatgaattaaagtaa

SEQ ID NO: 270572 - DNA, 186 bp, Klebsiella pneumoniae
atgcttcttatgattgacactaatagtattaaagacaaactggaaagttattccgaaagtgaattcaagaaaatcctgaatgagttttattcagaccatagatcatctccatcacctaagggggacgagctagaaaattatttggataatctccttgatatgctgaccgtactggttggaacctga

SEQ ID NO: 270573 - DNA, 291 bp, Klebsiella pneumoniae
atggtgcgggtttatcagctccgggatcgtaaagcggttgatgccgctgattaccagacgttgctgcgcagggccgatacggtccttaaggacgacgtactggtgtcaaaggagctgctggtgatgcccaacggcagcgtgacgctcaatatgcccatggatgaagaggcgcagttcgtggctgtggtggggctgtttaaccgccccgatcagcaggacaaccgcgggcgcctggtactgacccatgacgatcttgacccggacaaaccgttcacgattgagctagtgtaa

SEQ ID NO: 270574 - DNA, 528 bp, Klebsiella pneumoniae
atgcaatatagtctactattaagtttatgtactttattatatacagctatctctatagcagagagacctaaaatagcagagaatgatttttttaccatcagtgttagttgtaacggtcagagagagtgtatctacaatggtcagagtgaaatacctgtcgttgtgagccttcggaatatttattctaaaggtttctatatatctttggggtatattaaaaaaacagagcctagtgtcaagttaactgaccgcgacaataaaaaaatcatgctactaaagccaaatcttgtcagttgggatttaaagaaaagaatagtttatatccctgaaggaaaaaatgttgaatttacttgggctctattggatagagatatttcaccatttataaatgatggtgcagttaatgttgatgctgatttcaagattagaactaaaatatatgacatcgaggaaaatgaaattggtgagtttatttccttatcaaaaataataataaagggaagtgattttaatgaaaataaacgctga

SEQ ID NO: 270575 - DNA, 210 bp, Klebsiella pneumoniae; identical to SEQ ID NO: 103160

SEQ ID NO: 270576 - DNA, 972 bp, Klebsiella pneumoniae
atgaaaaggaaattacaggtttttgtatctagcacttttactgacttgattgaggaaagacaagcagcagtaagtgcaatccttaaagccgggcacatccccgcaggcatggaactgtttactgctgctgatcgatcacagatggatattataaaaaactggatcgatgagtctgacgtatatatgttaatactcggtggtcgctatggttcaatcgaaccaacaaccggcaaaagttatactgagttagaatatgactatgctgtagaaaaaggcaaagcgctcttcgcagttgttattaaagaggaagcacttgaacagaaagttaaagaacacggtactgattttcttgaacgcgatgagccaaagtccttatctgaattcaaaaagaaggtattatcaaatatgtcttctttctttgaagatgtgaaagacattcgtttgtgcgtacatgagagcttgtctaatttcagcaccaatagaaaactaaagggttgggtttcagcagatgaaatcattgacactcatgatttagctgaagaaattaaaaaattaaatgaagaaaacagaaaattaaaatccgacattgaaaacaaagataaaaaaataaaatcactactaaataacaaagattcagaatttagggaacttgctgaggttctcaatgaaattaaaataaccatacccaagacgcaaacaaaagcagataatgatattgagacaaacctactcaatatatttgttacatgtaaagactcattcgttaacggtataaccaacgatattaacatgaaggactgggaaaactttttattttacgaagtaagccctattctcaaaatacacgggctaatggaaaatgaaaaagttacaggtgtaagataccgtagatatgttacaactgaacttggtacaaaattactagcttatgttgaaaaagaacaaattaaaaaaaataaagaaaagaaatag

SEQ ID NO: 270577 - DNA, 1338 bp, Klebsiella pneumoniae
atgagtaaccgcaagtattttggcaccgatggtattcgtggccgcgtcggcgatgcgccgatcactccggagtttgtgctcaagctgggctgggcggcgggcaaagtgttagcgcgtcacggttcgcgtaaaattatcatcggcaaggatacccgtatttcgggctatatgctggaatcggcgctggaagctggactggcggcagcggggctctctgcgtcgttcaccgggcctatgccgacaccggccatcgcctacctgacgcgcgccttccgcgccgaggcggggattgttatctctgcttcacataaccctttctacgacaacggcattaaattcttctccattgagggcaccaagctgccggatgatgtcgaagaggcgattgaagccgaaatggagaaagagctcacctgcgtggattcggctgagctgggcaaagccagccgtatcgttgatgcggcggggcgctacattgaattttgtaagggtacctttcccaacgaactgagcctgggcacgctgaaagtggtggtggattgcgcgcacggcgcgacctatcacatcgcccctaatgtcttccgcgagctgggagcccaggttatcgcgatgggctgcgagccagacggtctcaacatcaacgaagaggtcggcgccactgacgtgcgggcgctgcaggcgcgcgtgctggcggaaaaagccgatctgggtattgcctacgacggcgatggcgatcgggtgattatggttgaccacgaaggcaataaagtcgatggcgaccagatcctctatatcatagcccgggaaggattgcgtcaggggcagctgcgcggcggcgccgtcggcacgctgatgagtaatatggggctggagctggcgctcaagcagttaggcatcccgtttgcccgcgcgaaggtcggtgaccgctatgtactggagatgctccaggaaaaaggctggcgcatcggtgcggaaaactccggccatgtgatcctgctggataaaaccaccaccggcgatggcattgttgccagcctgcaggtggtcgcggcgatggtccgcaaccacatgagcctgcatgacctgtgcagcgggatgaaaatgttccctcagctgctggtgaatgtccgctttaccgagggcagcggtaacccgctggagaatgagcatgtcaaagcggtgaccgcggaagtggaggcggcgttaggaaaacgcggccgtgtcctgctgcgtaaatcgggtacggagccgctgatccgcgtgatggtggagggcgagcatgaagatcaggtgcacgagtttgcgcaccgcatcgctgaggcggtaaaaagcgtttag

SEQ ID NO: 270578 - DNA, 1203 bp, Klebsiella pneumoniae
atgtcaaatcttgcgcttgatcttaaaatagaaggggacttcatagattcttttatttattctggggttttatatctccttgattctgaatttaggttcacatcctattcttggaattctttgtgtgattttatcttaaaaagaaatggattcaaatttagcgatgcgaattttatcttaaaatactcaaaagataatagaaataacaataattcagcacatacaatagatacaaacattagtgaaagtgagcttctttcgcttaaaaaagattctatagatattaatacttggccatcagatataaatttattctcaaataaattatatttctctggtgatgatggtgtttattttataaatacaagtcatatgactgctgaatttgataagagaaaaatgcaaaaagttttcggcatgaaaagtttctctatatcccctaatacaaacaatagacttgcattagcagttggacgtgaaggtgtttttacatcaactttaaaatatggaagtaaaataccagctgaatctaaagtatccgatagcagttgcatcgatatagattggatgaatgataatcttttcattaactcagatactcttgttgttgagcggttttgtaagattgaaaataaaaataaagctgagtctaatgatttgtttgtagcgataagaagcgaaatgtcaaagggatatgaagaagaaaatgttatttctggagagttatttaagaaagcctataataaatatgttgaagcaatcttagataagcctcctgaaactttgcgcttaaaggaaaattataaatatggatggtctagtggtgattgcgatttcatattaaaccaagatgatagaatactagctcaggataacatgactggtgaacagcggcatgttttattgggggagtattcctcagggttaattaaggttagaacatcgggctgcggaacgattatggaatcaaaagatggtcgactatttatggtttcggaacatgaatttaaaggtatatcgagcgaatttgtttcctggcgagtttttcctagggcaaaaaaccatgctaatcacttgcatataataaatgatgaaaatataaacattctgatttataacaaaagagagtccatctttaatacttttctctcgaaaggaaatgatgatgagtataattacaaaatatccagcctgatcagttag

SEQ ID NO: 270579 - DNA, 261 bp, Klebsiella pneumoniae
gtggagcccaaccaggcgcacgccccgtccgccacggcgctcatcccaggctttgtgcgcggtggcgatcagatcctctttgttcagccggggccagacgtgctcctgggtggtcagctggaaatcattgaatttcagtttaatgccctgacgggcgatcagcaggtcaggtttgaccttcgccagtcgcctctccagctcgggatagaggttttcgataatcgcttcgcactccggccattaatggatatcttccgctaa

SEQ ID NO: 270580 - DNA, 846 bp, Klebsiella pneumoniae
atgttagaacgtagtttggctgcacgcaaagcaaaatcagtgttctttgaagaaagaaacacaattgatatatatattgaagatacagctattggttataaaaaaatttataaatgcatcctcaacagagtgttaggtgaaaagtatctaatcaatgacgtttttcctttaggtggtaaatctgcagttattcaatcctgggaacaaaataataacaagcgcaatcgccctcaacttcacataatagatggagatatacaattattaaatgggattagaaaatgtgaagttgggctctatacactaccttattattgcattgaaaacattttcctttgtgaacactcactacttaatatactcgttgaagaggatccggaaagggagagggaagaactgagtcaactatttaatttttcagaatggaatcaactaaacattgagcctctaattgaactttttatagtgtatttattatcccaaaaacacataccccatatacctaacgttcattatcaaataagcaaattagttagtgataacactggagtagttgacaatcaaaaggttaaatccaggataagtgaacttgaaaaagaaataaaaaagatgattcccgagaaaaattacattgaagaaaaaaacgctatttatgcagctattgatggcgacttcaatatcaaaaaatacatctcaggaaaagattacctactcccgttgataatcactcgaatgaaaagcattgttaacactcgcattagcaatatcacactaaaacatcgcataagccagtattgtagtatcgatgatataaatgatattgaaaactacatatttctcccataa

SEQ ID NO: 270581 - DNA, 1338 bp, Klebsiella pneumoniae
ttgaagattaatagtttccaagccgaatcagtatatggttatttaaatttcaatattgatttcaatgacgatctatcttttttggtaggtagtaatgggactggcaaaagtacagttataaaactaatacaagcactgatatcagtagatataaaagagttattaaacataccttacgaacaaataatcctctcatataccaataggaatgagaaatacaaaataatctcaagaaaagatcgtcaaaatatcaggatagctcatacaggcattgatgaagtattaataatcccaatactagtcaaagaggagtttattagcacagacagagatgttaaagtcttcagtcatgcagaaagagatttgactgccaatgctaccctcagaaaaataaaatctatagttccacctgtatttttgggtctggatcgaaaaacatatgggttcgatgattttgatttagaatatgacacatcaatttcccgacgaaatgatataataatgcacagaaaaatgctggcatcaaagaaaagattaatcactggtagcctaggagaagctttattatctgttgaaatgataatacaagataaatacagaaaaataagagaattcgaagataagcaagctatttaccttcgggatagaatattaaaatcatcatttaaattcaatagttacagcgaaatgttctctaatggtcataatcttgtctgggaagataaacaaaaaatccttaaaagaaagaaagagatcactgaagcagtaaaaaaaattggtagcttagataaatcactaatgattgatatcgaaaagttttttgataatttaagtgatcttttcgaagaattaaaaaatagtgatggactaaatattaattggctactaaacaaagttcagatcgatagaatatctgacattcttgatgttattgatgagtataatgaaaaaatagctagaatgtacaggcccataaataattttttgcacactataaattcttttttaattgattcacgaaaaaaagttgaagttaatactgttggtagacttgttgttgcccgtccagatagcgagaaatgtgacattgatattttatcttctggtgaacgtcagttattagtaataatagcaaatgtcatgcttaacaaattcacaaatatcagtagagttatcattattgacgagccagaaatatctctacatttaaagtggcaggaaagattttctgaaaccatattgggtcttaatccggaaacacaatttattatggctacacactcccctgatattgtcggagatttaactgataaatgtattctggtaggagtacagtaa

SEQ ID NO: 270582 - DNA, 363 bp, Klebsiella pneumoniae
atgacaccgactaccgcacagatcatgacggaaaataccgtcagccagacttaccgggcaacctattcaccagatgataataaattgcgactttacgcatcattacggctcgatgaagaaacgtattccctgatcaacaaagcaggctttcgctgggcgcccaaacaggaactttttgtggcgccagcctggacgccggggcgggaggatgtcctgctttccctcgccggtgatatcgaggacgaggacagcaccctgtttgatcgccaggagcagcgcgccgggcggttgaatcggagcaggcgcttgcgcatgttgattcgctggcatcggctgtcccgctgggacagccgatcctggtag

SEQ ID NO: 270583 - DNA, 870 bp, Klebsiella pneumoniae
atggcagtttcatcaacgaccaccacaaaagagcgggagcatcaggaaaagaaggtcagtgttgatttcttccacattgatatgatcccggatgcgatggataagatgcgatggtccacggcagcaaagttgatgcgtcactggtttagtatacaacctgcctacgcatttgatataaatagcaaagatcaagctgtaaatggagatcctcgcaatctgtcttcgtctaagataaatgttgatatagttaaaatgtcatgggctatacaatttgaacaggttaaaaatgggattgatgcactaaaaaaaacatggtgcagtccgaaaggcaaaacacaactaatagagcgtctgcaaaatgctggtgactttgctaataactgtattttcctagggtattccgaagatgttgcttatctagatgcaacagctcaagtgaattttaaaaggataggaaataaaactgacactataaatgcctggtatggggcaatggggaattccgttttaaaagtatgcgtgcggggcagtacgtctaaaattaatgggaaagatgcatttatcattgatgaattgggtttttatcttaaagatacatatgattttgtcgatgaaagtaacactccagaaccgctaggcatttggagtaaaaacaggatattagataaaaaagagtcagcgatttatatgtcatcatatttatcaggcttttttggggatcttgcacgtatctactcaggatttgtacctgtttttaatcacgactttagactctggcaaaaaaaacatggtactggcggggattatattattctttctgatgtactgtggactaaggttgaagaatcagataaggtgatttttttatga

SEQ ID NO: 270584 - DNA, 393 bp, Klebsiella pneumoniae
atgagccttagaatctacgcgaaaataatcaccattatactgatttccggttgtttgatatttccaacatcagttttctatggcaaccataacaaggtgtttgaaaactcaagccctaacaacacatttaaggttgttgtatataaggcagaggtttacaaccttttctcattatacaaatttcttcgcggcgaaaactatttttttgtcgtctatgataaatgtggggatattgcgtttaagccttctttatggtttggcatagatcgttctgtagtatatggggggttccatttttctaaatatgacaaaaatactctatttttcccgacaaatgatggcattgattcaatacagttaattcctaacttatctgaatgtaagcgtgcatag

SEQ ID NO: 270585 - DNA, 399 bp, Klebsiella pneumoniae
atgaaaacgctgcatctggattttaccccgcgcaccgccatcaacaccgatggtgcacagacgccgctggcgacaatggtgcgggtttatcagctccgggatcgtaaagcggttgatgccgccgattaccagacgctgctgcgcagggccgatacggtacttaaggacgacatactggcatcaaaagagctgctggtgatgcccaatggcagcgtgacgctcaatatgcccatggatgaagacgctcagttcgtggctgtggtggggctgtttaaccggccggatcagaaggacaaccgctggcgcctggtgctgacccgtgacgacctcgacccggacaaaccccgcacgattgaactgggtgatggctggcttggccttgtgccggtaaaggagtga

SEQ ID NO: 270586 - DNA, 714 bp, Klebsiella pneumoniae
atgctccccgctggtgaccgcatcactgcgcacgctgactgtggcatccatcggcgtggtggcagtccggtagttgtaatcccgcgtggcgacggtggcggtggcgatgttgtgccaggtccgcacatcccagaccgactccgccgcgccatcaaacagacccgatggctcgctgtacggaagacgcacatcaaaccggtagttaagctggctgtcggcaaaaatgtacgtatccagaccgcgcacgtcatccatctctgtgcgccagtaaatccccacctcagacaggatgcgccggatgaactgcagatccgtttcccgccactgggtgataatttcacgcggcgggtaggtgcgctccagccggaattcaaaatcagcgccctccagcccgtgcttgcgcagcacctgctccaccacctccggcacggactggttctgaaagacggcgcactgccgggtgtatcccggcagcgccagccgggaactgagcgtgagccggtagtgggactggtcctgagaggtggacagccattccaggcgggtcaccatgccgtggacatttttgccgccacgtatccggaaggtggcatatttcatcagcacctgttccgggagaatgtccgcctgcggggaggtaaactcaatgtcccaccggaagggctcgctcagggcttcgctgccgcgaaagcgcagaatatccggcttcactga

SEQ ID NO: 270587 - DNA, 321 bp, Klebsiella pneumoniae
atgctcaatcccgtttttactcagcttcagatacgatccgccgccattcagcgtcagtgtctccggcgtgctgatggtaatcccgtcctcgcagctggttatcgtcacctgctgctttgccagaagccccatcgtgttgtgctgcgcctgaatatcaatattcccctgattggcgaccagcttcgccccgcctttatgcacaaacatacccagggctttttcaaccgttacagaaacatttttcatcgcaccgatatcaagatgctgaccggcattgatcatggtgttgcgggtactgctgagctgaaggtgttcgcctga

SEQ ID NO: 270588 - DNA, 324 bp, Klebsiella pneumoniae
atggtgcgggtttatcagctccgggatcgtaaagcggttgatgccgccgattaccagacgctgctgcgcagggccgatacggtacttaaggacgacatactggcatcaaaagaactgctggtgatgcccaatggcagcgtgacgctcaatatgcccatggatgaagacgctcagttcgtggctgtggtggggctgtttaaccggccggatcagaaggacaaccgctggcgtctggtactgacccgtgacgacctcgacccggacaaaccccgcactattgaactgggtgatggctggctcagtcttgtaccgctaaaggagtga

SEQ ID NO: 270589 - DNA, 1086 bp, Klebsiella pneumoniae; identical to SEQ ID NO: 212977

SEQ ID NO: 270590 - DNA, 894 bp, Klebsiella pneumoniae; identical to SEQ ID NO: 212976

SEQ ID NO: 270591 - DNA, 603 bp, Klebsiella pneumoniae; identical to SEQ ID NO: 212975

SEQ ID NO: 270592 - DNA, 1581 bp, Klebsiella pneumoniae; identical to SEQ ID NO: 212974

SEQ ID NO: 270593 - DNA, 726 bp, Klebsiella pneumoniae; identical to SEQ ID NO: 212973

SEQ ID NO: 270594 - DNA, 807 bp, Klebsiella pneumoniae; identical to SEQ ID NO: 212969

SEQ ID NO: 270595 - DNA, 867 bp, Klebsiella pneumoniae; identical to SEQ ID NO: 212968

SEQ ID NO: 270596 - DNA, 1665 bp, Klebsiella pneumoniae; identical to SEQ ID NO: 212966

SEQ ID NO: 270597 - DNA, 813 bp, Klebsiella pneumoniae; identical to SEQ ID NO: 212965

SEQ ID NO: 270598 - DNA, 1059 bp, Klebsiella pneumoniae; identical to SEQ ID NO: 212964

SEQ ID NO: 270599 - DNA, 1008 bp, Klebsiella pneumoniae; identical to SEQ ID NO: 212963

SEQ ID NO: 270600 - DNA, 750 bp, Klebsiella pneumoniae; identical to SEQ ID NO: 212962

SEQ ID NO: 270601 - DNA, 744 bp, Klebsiella pneumoniae; identical to SEQ ID NO: 212961

SEQ ID NO: 270602 - DNA, 837 bp, Klebsiella pneumoniae; identical to SEQ ID NO: 212960

SEQ ID NO: 270603 - DNA, 1323 bp, Klebsiella pneumoniae; identical to SEQ ID NO: 212959

SEQ ID NO: 270604 - DNA, 1854 bp, Klebsiella pneumoniae; identical to SEQ ID NO: 212958

SEQ ID NO: 270605 - DNA, 639 bp, Klebsiella pneumoniae; identical to SEQ ID NO: 212957

SEQ ID NO: 270606 - DNA, 213 bp, Klebsiella pneumoniae; identical to SEQ ID NO: 212956

SEQ ID NO: 270607 - DNA, 1413 bp, Klebsiella pneumoniae; identical to SEQ ID NO: 212955

SEQ ID NO: 270608 - DNA, 237 bp, Klebsiella pneumoniae; identical to SEQ ID NO: 212954

SEQ ID NO: 270609 - DNA, 987 bp, Klebsiella pneumoniae; identical to SEQ ID NO: 212953

SEQ ID NO: 270610 - DNA, 417 bp, Klebsiella pneumoniae; identical to SEQ ID NO: 137644

SEQ ID NO: 270611 - DNA, 1221 bp, Klebsiella pneumoniae
atgacattttcagtagaacaggttcgcgccgattttccggtactgaaccgggaggtcaacggtcagccgctggtctatctcgacagcgccgccagcgcccagaagccggaggcagtgatcggcgccgaagcggaattctatcgccacggctacgcggcggtgcaccgcggcatccataccctcagcgcggaagccaccgcgcggatggaagccgtgcgtcagcaggcggccaccttccttaacgccgggtcggcggaggaagtggtgttcgtccgcggcaccaccgagggtatcaacctggtggccaacagctggggaaacgccaacgtcggcgccggggataacatcatcatcagcgaaatggagcaccacgccaatattgtgccgtggcagatgctgtgcgcccgcgtcggggctgagctgcgggtgatccccctgaacccggacggtacgctgcaactggatgttgtcccgggactgtttgacccgcgcacccgcctgctggcgataaccgaggtctccaacgtgctggggacggaaaacccgctggcggcgctgattgctcttgcgcatcagcatggcgcgaaagtgctggtggatggcgcccaggcggtgatgcaccacccggtggacgtccaggcgctgggctgcgatttttatgttttctccgcccacaagctgtatgggccgaccgggatcggcgtgctctacgcccggtccgagctgctgcagacgatggcgccttgggaagggggcgggtcgatgatcgccaccgtcagcctgacggagggcaccacctggaatcaggcgccgtggcgctttgaggccggcacgccgaataccggggggatcattggcctcggcgcggcgctgacctacgtcagccagctgggactgacgcagattgccgagtatgagcagacgctgatgcgctacgcgctcgatgccctgcgcgcggtaccggatctgatcctttacggcccggcgcagcgtaaaggggtaattgctttcaacctcggtcagcatcacgcctatgacgtcggcagcttcctcgataactacgggatcgccgtgcggaccggacaccactgcgcgatgccgttgatggcccggtatcaggtaccggctatgtgtcgggcatcgctggcgatgtacaataccacggaagaggtggaccgcctggtggccggcctccagcggatccgcaaactgttagggtaa

SEQ ID NO: 270612 - DNA, 1488 bp, Klebsiella pneumoniae; identical to SEQ ID NO: 212948

SEQ ID NO: 270613 - DNA, 378 bp, Klebsiella pneumoniae; identical to SEQ ID NO: 212947

SEQ ID NO: 270614 - DNA, 198 bp, Klebsiella pneumoniae; identical to SEQ ID NO: 137638

SEQ ID NO: 270615 - DNA, 396 bp, Klebsiella pneumoniae; identical to SEQ ID NO: 212945

SEQ ID NO: 270616 - DNA, 633 bp, Klebsiella pneumoniae; identical to SEQ ID NO: 137636

SEQ ID NO: 270617 - DNA, 1185 bp, Klebsiella pneumoniae; identical to SEQ ID NO: 212943

SEQ ID NO: 270618 - DNA, 3093 bp, Klebsiella pneumoniae; identical to SEQ ID NO: 212942

SEQ ID NO: 270619 - DNA, 1110 bp, Klebsiella pneumoniae; identical to SEQ ID NO: 212941

SEQ ID NO: 270620 - DNA, 615 bp, Klebsiella pneumoniae; identical to SEQ ID NO: 212940

SEQ ID NO: 270621 - DNA, 987 bp, Klebsiella pneumoniae; identical to SEQ ID NO: 212939

SEQ ID NO: 270622 - DNA, 912 bp, Klebsiella pneumoniae; identical to SEQ ID NO: 212938

SEQ ID NO: 270623 - DNA, 999 bp, Klebsiella pneumoniae; identical to SEQ ID NO: 212937

SEQ ID NO: 270624 - DNA, 1038 bp, Klebsiella pneumoniae; identical to SEQ ID NO: 212936

SEQ ID NO: 270625 - DNA, 762 bp, Klebsiella pneumoniae; identical to SEQ ID NO: 212935

SEQ ID NO: 270626 - DNA, 1032 bp, Klebsiella pneumoniae; identical to SEQ ID NO: 212933

SEQ ID NO: 270627 - DNA, 981 bp, Klebsiella pneumoniae; identical to SEQ ID NO: 212932

SEQ ID NO: 270628 - DNA, 219 bp, Klebsiella pneumoniae; identical to SEQ ID NO: 212931

SEQ ID NO: 270629 - DNA, 321 bp, Klebsiella pneumoniae; identical to SEQ ID NO: 212930

SEQ ID NO: 270630 - DNA, 249 bp, Klebsiella pneumoniae; identical to SEQ ID NO: 212929

SEQ ID NO: 270631 - DNA, 411 bp, Klebsiella pneumoniae; identical to SEQ ID NO: 135736

SEQ ID NO: 270632 - DNA, 3057 bp, Klebsiella pneumoniae; identical to SEQ ID NO: 212927

SEQ ID NO: 270633 - DNA, 1113 bp, Klebsiella pneumoniae; identical to SEQ ID NO: 212926

SEQ ID NO: 270634 - DNA, 2379 bp, Klebsiella pneumoniae; identical to SEQ ID NO: 212925

SEQ ID NO: 270635 - DNA, 834 bp, Klebsiella pneumoniae
atggaaagtgctgtagatcgccacgtattttatatttctgacggtaccgccatcacggcggaggtgctggggcatgccgtgatgtcgcaattcccggtcgccatcagcagcgtaaccctgccgtttgtggaaaacatcagccgcgcgcgggcggtaaaggagcagatcgacaccatctatcagcaaacgggtattcgcccgctggtgttctactccatcgtcatcccggaaatacgcgacattattctgcaaagtgaaggcttttgtcaggatatcgtgcaggcgctggtggccccgctgcagcaggagctcaacctcgacccgacgccggtggcccaccgtacccacggcctcaaccccggcaacctgattaaatacgatgcgcgtatcgccgctatcgattatacccttgcccatgacgatggcatctcgctgcgcaaccttgaccaggcgcaggtgatcctcctcggcgtctcgcgctgcggcaaaacacccaccagtctgtatctcgccatgcagtacggtattcgcgccgccaactatccgtttatcgccgacgatatggacaatctggttctgccggcctcgctgaaacccctgcagcataagatgttcggcctgaccatcaatccggagcgtctggcggcgatccgcgaggagcgccgggagaacagccgctacgcctccctgcgccagtgtcggatggaagtgaccgaagtggaggccctgtatcgcaagaataaaatcccctgcctgaacagcaccaactattccgttgaggaaatagcgacaaaaatcatggacatcatggggctgaatcgcagaatgtactaa

SEQ ID NO: 270636 - DNA, 1047 bp, Klebsiella pneumoniae; identical to SEQ ID NO: 212923

SEQ ID NO: 270637 - DNA, 228 bp, Klebsiella pneumoniae; identical to SEQ ID NO: 212922

SEQ ID NO: 270638 - DNA, 1443 bp, Klebsiella pneumoniae
atgaccctttcttttaccacccactggcgggatgaactgccggacttttacacttccctgtcaccaacgccgttggataacgcccgactcatctggcgcaacgccccgctggcgcaacagctgggggtgcccgacgccctgtttgcgcctgaaagcggggtcggtgtctggggcggcgaagcgctgcttccgggcatgtcgccgctggcgcaggtatacagcggccatcagtttggcgcctgggccggccagctgggcgacggacgcgggatcctgctcggcgagcagcagctggcggatggccgccgttacgactggcatctgaaaggcgccggcctgactccttattcgcggatgggggacggccgcgccgtgctgcgctcgacgatccgggaaagtctggcgtcggaggcgatgcatgctctggggatcccgacgacgcgcgccctggcgatggtgaccagcgataccccggtctaccgcgagcgcgtggagcccggcgcgatgctgatgcgggtggccgagagccatgtccgcttcggccatttcgaacatttttactatcgccgtgagccgcagaaggtccagcaactggccgactatgttattcgccaccactggccgcagctgcaggatgaggcggataagtacctgttatggttccgtgacattgtcatgcgtaccgcgcagactatcgccagctggcaaaccgtgggctttgcccatggggtgatgaataccgacaacatgtcgattctcggtctgaccatcgactacggcccgtatggcttccttgacgattttcaaccggacttcatctgcaaccactccgattatcaggggcgctacagttttgaaaaccagccggcggtggggctgtggaatctgcagcgtctcgcccaatcgctgtcgccgtttatcagcgctgaagcgttaaacgcggcgctggatgagtatcagcacgccttgctgaccgcttatggccagcggatgcgcgataaactcggcctgttcagccagcagaaaggggataacgacctgctggacgggctgtttgccctgatgatccgcgagaagagcgactatacccggacgttccgcctgctgagccacagcgaacagctcagcgccgcttcgccgctgcgcgatgagtttatcgaccgcgcggcctttgacagctggtttgccgggtatcgtgcgcggctgcgtgatgaacaggtggacgacgcgcagcgccagcagaggatgcagggcgtgaatccggcgctggtgttacgtaactggctggcgcagcgggcgatcgagcaggctgaggcgggcgatatgggcgagctggagcgcttgcatgccgcgctggcagacccctttaccgatcgcgaggacgactacgtccgccgcccgccggactgggggaaacgtctggaagtcagctgctcgagctaa

SEQ ID NO: 270639 - DNA, 465 bp, Klebsiella pneumoniae; identical to SEQ ID NO: 212920

SEQ ID NO: 270640 - DNA, 750 bp, Klebsiella pneumoniae; identical to SEQ ID NO: 212919

SEQ ID NO: 270641 - DNA, 552 bp, Klebsiella pneumoniae; identical to SEQ ID NO: 212918

SEQ ID NO: 270642 - DNA, 801 bp, Klebsiella pneumoniae; identical to SEQ ID NO: 212917

SEQ ID NO: 270643 - DNA, 987 bp, Klebsiella pneumoniae; identical to SEQ ID NO: 212916

SEQ ID NO: 270644 - DNA, 1434 bp, Klebsiella pneumoniae; identical to SEQ ID NO: 212915

SEQ ID NO: 270645 - DNA, 915 bp, Klebsiella pneumoniae; identical to SEQ ID NO: 212914

SEQ ID NO: 270646 - DNA, 1254 bp, Klebsiella pneumoniae; identical to SEQ ID NO: 212913

SEQ ID NO: 270647 - DNA, 369 bp, Klebsiella pneumoniae; identical to SEQ ID NO: 212912

SEQ ID NO: 270648 - DNA, 300 bp, Klebsiella pneumoniae; identical to SEQ ID NO: 212911

SEQ ID NO: 270649 - DNA, 2388 bp, Klebsiella pneumoniae; identical to SEQ ID NO: 212910

SEQ ID NO: 270650 - DNA, 984 bp, Klebsiella pneumoniae; identical to SEQ ID NO: 212909

SEQ ID NO: 270651 - DNA, 357 bp, Klebsiella pneumoniae; identical to SEQ ID NO: 212908

SEQ ID NO: 270652 - DNA, 198 bp, Klebsiella pneumoniae; identical to SEQ ID NO: 212907

SEQ ID NO: 270653 - DNA, 435 bp, Klebsiella pneumoniae; identical to SEQ ID NO: 212906

SEQ ID NO: 270654 - DNA, 1929 bp, Klebsiella pneumoniae; identical to SEQ ID NO: 212905

SEQ ID NO: 270655 - DNA, 234 bp, Klebsiella pneumoniae; identical to SEQ ID NO: 212904

SEQ ID NO: 270656 - DNA, 759 bp, Klebsiella pneumoniae; identical to SEQ ID NO: 212903

SEQ ID NO: 270657 - DNA, 933 bp, Klebsiella pneumoniae; identical to SEQ ID NO: 212902

SEQ ID NO: 270658 - DNA, 285 bp, Klebsiella pneumoniae; identical to SEQ ID NO: 212901

SEQ ID NO: 270659 - DNA, 873 bp, Klebsiella pneumoniae; identical to SEQ ID NO: 137708

SEQ ID NO: 270660 - DNA, 738 bp, Klebsiella pneumoniae; identical to SEQ ID NO: 212899

SEQ ID NO: 270661 - DNA, 297 bp, Klebsiella pneumoniae; identical to SEQ ID NO: 212898

SEQ ID NO: 270662 - DNA, 648 bp, Klebsiella pneumoniae; identical to SEQ ID NO: 212897

SEQ ID NO: 270663 - DNA, 207 bp, Klebsiella pneumoniae; identical to SEQ ID NO: 137704

SEQ ID NO: 270664 - DNA, 1461 bp, Klebsiella pneumoniae; identical to SEQ ID NO: 212895

SEQ ID NO: 270665 - DNA, 330 bp, Klebsiella pneumoniae; identical to SEQ ID NO: 137702

SEQ ID NO: 270666 - DNA, 834 bp, Klebsiella pneumoniae; identical to SEQ ID NO: 212893

SEQ ID NO: 270667 - DNA, 1005 bp, Klebsiella pneumoniae; identical to SEQ ID NO: 212892

SEQ ID NO: 270668 - DNA, 1014 bp, Klebsiella pneumoniae; identical to SEQ ID NO: 212891

SEQ ID NO: 270669 - DNA, 909 bp, Klebsiella pneumoniae; identical to SEQ ID NO: 212890

SEQ ID NO: 270670 - DNA, 921 bp, Klebsiella pneumoniae; identical to SEQ ID NO: 212889

SEQ ID NO: 270671 - DNA, 1635 bp, Klebsiella pneumoniae; identical to SEQ ID NO: 212888

SEQ ID NO: 270672 - DNA, 648 bp, Klebsiella pneumoniae; identical to SEQ ID NO: 212887

SEQ ID NO: 270673 - DNA, 2676 bp, Klebsiella pneumoniae; identical to SEQ ID NO: 212886

SEQ ID NO: 270674 - DNA, 528 bp, Klebsiella pneumoniae; identical to SEQ ID NO: 212885

SEQ ID NO: 270675 - DNA, 408 bp, Klebsiella pneumoniae; identical to SEQ ID NO: 136625

SEQ ID NO: 270676 - DNA, 903 bp, Klebsiella pneumoniae; identical to SEQ ID NO: 212883

SEQ ID NO: 270677 - DNA, 261 bp, Klebsiella pneumoniae; identical to SEQ ID NO: 219601

SEQ ID NO: 270678 - DNA, 720 bp, Klebsiella pneumoniae
atggtcgatttagcatgtagttggtcaccgacattaatagttgaccttataaaaagtatagtctggccagcggttgttcttctcattggattcagttttcgagtccgaatttttgacgtggtacgttcttttttgtctaaaaatacagtatctgaaatatctgcttctgtatcaggagtatcggcaaaattcatggcatcaaaacaatctttagaggttttggaaacatccaactccgataccgtgaagttaccaaaaaacatggattttgaagctataagggaaagacatgaacagcataaaacagaattcagtgatgagctttaccaagctataagtaaacacgtatactctttagaggttgataatgaagtaagaattgatttattagtgcgtgaagcatccttattacaaagcgcagtgcgatactttcaaataaacaaagtactatttcgctcgcaatataatttatttttaaccatgtttaccaatggtaattatataagtacggaaagcgcacttcaatattttgaaaaaataaaaaacaataataaagaggctttttccgaatgggactggataaagtatagtgcctatccggtcagcaatgacctaatctatgaaaatgatggtggctacaaactcactacaataggcaggtcatatgtcgcatttatgtcaaaaaaaccacaattaattgacgagctagcaaaattgtaa

SEQ ID NO: 270679 - DNA, 561 bp, Klebsiella pneumoniae
atgaaacttattgaaaatcaatactctactttattttcctgtatctatgacgaacaacagcctgtcggcaatctagggcgcgggactcactactcaatatttagagctatagagtggctggatgttatcagagcgcctcttgacttacctcagttgcatgatttttcagtcatctgggatgaggatcatgatgagcgagtcattaatgtaatcgaaaatatatacatggctggattactttcacctgtacagtttattggtgagagaaaagggtcattgacagttattgtcgctgcgaaattctatttcggcggcactccggacattagcgattatcaaaaaaaattgcaaaagatttgcgataaatctactgacggggatttctggcctgtcgagattggcatgtttgaccgttcacctggatttcctccaacttctccacatcaaaccgaagtatgtggattaataaatgatgagtttcatcgagtagtcacatatttaagaaatatcgactcactctgggggttgggcacaaaaccctttacccctcatagtgcataa

SEQ ID NO: 270680 - DNA, 660 bp, Klebsiella pneumoniae
atgagcgttgaaaatgagctagttgttattgtttttcgaggggttgaaagattgttgatctcagtcggtgggatcatctcaatttggcttggatataaattattcaataaggctttacctactaatggttcttttgatggtggcattggtacgtggtcaataagaatgcaaaatattgctccaggcgtattttttgctctttttggcgcagcctcattaattttttcgattatgcacccgttttcctatgaaaattacagtgaccaacctgcccaatccgatgtcgggaagatagccagtaataccccgcaaaacaatggaggcttaaagtcaaagtttcttagtgtaaatattgggaatgcaccaaatcttcaaatagatgatgagtcaggattacttagtgccttgtttgtaatcgataagtatgggaatagaatttcatctgggttgaccggagatgaaattgataaaatgaatggagctataggggagttacataaccttcaaataaaattaacagatagaatgtatggagtagggagtattgataaatatcagattatgaactcagaaatgattaataaaaagaaaaaaataagtgactattcaaaagacgatcagaggctgtatgaaggaattaaaaaactttacgagcagtga

SEQ ID NO: 270681 - DNA, 945 bp, Klebsiella pneumoniae
atgaaacgatgccttgtatttatagtattgatgcttgtttgtagaatgtccaccgctggtgtccaacccgcagatatggcagcacatattattggggtgataaataaaaaaattaatgacgttaatgatcctctccaagacattaccagtaggctttctttttcagttgacacatcttctccaacccctagcgcctcatcaacgtgggtaaacggcactccattaataacattcacttcttcactattagatgtcattttttacacagcagagctagatactcttactatgaaagataatcgttgggctccttgtttgaaatcctatagtagttatcttcgaaattcctatagaaaaatgatgttggacaatcaaaatcatactcctgttactccacttataccattggagaaatttggtagtgtttgttctggtatagaaaagctatacccattcactggtcaagataaggtgattagagatagaagagcagaggatagtattggatttatttatcttcatgaattatcacacctttactataggcatgttaattatcacgtcgatggattgagtgatgaagaagagcggaagataaactgcgaaatgagaaggcaggagaaagaagccgacattttagcgacccaaaaaattgtaaaatttggctggtatagatccgctttagatgttgctgtttggggggtaatgcttaatctcgggataatggaaacaagccgaaatagcactcttgaccatccatctgttattgaaagaatgacgtatgttttagaagaggccagagcggatatacttgcatctggaaagcaaataagtaaggaagagtctgatttgattgatgaatcaagaaagcttcaagaaaagactgataaagttataggtgaatttgatgatgagacttctgggacaggagagtgcgaaatttga

SEQ ID NO: 270682 - DNA, 1197 bp, Klebsiella pneumoniae
atgattattttctgggatactgttaaggaaaacgtagaggttataggcacgcttgccacttctcttgctttttttgctactgcctgggctgcatacgaggcaagacatagtgcaaaagcagcaatgaaagcgacccagctaacggcggattcactccttgaaatgaaaaaagcctcctttaaggagtggtacggcatattacttgaacagcataataaattgcttgaggacgtaaataagaccttgcgcgatgacagtgagctcaatgttaaattaagcatgaatatccttaagggcatttattatcatgcaaccaaaaaacctgtttacatcaagtatattaaccacataattttaattttgacttatttggataaagatttctacctgccatcatcagcggataatgaaaagagagcctatatagaacagttgcgcaatagtattagtccaaaagtaagcatgcttatttctattttcggccttaacgtcgataataataaaacctacgatgcaaagaagctttacaacctccttaataaatttaacttctttgaaaatgaacttttttttgaagaagcaatatcgaaagttcattacttagactcttatgtagctgaaatatttaacaaagaatacctaagagcagttgaatttcatgttgatgaaatggttcgtggtcgtgcgccctctggtgtaaaagtgtcacactcgtataaaaggattacgttcgcggtgttgtggtcgtacaataatccttgccaacaacatttgttgcaaaggttcaatgacttgccactgcatattagaaatggcattaagttaagtatggaaaaatcggccgaaagagtagccgagtacgattcttggtttcttgatgccatcggctcggaacttaatatatcaggtttcaaaaaaagaatcatcaaggacgaaaaacaggtaaaaaggctaataaggatttattttaaatatcctttttatagcactcagacaggtattttgttaactaatggctataataacagatacgctgatgatattgaaaacagtctgtctaaatatgggttatataaagcatatttaaacctcaacactaatcccaagcaagaggaactgattgacaaaatagtggccaaagttgaggaaatggtcgatttctacaaaacagaccttaattcatttagttttaaatga

SEQ ID NO: 270683 - DNA, 1164 bp, Klebsiella pneumoniae
atggatttattctcaacgaatatagcgacaaataaattacatacaagctttaaagcaatctataaagaccccaagctttctcctgttagggaagtcatccaatcatgggggagcggattgctagaacgaagtggtgagcaaactaaatttgtaaacgagttccagactacctttaattcttctatgtgggagttatatctcaatgagatgtttattcgccaaggctattcaatagactatacaaaatatagccctgatttttatgttaccacgccatcaggttatcaatttaatgtagaggctatggtatctgataaacctcataaaccacctgccagtgaagttttcagcaaagcgagatttaagcatcaatcaactctaaaacttcttggaaaaattaaagataagcatgatctttttaccggtgttaacggcaagaagtttccttatggaacaatggaacatgtggctggaaaaccgtttgttttggcattggccccatttgattcagacctatcgttaagccaaaataatacgattattaatcgagtattgtttggaattgaagagccaacgatgagagacatcgttaatggtaagcagagaaaggtattatcaattaaaaaaaatgaggatattgaactacctttaggtatttttacaaatgactcatacaaagagatcagtgctgtcttattttcaacaactggaacttatggcaaggctgtcgtccaaagtggtgttgaccgatatgtgcgatatacgagatatcgcgcacttgatctgaatgattttatagcctctgaaggcatgaagaacgaaggttctcaaacgagaaaacttacacacgaacattatgtgactaccaaacgacatttttacaacaatgaggttgttggtgcggatgtcgtgttgtgtcactctaaggattatacagaaacacactttgatggcctgcatatatattacaatccttatgcaaccgtccctttggataagaacatcttctcttcccctgaaataacgcataatttttatgatatagctaatggcattcctgaccagcgccatccagatggcgcattggtgtcacggcaggtatttgaaatatctcaattcgcacttagacacatagttaagtgttggtttcctgattatcgatag

SEQ ID NO: 270684 - DNA, 723 bp, Klebsiella pneumoniae
atgctctacaaatatattggaagcaatgatgcagaaaacgtagtgagaaatcttaaacgttttatcgatgacggcaccatttctgccagcccaccatcttcgtttaatgatccgtccgaatttaaagtctctataaaggtggaaggtactcctgatgaacttcaaaaggcttatgagacttttgaagaccttaggttaacctttgatgaatggttagcagttgcacctgaaacctcaagaatagtggcacaagatttaagaagagaagcgttggggaatttcggggtggtgtgtttgacccctgttgctaacagtatcttgatgtggtcacattattctgcatctcataaaggtttttgcattggtttcgacgatgagttcgtgaaggatgttcaggactttcatagttttgatgctgtcaggtatatgggatctgtgccaaacttcaactatgcaaaggaagatatgcatgcattatttcaaaagctctttttctataaagacagttgttggttctatgaaaatgaaaaacgaattattactaaatctataggtgtcaaaacattcgataagaaacatataaaagaggtttgtcttgggcataatgtcgatccgctagttgaggagaatgctcgaatattggctaaacaaaacccaaatattaagttttggaaaatgaccacgcttgatgatggttacgagctgaccaaaataacgctttaa

SEQ ID NO: 270685 - DNA, 510 bp, Klebsiella pneumoniae; identical to SEQ ID NO: 82613

SEQ ID NO: 270686 - DNA, 303 bp, Klebsiella pneumoniae; identical to SEQ ID NO: 82614

SEQ ID NO: 270687 - DNA, 528 bp, Klebsiella pneumoniae; identical to SEQ ID NO: 82615

SEQ ID NO: 270688 - DNA, 528 bp, Klebsiella pneumoniae; identical to SEQ ID NO: 82616

SEQ ID NO: 270689 - DNA, 486 bp, Klebsiella pneumoniae; identical to SEQ ID NO: 82617

SEQ ID NO: 270690 - DNA, 825 bp, Klebsiella pneumoniae; identical to SEQ ID NO: 82618

SEQ ID NO: 270691 - DNA, 2037 bp, Klebsiella pneumoniae
atgcacgccattactcaaaccgaatccaaaaccatcaccacacacgaaactacagccccagcacaaagcctgattctggtgccgttgtcacagctgcgccgctcgcgccgtaacgtgcgcaaaaccgcaggccagtccatcgaggcgctggcgtcgagcattgagcgtgttggcttgctgcaaaatctgaccgtgattcttgctgtcgatggcaagcattacgaagtagtagccggtggccgcaggctcgccgcattgaagctgctggcaaaaaaacgtcgtttgcccaaggattgggaggtgccttgcctaatcgtggccgatggcagcgcccgcacggtcagcctcaccgagaacgtgcagcgcgaagccatgcatccggcagaccagtttgaagccttcgcggcgctggtggccgaaggccgccccgttgaggatatagcggcggacttttccgttacgccgcttgtggtgcagcgccgcttgaagctggcgaacgtctcgccgcgtctgatggcggactatcgggccgatgccgtcacgctcgatcagttgatggcgcttgccatcaccgacgatcacacggcacaggaagccgcgttctacgatgcaccaacgtggcagcgcagtccgcacagtctgcgcgaacgcctgaccgagcgcgaaatcgacgcttatcgccatccgctggtgcgcttcgtcgggctggacaactacgaagccgcaggcggcggcatccgccgcgacctgttcgcggaaggcgatgcgggcgtgtatctgaccggtgctgcgctgctggaaagtctggcgcaagacaaactgacaggtattgccgccgctgtccgtgccgagggttgggcgtgggtggatgccacgccgggtgtgacccatgccgacctgcacgctttccaacgcgccccgagggagcgccgcgaaccgaacaagcgcgaagtcgcgcgcatagagaagctgcaagccaagatgcacgaactggccgaggccgtggatggcgcgctggaggctgacgacgaggaaaaggccgatgccttgcaagaggaaggcgaagccgtgggcgagcagttgcaggcgctggaagatggcctgcagggctacagcccgaatgtgaaggccgcagccggtgccatcgtcaccatcgaccgcaatggcgaaaccgtgattcatcgcggcctgatgcgtgaggccgaagccaaggcgctgcgcacgctggaacgcttgcggcagggtttcggcggcgaaggcgaagccggaaacgacgacgaaggcgaggacgacgaacagcccaagatcgccgccatgtctgaccggctggcgcagcggttgagcgcccaccgcaccgccgcgctgcaaatcgaagtcgcccggcacccgcaagccgcgctggctgccgtggtgcatggcatggtgcagaccatcttgcagggcagccactacggccacgacctgccgctgggcgtgagcttgaaagtgcaagaccggctggaaggcatggccccggactggccggaatcgcccgccgccgtggcactgcgcgaactgcaacaggtggcgggcgaagccttgccggaggacagcgccgaactgttcgccgcgctgctggcgaagccgcaagacgaactggtgcggctgctggccgtatgcgtggcttccacggtggacgtggtgacgccccgcgccacggtgcagcaacccggcgaggaattggcgcaggccgtgggcctcgacatggccgcatggtggcagccgaccgcagaaggctatttcaagcacgttccgaaggctgtgattctggatgccgtgggcgagtacgcgccgcagcacgtcacccggctggcgaagttgaagaaggccgacattgccagcgaggccgaacggctggccgatggcaccggctggatgcccgccatcttcaaggccgcaggcccgcaggatgccgcgcaggaggcaggcccggagcaggacgccccggaggatgccgaggcaatggcggatgaacccgccgaggcgctggccgcttga

SEQ ID NO: 270692 - DNA, 210 bp, Klebsiella pneumoniae; identical to SEQ ID NO: 82620

SEQ ID NO: 270693 - DNA, 825 bp, Klebsiella pneumoniae; identical to SEQ ID NO: 82621

SEQ ID NO: 270694 - DNA, 315 bp, Klebsiella pneumoniae; identical to SEQ ID NO: 82622

SEQ ID NO: 270695 - DNA, 270 bp, Klebsiella pneumoniae; identical to SEQ ID NO: 82623

SEQ ID NO: 270696 - DNA, 351 bp, Klebsiella pneumoniae; identical to SEQ ID NO: 82625

SEQ ID NO: 270697 - DNA, 771 bp, Klebsiella pneumoniae
atgactgatcgcagcgtcgaacactggtatccgacagcggcttatctctacgttctgcaccagggcggccccgcgctggcctgggagtacctgcgccgaaaccctgactaccggcgcgactggctgcaccgccgccgccgaccagatacggcacatcgttggggcttgcgcctgctggaagatcccgccctggatgcacgcgacgcgcatccggcgtggttccccgatcacgatggcgtgatccagctctacccggacgacgacccgccgccggatgccgatgccttcgagttctggaacgtcccagggcgcaagcacctgatccatgatggcaagcgcctgatgctgacggcgcaatggcccggctgctgcgtgcggctcgcgctcacgccgagcatggccgacggaatggcctacctctacgccatccgaggctgcactacgccttgcgcacgctatcgcgcactggcggctgggctggatgcgctgtccgccgcgaccttggccgcacctgcggcggcggcccgctcccggcccacgccgaccgcggtgctggagctgcacaccttgcaggcgctcgacgcgaccctggcgggcgcgtccttgcgcgaggtggccaaaggactgttcggcgcggatgccgtcgcggccgattggcacaaagacggcgccttgcgtgcccgcgtgcggcgcttggtgcgccgtggcgaggcgttgatgcgcggcggctatcgcagcctggcgcagctcccgccagttgcatcgcagtaa

SEQ ID NO: 270698 - DNA, 264 bp, Klebsiella pneumoniae
atgagcagcccgcgcagcaagcgcgtcggcatcggcgcacgtccgcccgcgaatccgcacgccgaggcgtggattcgccagggcgatgccgatgcgctcaacaagggcgacctttatacggcccgcctgacgctcgacgtgacgcccgcgctacgtgcacgcatcaagatcgccgccttcggccagggcgtgaccgtggccgagttgctgcgcggcttgctggaacgggagttccccgacaagcgcccggagaacctgccatga

SEQ ID NO: 270699 - DNA, 558 bp, Klebsiella pneumoniae; identical to SEQ ID NO: 82628

SEQ ID NO: 270700 - DNA, 600 bp, Klebsiella pneumoniae; identical to SEQ ID NO: 82629

SEQ ID NO: 270701 - DNA, 924 bp, Klebsiella pneumoniae; identical to SEQ ID NO: 82630

SEQ ID NO: 270702 - DNA, 516 bp, Klebsiella pneumoniae; identical to SEQ ID NO: 82631

SEQ ID NO: 270703 - DNA, 309 bp, Klebsiella pneumoniae
atggagcagcacatggtcgatgaatgggtggcacaagtgagtgcaacccacaaagccaatccggccttgcaacgcgatgaggccattcgctcggcctctctggccgcgatgacgttgatgctagcggcacaaggcatggggctggggtcgtgcgcgatgagcggattcgatgcacagcaggtcagccgggcgtttggtcttgacgcgaccgaactgccggtgatgatcgtgaccgtgggccatgccgccgatgacaactggccgcagaagccgcgccgggcattgacggaaattctttccatcgtgtga

SEQ ID NO: 270704 - DNA, 945 bp, Klebsiella pneumoniae; identical to SEQ ID NO: 82633

SEQ ID NO: 270705 - DNA, 255 bp, Klebsiella pneumoniae; identical to SEQ ID NO: 82634

SEQ ID NO: 270706 - DNA, 804 bp, Klebsiella pneumoniae; identical to SEQ ID NO: 82635

SEQ ID NO: 270707 - DNA, 1482 bp, Klebsiella pneumoniae; identical to SEQ ID NO: 82636

SEQ ID NO: 270708 - DNA, 945 bp, Klebsiella pneumoniae; identical to SEQ ID NO: 82637

SEQ ID NO: 270709 - DNA, 249 bp, Klebsiella pneumoniae; identical to SEQ ID NO: 82638

SEQ ID NO: 270710 - DNA, 1998 bp, Klebsiella pneumoniae; identical to SEQ ID NO: 82639

SEQ ID NO: 270711 - DNA, 318 bp, Klebsiella pneumoniae
atgcgatgcgcttccgtcctgctggccgtgctgctgaccgcttgcggccagcagccggtcgagaacttggccgacgccctggccgccgaccccgtgcggctcaaggagctacgcgggcaatgcgcggctgatcggcaaaccgtaggcgaggacgcctgccgcgccgccgccgaagccttccggcgacgcttcttcgccggccacaccgggccggacgaatacgaatcgctggccgaactgccgccgattccgccgagcttcgacacgcccaccgacgacatgccagcgccgctcacctcgccggagaacacgccatga

SEQ ID NO: 270712 - DNA, 246 bp, Klebsiella pneumoniae; identical to SEQ ID NO: 82651

SEQ ID NO: 270713 - DNA, 378 bp, Klebsiella pneumoniae
atgaccggtaactgcgcggcgctggcggcgctggcggatgaaccaggctatgcgcaaatcaacaccgccgacgccgaacggctaggcatcgaagatgaagagctggtatgggtcaattcgcgtaaggggcgcatcatcacccgcgcgcaggtcagcgatcggccgaataaaggcgcggtgtacatgacctaccagtggtggatcggcgcctgtaacgaactggtctcagagaacctgagtccgataaccaaaacgccggagtacaagtactgcgcggtcaacgttgagcggattgccgatcagcgcgccgcggaacagtacgtgatcgacgagtacaacaagctgaaatcccgcctgcgcgaaagcgcgatgggttaa

SEQ ID NO: 270714 - DNA, 795 bp, Klebsiella pneumoniae
atgattaccgccgcccaggataaaagctcctctctggttggcttgatgtatttaaaagttaacgctctgcgggtggtgatccaccgcgggaacctgtcaaaacctgtcactttgcgggccactgatagttgcgcacaaaacacctggcggagtttcgagacaattacgcccgcgagtaagcgttcagaaactgactatctggaagatagcgtgtccggcgccggcggtgaatgctgggcccatcacaccgccagctataaattgccgcaccgtgacaaaaagggcttgcggcctgaaggtgtcccggtctatggttatagcgcaccagcaaaatctggtgccgggattggcgtcccggagagtttacaggcgacctatgacgcgccatgcgtctttttttgtgtcgttaattcagtacaccattttttctgcgttgcgggtataatccgcgccgcttacaaaataatggtgggctggatgggggcggagaaatccgcgccggtttcctgtaacgccggttacgccaaccctgttcagtccaccaccagcgaaattggcgtttccggtggtgggtttcagacccagttacaggaggctgccatcatggctactacccctacccaaaatccacaatttatttggattatcgccgctgttcgccgcgatatgccgacaacaaagcccaaaattcaccacattgccgcatgttcagagcatgaagcccgtagctctttggttcgcgatcatatctgcttcttcgccggccgtatccgactggaggtagctcatgcgtaa

SEQ ID NO: 270715 - DNA, 561 bp, Klebsiella pneumoniae
atgacaatcaagaatgcccgcccagggcagggaatcactcaccatgaaaacagcagcgatgatgtttcggtcattaaatttgaggatacaagagtacgtattgttatgatcttaggagaaccttggtttgtggcagcggatgtatgtgcggctttggaaatcactgatcacaaggtttctttacggcgccttgatgatgatgaaaaggggaagtgtttaatacccacccttggcgggaagcagactatgcgaattatatgcgagtcaggtttctacaaactaatcgctcgtagtcgtaaggccactacacccggcacattagcccatcgcttcagcaactgggtattccgcgaggttgtcccttcgattcgtaaaacaggctcctatggtgtgccattcgcgttcctgaatgaccatacccgccgcaaagaacagtacacgaagaaggccagtatgtgtggtagggatcttcaatcatgcaaaggtgagaaagctcgtctggtcgccgaagaaatagagttgtggcgtaggtatcagccggatctgctgggggttcattaa

SEQ ID NO: 270716 - DNA, 810 bp, Klebsiella pneumoniae
atgtcatttaattttcaaattctggactcagaatttgcggaggcagttcacttcgaaactgtactcaatagtttgtcccgagcgaacgatcgaacaccccgtgagacagcaattgttttaagccgggccatgagtaaattcctgaatgagcacccatataatggaattgagttcaggctatatagctatagtcgattcactggttttcgagttgaagatgctgccattaagcaacatacattttttttaaatgagattgctaaagggtcagattacggtgaggaccttaatactaatgagtcaggcagatactttctcgtagatgagtatggtcatgaatatgctacgtgctattcattctattttaaattatctgaacttcttcgattccttatttacaataatgtgaaaatacccgctgagtttgagcatgctgtacctcatgctgagagaacgctcaatgtttatcaaaaattaattgataaaaagttagcgaaatttattggggaagttgatgactgtgatgaagataaaatctcactatctgaacccgataaaattgaatgggataagtttgcagggaaggatactgcgctaaagatgatagcgggtatggcgatcgctctcgaaaaaaccaaaggcaagtatgttcgtggtgggaagttgaataagtcagagatatcgaggacagtttcaaaattaataggcgagtacggcgatggtgttggtgtaacggataaggcattgataatgcttattgatgaggcacttcgcttgtacgctcctaaaatctctgctggagacttctaa

SEQ ID NO: 270717 - DNA, 255 bp, Klebsiella pneumoniae
atgataatggattacctgttgatgtcgtacattgcgctcgcttcctgctggcccgtgacgctgatcctgctgtcggttgctattgtcgttttactgaatgctgaacgccgggtgctgaatgtgtccattgttgccctggttggttttctggtctttgctgcctggcagttcggggcaactatgcgtagcccctcttcatttctggcgggtggtgcaggaagctttgcacatcctgccgggatagaaagccggtaa

SEQ ID NO: 270718 - DNA, 222 bp, Klebsiella pneumoniae
atgataatgcagagtaacattcctttgactgagagtatcgaaaaacggatcgccattaccaaatggagaacaatattttttcacaatcatgttttttgtagcaacattttgaacactatctggaaggtgagattcatttttaggctttgtagtatctatagctcctaccttaacaaaaataacgatgtcatcattcgtagcggagatgctttttatgcttaa

SEQ ID NO: 270719 - DNA, 213 bp, Klebsiella pneumoniae
atgcttaagcttttttctacatgggcaggaacgccatctaaagatggcgttaatgattttgccatgatgctttcggttggtatctcgtatcgcgcatcaccagcaaatactaacgttggcaaagctaacactatacagcatagtatcgaacgcatctgtaacctccgttacgtcattggcattgtaaaaatgattactagttcagtagtgtga

SEQ ID NO: 270720 - DNA, 636 bp, Klebsiella pneumoniae
atgccacaacaactgctgaatccggcaaaggtaactgaggttttcgctcatctgaacgaaactccagacaaccgtgccctgtattcagagttagtgagcggcagtgacgtcacatctgatgtcaaaggcgtttctctggctcctggataccgcgttgtacgtgtagacgatcgtaagaaaggtgagattcctcaggcgcactttgaactggcattgataaacgacctcaccgaagaggtagtgtattacaaccgtgtcattatccagcctgacagctatctgaattgccgacctgtaacgcagattctggtatggagaactcagaagcctaagcatcgtgctgtgcttcatgacttcgctggaatcattttcatgaactaccttctggagcgatacgatatcatcgtatctgatcgcaaccagactcatgaaggtatgtcattctggcaggcgcgcatgtatgacgccatggagcttgggctgcacctttatggttacgacatgatgacatgcgaactgatagaaatgcacaacgaagcagaacttgagaaaggtgggacttggttgtggggcgacgctgagcactaccaagacagattagccatcatatccaagaataaattgcctctggaataa

SEQ ID NO: 270721 - DNA, 249 bp, Klebsiella pneumoniae
atgaaaaaagcttttggcagaaaagagttgttgctggtggttccgttatcgatgagtactatcgaccgccttgagcacaaaaatcagttcccaaaacgcttctatattaccgacggacgctgcgcctgggatggagatgaggttgaacagtggcttgacgaacgtaaagccaatagcagtaaagaatttggttgcaaaaaaccgcctgttacaaagagaatatttcgcccagtaggtaagacaacgtga

SEQ ID NO: 270722 - DNA, 528 bp, Klebsiella pneumoniae
atgatcaagagagtcctgacggcgctcgccgccacgctgctgcccctcggcgctcacgccgcagacgctattaccggcgcggtacagcgccagccgaccaactggcaggcgattgtcatgttcctgattttcgtcgccctgacgctgtacatcacctactgggcctcaaaacgggtgcgttcgcgcagcgattactacaccgccggcggcaatattaccggcttccagaacgggctggcgattgccggcgactttatgtcagcggcgtcgttcctcggtatctccgcgctggtgtatacctccggctacgatgggctgatctactcgctgggctttctcgtcggctggccgattatcctgtttctaattgctgaacgtctgcgcaatcttggccgctacacttttgccgacgtcgcctcttaccgcctgaagcaggggccgatccgcaccctctccgcctgcggttcgctggtggtggtggccctgtatctgattgcccagatggtgggcgccggcaagctgatctag

SEQ ID NO: 270723 - DNA, 1095 bp, Klebsiella pneumoniae
gtgctggttggcgtgctgatggtgctctatgtcctgttcggcggcatgctggcgactacctgggtgcagattattaaagcggttctgctgctgtgcggcgccagttttatggcctttatggtcatgaagcacgtcggcttcagcttcaataacctgtttaccgaggcgatggcggtccacccgaaaggggcggcgattatgagtcccggcggactggtgaaagatccgatatcggcgctctctctgggtcttggtctgatgttcggtaccgctggcctgccgcatattctgatgcgcttctttaccgtgagcgacgccaaagaagcgcgtaaaagcgtcttctacgccaccggttttatgggctatttctatatcctgacctttatcatcggcttcggcgccatcatgctggtcggcgcgaacccggcgtttaaagacgcggccggacagcttatcggcggcaataacatggcggcggtgcacctggcggatgcggttggcggcaacctgttcctcgggtttatctctgcggtagccttcgccactatcctcgcggtggtggcgggcctgaccctcgccggcgcgtcagcggtgtcgcacgacctgtacgccaacgtcttccgcaagggcgcgaccgagcgtcaggagctgaaggtctccaagatcaccgtgctgatccttggggtggtggccattctgctgggtattctgtttgaaaatcagaatattgctttcatggtcggcctggccttctccatcgccgccagctgtaacttcccgattattctgctgtcgatgtactggtcgaagctgaccacccgcggcgcgatggtcggcggctggctgggcctgctgactgcggtcattctgatgatcctcggccccaccatttgggtgcagatcctcggccatgagaaagcgctgttcccgtatgaatatccggcgctgttctccattgccatcgcgttcattggcatctgggtcttctccgccaccgataactcaccggaagggatgcgcgagcgcgagcagttccgcgcccagtttatccgttcacaaaccgggatcggtatcgaacgcggccaggcgcattaa

SEQ ID NO: 270724 - DNA, 606 bp, Klebsiella pneumoniae
atgagcggactgaaaaaagatattcgtaaaattttcaatactgcatccggcggaaccatctgggcagaaacgaactttgttgtcctgaaccttaatatggtcaatctgaccatgaaaaaaacgctaccacttttaatggccaaatgggcctattcagcaaaaaaaatggataaggtaccgtccactctccatctcatcatagacgaagcacacaatatcctttcgaacacctcgttcagggaatcagaaagctggaaggattatcggctcgaaacgtttgaagagataattaaggagggcagaaaatttggcgtctttgtgacgatatccagtcagcgaccaaatgatatctccccgactatcatttctcaggcacataactatttcattcaccggttgataaatcagaacgatctgtatgctattgaaaaatccgtttcctacatagaccgcatgactgaagaatctattccaacgcttgcaaccggcacctgcatattcagtggcgtgatctgccctatgccacttaagcttcgtataaacgagctgtctttccgcaaaaagccgcacagccatacgctgaattttgaagacctaatgctttag

SEQ ID NO: 270725 - DNA, 972 bp, Klebsiella pneumoniae
atgcgtaaaacggaactgttggcttttttgcaaaatcagaccgattttttcgatccggataacctgagcgaggtctttaccgccagctggctggcccggcgtttcgcgatgcaaagaaataccgccagccattatctcaatcagctggtcgctcaggacgtgctggtgaaaatcaacacccggccggtctattttctgcataaaaaagccttttgccagcagttctacccgctttcccgcggtgagtatgccagcatggcggagttactcgcggagagcgaccgccagccggagcaggcggaccatttttcgttgctgaccgggcatgacggcagcctgcgtaaaccgattgagcagatgaaaaccgcgctgttttatcctaacggcgggctaccgctgctgattaccggcgacagcgggaccggcaaaagctatatggctgagctgatgcatgagttcgccatcgcccaggggctgctggcgcccgatgccccctttgtgagctttaactgcgcgcagtatgcgagtaatccggagctgctggccgccaacctgtttggctacgtcaaaggcgcgtttaccggtgcgcagagcgataaagcgggggcgtttgaggcggcaaacggcgggatgctgtttctcgatgaggtccatcgcctggatgctcagggacaggagaagctgttcacctggctggatcgtaaggagatctaccgggtgggggagaccgcgcaaggcttgccgatttcgctgcggttggtgtttgccaccaccgaagatattcacagcacttttctcaccaccttcctgcgccgaattccgatcctggttagcttgcccgatcttcaacaccgtagccgcgaggagaaggaggcgctaacgctacagtttttctggcaggaggcgcgcacgcttgccgcccggctgcaactaacgccgcgactgttgcaggtcctgacgcagtatgtttaa

SEQ ID NO: 270726 - DNA, 447 bp, Klebsiella pneumoniae
atgcctctgtatgatggcgcgatagataaattgagagaaaacctgacaaagctttccttgggagagcgggttagcattactccaattggagaactgactgacgctcagtttcagcaaataaatgactttagaaaggaacaaaacctccccgatttagagtcgaaggaggttatttatctcggacgtcatcactacaatagcagaacatctgatggatacactgttgatgatattattgaacagatcattagtgccatgtctgacagctcggaattattaagaactgtaaagggtactgttcttgaaaataaaacccaacgcgatgatggttatggtaatatggttaacgatagagccgtattagagcttacaagtagaaaacctagatctgaactatattcagtcattccccgaggggatgtaaataaaccaccaaaaagtaaataa

SEQ ID NO: 270727 - DNA, 189 bp, Klebsiella pneumoniae; identical to SEQ ID NO: 193371

SEQ ID NO: 270728 - DNA, 5706 bp, Klebsiella pneumoniae
atgtctgctctcgtcgcgtgtggtaccggctccgctgatttcaacctgtatctcggaaccgcaacaaggccaagcggcagcgtgggcgcgcctctgtcatccggcggcaaccgcaaggcgtcggccacatggcagcgagtaacctggcgattcaaaattactcaggggattgtcgatcgcggcttcttccgtccattcctgcaaattaaccagtccagcccattcggcaccgtatggttcgttacggactggcatatgcgaaatgtgacagcggcgcaaaaggttcaggatactgcggatgccacggcggcggcggttgactccctgaccaccaccgtgactcaacagggtaatctgctgacctcgaccggcaaccggacaacccagctggaaaacgggctggcaaccaccaatgccgcagtggccaaaaaggctgatgcgacagcggtgcagaatttgaccaataccgtcacacagctgggcaatgacctgacggctgcgaacagcgccatcacgaagctgaccggaaatctggcgaataccgataaagcgctggcgcagaaagccgatgcgactgcgctggctacgctcgacacgaaagtgacgcagcagggcaaaacgctggagagccagagcaattcgctgacgaacctgtcgaacagcctctcgcaggtcgcggcagatatcgatgccagcgggaagataccgggtaacctggtcgtgaatccctcgtttgagcgaggactggatggttatatcggacagtcagcggcagccagtgtggttgagacctccactccacatggtgggacacgagcgctgagggttggtgttggttatgtgtcaccgggacagtatgtaagctttgtacagggtcggacgtatgaaatcggggtatgggttaaggatctcggagcgaccactgataacggagcaggtaacaacaagctgcggatcagcaactccgctggtcagccggtgtttgagcgaccgtacaatagcgggacgatcggttccgactggacgctgatttccggtcgctggaaggccacggagacagccaagctcccggttacgctgagtaacggtttgacagccgggagtcgttgctttgatgatttctatgtcatcgatgtgacagatagtgtcaaaatcgacgccaacgcctccgcattgtcttctctccagaatactgtaacccagcagggtaaagatattgcgtcgcagtccaccagcattacggatctgaaaaacaatctggacacgaccaacgcgaacgtcgcgaaaaaagcggacgccgcagctctccagacactgcaaaatacggttacccagcagggcaaagacattgcttcagcctcaagcagcattacaagcctgcagaacaacctgagcaccaccaatgccaacgttgcaaagaaagctgacgcgacggcgctatctagtctgcagaataccgtgacccaacagggcaaggatatttcggcatctaacagcagcatcgctaaccttcaggcgtcaatcaatcgccgcaccgtgttcaccgtgacctccagaggcattggtccgagcgtgaaagatggcgtgttcgatgagtcaggaaataaactggttagccctggtcgtagctacacgatgattacctttaaggtaaattctgataactcgacctctatcgacaccagcaagacgtatgacgtttttggttctgccaataacggcaaaacgatgtctgacgacattgcggcgctggctaatggcacttatgtttgtgtgctgacctacgatgagccggccggaaaccgtgcgtctattttagccgcaatggagcttttgggtggcacagcggaggtcttgaactctctgccttatcgcggcgcctatatcctgcttggtcgcaagggtatgaaagctggtgacggtctggagttacgtgcgcctactggcggcgcggccgattcgtacatctcaacgtctgttgagtttgttaacggcatcatgtcaggtctgggcgctggtggtggtgtaatgatgaaggctgatgctaacgcctcggctatctctacgctgcaaaacaccgttactcagcagggtaaagacatcacctccgcgagcagccagattactgcattgcagaacaacctgaacacgacaaacagtaatgtcagtaaaaaggctgactcaactacgctgaacgctctccagaacaccgtgacttctcagggcgacgctctgacgagccagggtaatcgcgtaacgttgttagaaaatactttaacggtgggcgacaacattgttccaaactccgcaatgttgaataacgctcagggttggggtggtcatgcaacaactgttgacggttatccggctgtgatcgatacagcagcatgggcgccaacttcacctaagttttccgtaacacctggcgacattctagactttagtcttctttgtctggctggtgtcgcaatcaacggtctggcatggggtattcgcttcgatggcccgagcctgacgaacaactcggtctacgtggaggcgttaaattatgcagctggcgagaagaaagccgtaactggaaccatcactgtcccggctggcgcgacaactggctatctccaaccttatagcagaaacgccattacgctcacgatctataacattaaggtgacccgcagaaatgccggtactatcgcgaacgccaaggcgatcgctgatctcactaacgaagtgactcagcagggcaaggatataacgtcggcgtccagcgatatttctttactgaagaatagtctggcgacaactgatgcaaacgttgctaaaaaagcggactcttctgcgctgtcttcgttacagagtacggtgaatcagcagggcacttccataagctctatcggtaatcgcaccacatcgctggaaaacgggctgtcgacagctcagaacaacattgccaggaaggctgatgcttctgcattgcaggatctccggaacacggtgacatctcaggggggcgatttaactgcggcgaacagtagcattaccagcctgcaggcctcgatgaaccgtcgcactgtgtttactgtcactgcacggggacttggcaacagcgtaactcctggggtttttgatgaaagcggcaagaacctgtttagccctggtcgcagctgggcgctggtcacttttgcaaaacaaagcgacggatcagcggtgattgcgacctccaaaacatacgatgtctttggcagcgcgaataatggcgacacgatgtcggctgatatcggggcgttgactagtggcacttacgtttgcgtcctgacattcgatgagccatctggcaaccgaggtagattattgtctgctctggaatctcttggtggtacatccgaagtagtcaactctctgccatatcgcggcgcgtacattctccttggtcgcaaaggtatgaagcctggcgatggtctggaactgcgtgcgccaaccggtggagatgccaccgctcacatttcgacctcagtcgaatttgtgaacgggataatgatggggctgggtgcagccggcggtgtgatgatgaaggctgatgcgaacgcgtcggcaattaccacgctccagaacacagtgaagacccaggggggtaatattgactccctgagttcctcgataacggcgctggagaacagcctcaggtcgacaaacgatacggtgagtaaaaaggctgacacgactgcagtgagttcactgactggtcgcgtaagccaggtggaaaacactatcaccagccagtcgcagagtatcacgtcgctgaccagcagcatcaataccatcagtactcagggagctaatccgtgggttgacggtacgtttgaaagctacagcgatggtcatgtgctgggcgggggcggcaccgccgttgtggtggcgtctcagaaattcaccggcaatatgagcctgcaggtgagtcgaggagcgaacaacaacggcaacagcgataaacagcttgggagctggcagtcagtccgtgaggatgcgaagttccggtttgagttctgggctatgatgccggcggatcaggcgccatcctccgggtggacaacgctggtcggcattaactcactgaatgctgccggtcaaaactcctggcagtcggcggtcactgtcagcgaagccgctcttggtgggcgtgataagtgggtgaaatttacgggtattgccagtaacaacgggggtgggagaacacgcgcagtggtctggatctctacccgtggcgcctccggcagcggcacccccggttattcgctgtatatcgacgatctggttatcacggatgttaccgatgcgaaagcggcacaggatgcctctgacgcgacggcgagtgccgtgagcggtctgacggctcgcgtaacggatgccgaagggaaaatcaccgcccaggcgcagcagcagacggcactggccacgaaagtggataatgccaactcccgcgtcgataacatggcgaagacgctaagcgacagccagagcacacaggccagcctgaatacctcgcttcagtcgcagattgacgcgcaggcggccgccaacatcaaaaaccagacgacgctggacaatacgattaaatcggtggccagtatcaccagtacccagcagacgcatgcaacggcactggaggcgctggcaacgcagcagacgaccctgacatccagtgtcggggatctcagtgcttccgttcagaacaccgccaaaaccgtggcggatgtgaatggtacggtgagttcgctgtggtcgatgaaggttgagacggttaacgggaagaatgttggcgcggggattacgctgggcagcaatggtgaaacgagcgacatgatcctctacgctgaccgcttctcgctgtttaaccgtaataatgcgacggctgttccggtgatggttgccgaaggcaatgagctgtatatcgatacggcacgtatcaaaaacagttccctgacctcaaccaaaatcgcggacggttccatcacgaacgcgaagatcggccacgagatccgctcgaatgactttgttgacgggtcacgcggctggcgtatcgctaaggatggctcttcgcagttcaacaacgtgatcgttcgcggtgcggtttatgcgactgacggctggttccagggtacggtatatgcgaaccacatcgagggcgacatcgggtcatttgcgatcaacatcgctcagcaccgcacgcgcaaggtgccgaaggctacatggcagtggtttgagctggcccggttccggcggcagaatttcgaccaggtgatcaatattcgcggtggactcctccagacggatagcatcactatcgacggcggcgcgaaactcagagcggggatgtcctacgcgccaggggctgacggcggactgaatcctggctatctgtcgtatgcaatgcttcttcgtggcacaggcgctacgtctggtggcggcagtatggagctaggcattgagcttatgtatgaaacaggtggagcaacacgcctgttaacggcgcaagagtcaatgaacgtagacaacatgtcatttgtcgtccctgccggtactggcgacgctgttctgcgatatggctgttacctggaccgtaacggacagatggtattaaccatcctctcaagattcgacgccttcgccgcgcgcaataacaacgtaattcgcggttcatcaacctga

SEQ ID NO: 270729 - DNA, 633 bp, Klebsiella pneumoniae
atgtcactgaacagaacgcaaatcgtcgactggctgtaccgctgcggcgatattttcaccaaagagagcgattttctcaccggcctcgataaagagattggcgacgccgaccacggtctcaatatgcaccgcggtttcagtaaagtggtcgaaaagctgccgtcgattgccgataaagatattggctttatcctcaaaaacaccggcatgacgctgctctccaacgtcggcggcgccagcggcccgctgttcggcaccttcttcattcgcgccgcgcaggtgacccaggcccaccagagcctgacgctcgacgagctgtacctgatgatccgcgaaggtgcggacggtgtcgtcaaccgcggcaaagcggagccaggggataaaaccatgtgcgacgtctggctgccggtggtggactccctgcgccagtccagcgagcagcacctgtcgatcgccgccgcgctggatgccgcctgcgaagtggccgagcgtgcggcccacgccaccatcactatgcaggcgcgtaaaggccgcgccagctatctcggcgagcgcagcatcggacatcaggatcccggcgcgacctcggtgctgtttatggttcagatgctggccgccgccgccaaagagtaa

SEQ ID NO: 270730 - DNA, 4371 bp, Klebsiella pneumoniae
atgtctgctctcgtcgcgtgtggcaccggctccgctgatttcaacctgtatctcggaaccgcaacacggccaagcggcagcgtgggcgcgcctctgtcatctggcggcaacagcaaggcgtcggccacatggcagcgagtaacctggcgtttcaaaattaatcagggaattgtcgatcgcggtttcttccgtccattcctgcaaatcaaccagtccagcccgttcggcaccgtctggtatgtgaccgactggcatctgcggaacgtaaccgactcctccaaagttcaggattctctcgatgctacggcgaaagcggttgattcgctgacctctacggtaaatcagcagggggagaacatctccagcattggtacacgtactaccaatcttgagaataatttgagaacaacaaatgcaaacgttgctcaaaaagtggacgccaatgctctgacggcactgaccaaccgtgttacccagaccgaaaaagacattaactcaacgagttcttctgtcacgaatctgaacaacaagattgatgccatttctgttggcggtacaaacctgattaagaactctggcgatatgaccggctggtcgaacgttaccagcgacacgtatcgtggtaacgcggtaattggcgcaactgtaaaggccggctccggctacaaggatctgcgggaaatcacgcttgagtcgccggtcgatgcaggtgagtacgtttacagcttctatgcgaaaggtggtgttgccggccagacgatgacggcgttcttctacaatccgaacaccacaacgtctatcgagaccagccagggtgcgaaaggtaacaacagtgatggccgtgcgcagttcacgctgaccacttcatgggcccgatattgggttaagtggaaacagacacctaccacaagtaccaagcgcctgattctgtgtcgtatcgagagcaatacctccaaagaccagacggtgtacatcaacagtccgaaatttgaggtaggtaacgttgtttccgactggaacgagtctccgtctgatagtgccagtgcgtcggctgtggactcgctgacaacgaaagtgaatcagcagggcacttccattagctctatcgggaatcgcaccacatcgttggaaaacgggttatcgacagctcaaaacaacattgccaagaaggctgatgcttctgcattgcaggatctccggaacacggtgacatctcagggtgatgatttaactgcggcgaacagcagcattaccagcctgcaggcctcgatgaaccgtcgcactgtgtttactgtcactgcacggggtaatggcaacagcgttacccatggggtgtttgatgaaagcggcaagaacctgtttacccctggtcgcagctgggcgctggtcacttttgcaaaacacagcgacggatcaacggtgattgcgacctccaaaacatacgatgtctttggcagcgcgaataatggcgccacgatgtcggccgatatcgaggcgttggccagtgggacttacgtttgtgtcctgacattcgatgagccaactggcaaccgaggtaaggtattgtctgccctggaatctcttggtggtacatccgaaatcgtcaactctctgccgtatcgtggtgcctatattcttcttggccgcaaaggcatgaagccgggcgatggtctggaacttcgtgcgcctaccggtggcgacggcaccgcccacatttcgacctcagtcgagtttgtgaacggggtaatgatggggctgggcgccgctggcggtgtgatgatgaaggctgatgcgaacgcatctgcaattaccacgctccagaacacagtgaagacccaaggggataatattgactccctgagctcctcgactacagcactggaaaacagccttgcgtccagtaacgccagcgtggatgcagcaagccagatccccggcaacctgatcgtaaacccgtcttttgagcgtggtacggagggctacactggttggagcggtattgccacggtggcaacactgcaggttccacatcttggcaccaaagccgccaaactagcggcgggtggttctgcaggcgtgggccagaagatctccttcaagaaggatcggtcgtacaaaattggtatttgggcaaagcaggaccctaataccaccattcagtcgaccgacaacacaaaattccgtgtggctgacggtactggcctgattgcaagtaaggcttatggtccgttcacctcgaactggcaggaggtgtcatggacatggaaggcgacaaaggatgtccttgctgacgttcagttcactgctttcttgtcagccggcgcgatgtactttgatgatttttacgtcgttgatgtgaccgactcagttgaaactcaggcgaactcgagcgcgatcactaagctcgatagtcgtgtgaccaagacagagaatgacatcaccagccagggcagccaggttacgcaacttaagaatgaccttgctaccacaaacacaaatgtttcgaagaaagcggatgcagctgcgttaacggcattaacgaaccgcgtcacgcagaacgagaaagaaattgaaacccagagcagccagacaacttcgctcaaaaactctttgagcactgttcaggcgatggggagcaacccgtggtttgatggttctctggagacgtactccgaaaaccagcagatcagcggctcgcgtgcggtcgtcgtcagctctcagaaacgaagcggaacgaagtcattgcgtgtttcccgcggcgccggtgagggcggaaacagcgataaaactatcggtaagtggattgctctgcgtgaaaatgcggtattccgcattgaactctgggcgatgatgccggcagatcagtcgccatcctctgggtggtcaacgatcgttggtttgcagacccaaaacgctgccaacaacaataactggccgacggcaatcactatcaacgaagcagcattgggggcaagaggcgcatggaagaaatttaccggtacgctccgtgtagccgctggccacactcgcggcgcattttgggtatctacccgcggcacaactggcggaggtacaccggggtatgatctgtatatcgatgatgtagttgtcactgatatcacggacgcaaaagacgctcaggattcggctaatgcgaacgcatccgcgctcaccagccttacctcacgtgttaccaatgtagaagggcaggtgacatcccaggcgtctcagctttcctctttgacgtcccaggtgaatgatgcgtcttcgaaggttgatcagatggcacagaccattaccaacaacgagaaaacgcagtcgtcgctaaataccagtttgcagtcgcaaattgatgcgcaggcatcggcaaacatcaagaaccagacggagttgaataacgccaccacttcgctggcggcaattaaatcaactcagcagacccaggccacaacgataagcgcactgtctcagcagcagacgaatttgactgcccaggtaggcgatcagacggctgagctgcaagagctgaagaaaacggttgttgaaaacggcaacgttaacagcacctggatggtcaaaatggaaaccaacagcaacggtaaaaagtatgctgctggtatcgctttaggtatcgatggcaaaaatttgcaaagccagtttctggttcaggctgatcgcttcggcttaatcaatacctctaacgggaacacgaccacaccatttgttgtggaaaatggcgttgcctacatgaatgccgctgtcattaaagatggctcgatcaccaatgcgaaaattggcggtgagattaggtctgacgacttcgtagacggatctcagggctggcgtgttggtaaggacggcagctcgcagttcaacaacgtagttattcgtggtgaagttcacgctaataccggtgtactgaacaacgtgactattaatgaaaactgcactgtgcttggtactgttcaagccaataaaattgttggtgacgttgtgacaatgaccgaccgtgtagttaagaactggccgcctaccgccgacacatcatcaggcactcgttatcctattgcttcagtgcagggtatgccattcgaacgccgtatggtgtttaacggttcaattagcattcaacagacttggcgtcaaaacgtaacaatccgcgttgatgaaacagtcgtatggacgtttgaatctggaaatgaaggtaaggattttgaaacatcaattttctctattcgtatacctgcatcgaattacggtcaaacgcagaatattacgatccagtggccaaaccgcggagacagcggacagttccgatttacaggggtgatctcgatgtacagaactacgggctccatctctctggcttaa

SEQ ID NO: 270731 - DNA, 897 bp, Klebsiella pneumoniae
atgaaactcccgccgctgaatgcgttgcgctgctttgaggcggcggcgcggctgctcagcctgaagctggccgccagtgagctttgcgtcacgcccagcgccgtcagccagcagattgcccgccttgaggagacgctgaatgtcccgctatttatccgtactccgcgacggttacagttaacggcggtgggagagatctacctgcgggccattcagccggcgtttcatcagatagccgccgccacccagcgtctgcaggtgcctccgggaccagaaaaggtagctatcagctgtaccagcggcttcgccattcagtggctgctgccgcggctggctgattttgaacaacgctatccgcagatagagatccagatcggcaccaccaaccggcgagtggatttgctgagtgaagggatcgattttgccgtgcgtcatggtgtcggcggctggccggaactgcaggcttaccgcctgctggatgacgatctgatgccggtctgtagcccgcaactgattgctccgcgccggacgctcaccgatgcgagcgatctactgcagtatccgctgctgcacgatgaacatcgtgaagactgggcgctgtggtgtgaggccgtggggctggcgccgcacttcgcgcggcgtgggccggtgttcactgattccaacggcgtgacggaggcggcgttcgccggtatggggatggcgttgctgcgacgctcattcatagcgcctgcgctgacgaaggggcggctggttaatcctctggcgcagcccatcgcctgtccgctggcctatcatctggtttaccacgagaccgcgctgctggcgcctgccaaccgctgttttcgcgactggctgcttggccagcgcccggccgttgctgaggagcgcgcgtag

SEQ ID NO: 270732 - DNA, 1299 bp, Klebsiella pneumoniae
atgcgtttcacggaagcctgcttactgaaaacggagaacaacatgacgacactcagcgaaccgttggttaccccgaaatatggcaaatggcgccagctggtgctgggcctgatctgtatggccgccatctccagtccgcaatatgtctggacgctgttgacaaaacccctgtccgccaaacttggcgtcggtctgccagaattgcaggtcaccttctcgctactgatcatcctgcagaccttcttttccccttttcaggggcggttagtggaaaaatttggcccacggcggctgatcgctattggcacggtgatggcgggaatgagctgggtactttccgcgcaggtgaatggcctggcaacgctctggctggtttatggctgcatgggcggcctcgggaccgggatcgtctacatcggcgttgtcggcctgatggtcaaatggttcccacagcagcggggatttgccgccggcgcggtggcggcgggctacgggatgggggccatcataaccaccttccccatctccctgtcgctgaccactaacggccttgaacacacgatgacgactttcgggatccttttcgccctcgtcggcttcctcgccagtcaggggctgaagctgccgccgcccgctctctcccagcccgtcagtcagacggtggtgcagagcagcagatcgtttacttcccgggaaatgctgcgccagccgctgttctggctgatgttcgccatgatggcgatgatgtcgacttccgggctgatggtcacttcgcagatggcggtgttcgccgaggatttcggcattagccaggcggtggtgtttggcatggcggcgctgccgctggcgttaacgatagaccgctttaccaacggcttaacccgaccgctgtttgggtttatttccgaccgcttcggccgcgagcaaaccatgtttatcgcctttgcgctggagggggtagcgatgatgctctggctggcgtgccgggaagatccgctgctgtttgtcctgctctccggggtggtgttctttggctggggggagatcttctcgctcttcccgtcgacgctcaccgatacgttcggcagcgagcatgccgccagcaactatggctggctgtatatttcgcagggcatcgggtcaatctttggcggtccgctggcggcactgctctatcagcacactcacggctggcatgtggtcttcagctgcgcgattggccttgattttgtcaccgccgccctcgcgctgtgggtgctaaaaccgtggcgcgcgcgctttatccgccagcatagctaa

SEQ ID NO: 270733 - DNA, 1002 bp, Klebsiella pneumoniae
atgggcatccacggcgaaccgggagcctcgacgatcgcgacccataacagcgcggaaatcatgcagattatggtagagaagctgaccgccgccctacctgaaaccggccgcctggcggtgatgctcaataatctcggcggcgtgtcggtggccgagatggcgattctgacccgcgagctggccaacaccccactccatgcgcgcgttgactggttgattggcccggcttcgctggtaacggcgctggatatgaaaggcttctcgctgaccactatcgtgctggaagagagcattgaaaaggcgctgctgtcggatgtcgaaaccgccagttggcagaagccggtgcagccgcgggctgttaatatcatgccgtccgcgctcgccagcgcacgcgtcgcctttacgccatcggccaacccgcaggtgggcgattacgtggcgcaggtgaccagcaccctctccggcctcgaaacccatctcaacgcgcttgacgccaaagtgggcgacggcgataccggctccactttcgccgctggcgcgcgtgcgattgccgctctattgcaacgccagcaactgccgctcaatgatttacccacgctgttcgcgctaattggcgaacgcctgacggtggtgatgggcggctccagcggcgtattgatgtcgattttcttcaccgccgccgggcagaagctggagcaaggcgccagcatggcggaagcgctgaacgccggtctggggcagatgaaattttacggcggcgccgatgagggcgaccggacgatgattgacgctctacagccggcgctggcggcgctgctggccgaaccggataatctgcaggccgctttcgccgcggcgcaggccggcgcggatcgcacctgccagtcgagcaaagccggcgccggacgcgcctcctatctcaatagcgagagcctgctcggcaatatggaccccggcgcccacgcggtggcgatggtgtttaaggcgctggcggaacgctaa

SEQ ID NO: 270734 - DNA, 318 bp, Klebsiella pneumoniae; identical to SEQ ID NO: 197345

SEQ ID NO: 270735 - DNA, 816 bp, Klebsiella pneumoniae
gtgcaacaacatccggcgccgatcctgctgtatacgctcggcattaccccccgccttgaagtcgatggccaccgggttgacgcggtgaacctgctggtaggcatcgctgccgccattgcgcacggatatcacgagcaccaacaaatcaggccgttctttggcaatctccgaaaggatctggataaagttgaacgcccagttcttccacggatactgcttggtattggtcaggccgtcgaaccaggtctggaattcatccagcagcagcatcgttggcgtgtgctccaggagctcgatgatgagcttatcggaggggatgtctgtcttggctgcgcccatgccttcccatttgcccttgatgaactcgccgcgaggatgacgttcgaacagcaaatcccacaggaatttgtagcgctggcggtgcaagctctcaccaatgaccagcattccatcgcgcaaagcgatcttgctgatgctggtgtcacccagcgtggctgcccaagaattaagccatgcgccagtcgatgcggcatcattgacagcgtggtacagcgcagccatcaagtgcgatttacccaacccacgttcgccgattacaactaccgggcgcccctgattggggccgactgcttcgatacccttcaaaaggtcatgggtcggatacgtgatctccaggaactgctgcgcggcaatctgtgttgcaccggtgttggagtcgttggagagctcaatggctgtccctttgaggcgcttgccccgaaattcatcccgcagagtcagtccaagcattacttccgttcctcatcattcaattga

SEQ ID NO: 270736 - DNA, 2007 bp, Klebsiella pneumoniae
atgtatcatctcgacaacaccagcggcgtcccggagatgccggagccgaaagatactcagtctatttcgccacgctggttcggagaaagccaggagcaaggcggtatcagttggcccggtgcagactggttcaatattattcaggccgaactgctggcgatacttgagctggcaggcacccagccagataaaacccgatatgaccagatcgcacaatcaatcagggatttatctgactcattacggaaagatattgtaaaggctgacggtctgaaatttgtggggcaatgcccgaatatggccgatctgagaacaattgaatttacctcgactggtcaacaggtttttcttcaggaacacacgaccggtcaggggatggggggaggtacctggtattgtcattctctggataatgacaatgactatgttgacgataacgggtgccagattattaacgctcacggccaggtaataaggcgtaaagacctcaggattttatgctcggacatgtttgggctgatgagtggcggtgatttgattgaatgcctgagaaatatgtataaagcgtcccgaaccttctgtattgaagaggttttgatcgccaaattaccctatgggcaatactatgtcgctgatacaggctctgatggcggaaatacctttgccgccgatgtgtccgatgggatgaattttcatatcaaggggttaggtgttggacacaatggaccgcgcattcaccatcggggtgatggtgtcatgttacgaattaaacgtaaccacaagacctctttagatttttgggttacatgtggatttgaatgccttcggatcacagggagaaatgacactcttgacgggaataacacctattcaggagccatcccattacaggtctcagatatgtggggatctttatttaaggacctgataattagtggttatgataataatgcaaacggtgccgccatatcgttatataacgacacggcatggaccgaaaaagcgcgctttaacaacgtgatgatccgaagctcagttgtttgccttaaacttcatcggaatacagcctcagacagtgaagcaacggactcattttttgcgttatcgggtgatattgatattaatgctggcgttcctgcgccctgtaccttcctgcgtattggtgatggaacatcccaggggaaatgtatcttgtatggccataatcttgcgattagaggatggatgagccgctcgtcatggcatacgggtgttgatgtaacagattacagtacgtgcgtcgctggtacgtttaaattcatctgggatggctacggaatttcaacggatgctgcgacagaagtgcttcatatcatacgcgctcgcggtttaaacgcccgctttgattgtgaggtcgaaaatttgtctggtcaggggatggctgcaaatctgagccttcttcagttaatctggaatacctgcatgtacacccaggaagtaaccgcggttgatgcatcattaaacgcggcttatcctgtcattcgccctaaaggtatgagaattaatttttctggttcattcactgcggctgaacaaatttccgggaaggtatacacgttaagctctctgctacctggtcaacgtcttcgtgttcgactgcacagctggagtctcgaccgttaccagcctcaggtatcggagtgggaagtcactgttagaggaactgataacccttgcattattacgccgctatcgggtcgttccgcttccatttccacaaaatcggcaaatgccttaactgatacatctggtgcttcctccagttttctgcaggaagcgagcattactgataaccctttcctgcaaaatgcgacttttggttcatcaaccctgctcctgtcaaatggacagactaacaatagcgtctcctatgctgtgaattcaggtcgtagagtacaggtcgttcttcctccaaattctctggccattgctgatatgccctataaagttgaaattgaggtggtttaa

SEQ ID NO: 270737 - DNA, 228 bp, Klebsiella pneumoniae
atgagtgaaaaaataatcaaaaaatccgagttttctccggttttcgctataaagattaaatctattacggctgtagatggaggttttgccaccataacgccggaagacggtcaggaagtggctgatttaatttcggttaccgaagagtttgtggagaaacacaaccctcagtcgggagggtactacatcatgtgcgaagacgggatgggattgtactccagcgaatga

SEQ ID NO: 270738 - DNA, 471 bp, Klebsiella pneumoniae
atgacaaaactcaccttacaagagcagatgctcaaagccggcctggtcagcagcaaaaaaatggctaaagtccagaggacggcgaaaaaatcccgcgttcaggcccgtgaggcccgggaagcggtggaagaaaataaaaaagcccaggtgaagcagctgatcgagatgaaccgcattacggtcgcccggggcgatatcggctttaactttaccgataataatctgatcaaaaaaatcatggtcgacaagcccacccagacccagctgattaacggccgtctggcgattgcccgcctggcggtggataacaagcccgaaggtgaatatgcgattattccggcggtagtggctgagaaaattgcccagcgcgacgccagcagcatcgtgttgcacagcgccctgagtcaggatgagcaggatgaagacgatccgtacgccgactttaaggtgcccgacgatctgatgtggtaa

SEQ ID NO: 270739 - DNA, 294 bp, Klebsiella pneumoniae
atgaaaatatcggagaagctacgggagatccgaaaagctgaaggattaacacagaaaaagttttgtgaaattagcgggatagccctcagttcactgaagaactacgaaggtgggcacaaagatccggggattcaaatcgtaacgcaggtggtaaacaccccactgtttcagaagtacacactgtggctgatgactaacaaaaccgccccgcaggctggtcagattgcaccggccctcgcacacattgggccagagtctccggaatcagaccaatccgagaaacagactggttaa

SEQ ID NO: 270740 - DNA, 396 bp, Klebsiella pneumoniae
atgaaaagagaatacgcagacaaaattaactcactgctgcaatgcttccatttcaataaagagtttctggaatggaaccacgattattccattcagcttttacgccacggtgtttcccatctctatcatttcgccatgctccagggcgagaacgatgaaaccacgctggaagagctgcgcaatatcattatctcgattaccaatggtgatatcccgaaaccatacgacctgtcgtctatggacgccgagcaaccggaaccgaagggcaagaccttgatgtttgttcagcccacagccgtatctatcgaagcaacaccagaaatgctctatcagctcaagcaagcgctggcaaacgcttcagcagaagtaaaagctccatccctctacagccgatag

SEQ ID NO: 270741 - DNA, 723 bp, Klebsiella pneumoniae
atgagttatctggggagcaaggcagctagcggcgtttatcaaaaaatcatagccgagatgccgccacatgatgtctacattgaaacgcacctgggcggtggtgcggtcatgctgcgcaaacctccggcaaaagtgaattgggggatcgatatcgacccgcaaactattgaagcatttaaccaaggtaatccggaatttctggatactctcggcgatagtttgtttatcgacgtgggggatgcggttgattttctggaggccaggctgcggcggcgtgctgccgatggaaagacggaactggaaagaatggggcgagtgcttatctacgccgatccgccttatctccctgagacccgcagcagctatgcgcgttatcggtatgaatattctgttgaagaccacaaaagattgctgatgcgtttgcgtgatctccccgataacgtccgcgtgattttatcgggctacccgtccgagttgtacgatcgcatgctccctggctggcgtgccagcgagttccaggccatgacgcgaggtggtgtgcgaacggagaaaatctggatgaactacccggagggggccgcgtactcgcatacattcgccggtaaagactataacgatcgctatcgtattaagcgaaaagcgcagcgctggaaggagaaatttgcagcattaccgccagcagaacgcctggcgatcatggtggcgctcggcgaggtcgattag

SEQ ID NO: 270742 - DNA, 597 bp, Klebsiella pneumoniae
atgagtaacaccctccttccaccatcatctccggcctggcttcgccatactgaggcgggcacggccagactgtcagcgatcgctgtcgctttacggacgttgtggacgccggcagattgcccggtggatttactgccctacctggcctgggcgctgtcggtagaccgctgggacaagaactggccggcagacagaaaaattgctgccatccagcgatcgtactggttgcatcgacgtaagggtacccgcgcagcggtgcggcgcgtgattgaagatatggggttttctgcgacctttgccgagtggtttgaggcaggtgacgagccgggaacattccggcttgaggtgaatgttaatgaggtgggcttaacgagtcgcactcttgatgagctgaatcgcctcattaacgacgcaaaacccgtcagccgccatatttcgcagatgaccattgctacacatgtgacggggtttatctacgcaggatctgcattgtatggcggcgacataatcagtatttacccggaagaatacgagccggatgacagtcttttttataacggtgtcatttttcatgatggaaataacagctacaggtga

SEQ ID NO: 270743 - DNA, 2124 bp, Klebsiella pneumoniae
atggccgatattaacgaatctccattatgggaagacggcattgaactgattggcaggactgagcgcgtatcgggcggtcaggatggcgtggctaaccgcccgttaaagaaactggcaaaccgcacgcgttatctgaaagagcgatttgatgaaaccgatgccgatatttcatcaaaggtggaagcggttaaaacctttgaggagggggcgacgcttgattctccccgcgatgaaattctttacgggaattatcgacttgtctggacagggtggtttcctaaagacgttccgtcggcctcgacgcccttcaataccggcggtatcggtgccggtgcctgggcatatacttctgatgcggcaatccgtgacaacctcaatgccgttgacggtcttgcgatggtggggcaatgcccggatattaaccggctgagaatgattaaatttgatgcggtcgggaaacagatttttcttaaagaacatactgccgggcagggtatgggcggcggtacctggtactgtcattccctgaccaatgataataattatgtggatgatgacgggtgtcagattattaataatcacgggcaggtgttgcgacgcaaagatttacggcttatctgttccgatatgttcggtctgatgcatggtggcgattatattgaatgcctgagaaatatgtttcgcgcatcccgcacattttgtattgaggatgtgctggttgcaaaattacccgccggaaaatattacattgctgacaccctctctgacggcagtaacggatttgtggctgatgtctcggatggaatgaattttaccgttagggggctgggtgtcggacataacgggccgatgatttatcataaagggaatggtgttctgatgcgtattaagcgcaatcatgccagctcaaaggatttttgggtggcgtgcggatttgaatgccttcgggtaaacggaagaaatgacactcttaccggaagtaacatttataccggagcagtagcattccaggcatcagatatgtgggggtctttatttaaagatttatttatcggtggttacgataataatacaaatggtagcgccatttcgctttataacgatactgcctggactgaaaaagccaggtttgacaacgttatgatacgcggctctgtcgtggggttacgtctgcatcgtaatacctctgaaggggcggcggcgacagactcgttttttgcagtgacaggcgaaattgatatgaatgccggggtgccgaatccctgttcctatattcgcattggcgacggcaccgagaaaggccggtgctcaatgtacagcgccgtgctgaccatcaggggatggatgagccggtcttcctggcataccggcgttgatatcatggattacggggttgtcaccggtaagatgacctttatctgggacgggtacggaatggcgtcaggggccactaccgaagttttacatatcatccgtgcccgggggccgaatgcacgatttgactgcgaagtcacgaacctctcaggccagctgttgcaggcaaaaatccacctcctgcaactggtctggaactcctgcatttacacgcaggagaccaccgctaacgatgcctctctgaaaagagcctatccagttatccgcgccaaagggatgcggttaaatttcgaaggttcatttaccgcagcagagcgtatctcaggtaaaacgtataccctgagctctttactgccgggccagcgcctgcgggtgcggctgcacagctttaacgtcgataagtatcagccccaaatctctgagtgggatgttgaggtaagagggacggatttcccctgtattgttaagcccctttcagagcaacccgcctcgctgacaacggaatcaggtaatgcgctgacggaaaccaccggcaaaacgggcagttttctgacaaaagcctcactggccgataatccgtttttacagcacgcgaccatcggtagtaccacgctcaccctgtcgaatggtcaggttaataacagtgtgtcttatgcggtcaattctggtcgcaggatccagattgtcctgccccccaatccggcagccacggaagacatgccctacgttgtagaaattgaggtgttgtga

SEQ ID NO: 270744 - DNA, 225 bp, Klebsiella pneumoniae
atgagtgagaaagtaataaacgacaatgtgctgattcctgcgtatgtcatcagaattaaatcaattacggctgatgacggcggtttttccattatcactcctgatgatgatcaggaaatcaccgacccgattacggtgacggcggcattcgttgaaaaatacagcccgcagcccggcggatattacatcatgtgcgtcaatggcgtgggactgtatgccgattaa

SEQ ID NO: 270745 - DNA, 1167 bp, Klebsiella pneumoniae
gtggccggtaaaaagttttactcaatgattaccaccgccgggctggaacggctggcaggcgctgccgtctcaggtgagccggtcggttttgcactgatggccgtaggggacggtaacggacaactccccgtgccttaccgggagcaatccggtcttgtcagcgaggtgtatcgctcggcgcttaacgggctgaaaattaccgatgcagccgcgaatgtgatagaggcggaaatgctgattcccccgcaggtcggcggatttaccatgcgtgaggcggcattgtacgacgaagacggtgtttgtctcgccgtggcaaatatgccggaaacctataaaccgttgcttgctgagggttccgggcgattcagcgttatccgtattcagcttgctgtcgccagtacggcagatgttcagttactgaatgaccccggcgtcatcgtggcgaccgttgaagatgtgattaaggtcggcagtgagacccgtgattacaccgacaatcagttgagtgagcacgcgaagtcacgaaatcacccggatgccacgctggaagaaaaaggatttacccggctgagtaatgccattaacagtgacagcgaaaaactggcagctacgccaaaagccatcaaagcggctatcgcttcggcggtgcgcagtgcctgggagctggataacccggtcggcaccacccgattttttaatcagaacctgaaccccaatgagcgctggccctggtcgcaatgggtgtacaccggcgaaaataaatcaattcgcgtcggcaaggctgacggttccaacgtcgggcagaccggcggcagagataccgtcacgctccagaaggccaacctgcccgccgttcagattgacgttaccggggaaaccagtgagcaggaagaaaagacgctgacaacaacggaaaacggagcgcataaccatcagggcggtgacggtgcaccgggtgaacagtggcgggaagggacacacggcacggataaccagaaggatgctaattttaacctgaccagtgatgcgccagcgcactcgcatgacgttactatcccaccgcataagcactcgacaaccggcaaaactgacaacctcggcgagggtaaatcgttcagcgtggttgaagcgcacactctgctgatgtgctgggcgcgggtggcgtga

SEQ ID NO: 270746 - DNA, 396 bp, Klebsiella pneumoniae
atgaagtattggatcacggttcgtttcaatagctttagccagccagattgctttctcttcgtttgtagcagcagccgtagcctgttcaagggcttcctcatactgaaccctgatagaacggtgatcaatgcgttcatcatgaccatacagctcaaggaactcattacagatgttctgccagcctttacgccagcgatcgagggtttcaggtttatcccactcacggacttttttaccaaagccggtagaaagaatctcacgggttgttcccatgatatgaatatgcgggttatgaccattgatatcgtggataacaacatcagcaatgatgccttgcttggtaaagtgctcaagaacaaaagcagcagtgagttcaatgctctgttctggtgttag

SEQ ID NO: 270747 - DNA, 558 bp, Klebsiella pneumoniae
atgtcaaattactgttactatgcagatgatgcccttgagctagtcgaaaaatctgaattaaagaaaattatagatgaatatgctgagcataatacaaagcaaacatttgtccttcgcagaccactgtctaaagatgattcacattatgactataacaatgcaatcgtcatcttctctgctggcatcaaaccttgcttcataaatctagatgacgatgaagaaaactttgaagaatatatcgacgaatttttggaagatgtagcctatttatctgaaaaatttaaatatcgagaaaaaataggtagaaagaagaaatggcaagatcttttcatatctgtgaatgaaaatgatttttctttcgatgatttaacccttgatacaaaagagtctcggattgttgatttaatcatatcacttattgttggtagcattaatgatatgtctcgcattgatctaaatgcaaataacatccttgactcagttaagtcaaaaataatacttttcgatacagatcaaactagttttgtatttaaatccggcataggaaaaaattcgtaa

SEQ ID NO: 270748 - DNA, 507 bp, Klebsiella pneumoniae
gtggttgtaaaatttccccgaaagtgctggaaactatcctgcatagcgagcaggcgaagtttgtcgacccaaacctgcttgtcggcaacgaaaccagcgatgatgccgccgtttacgatctcggtaatggcacctcgatcgtcagcaccaccgatttctttatgccgattgtcgataacccgttcgactttggccgcatcgccgccaccaacgccatcagcgatattttcgctatgggcgggaaaccgattatggcgattgccatcctcggctggccgatcaacaccctggcgccggaaatcgctcgcgaagtggtggagggcgggcgctttgcctgccagcaggcggggatcgcgctggcgggcggccactccattgacgccccggagccgatcttcggtctggcggtcaccggcgtggtgcccaccgagcgcatcaagaaaaacagcaccgcccaggcgggctgcaaactgtatctcaccaaaccgctggggatcggcgtactga

SEQ ID NO: 270749 - DNA, 1386 bp, Klebsiella pneumoniae
atgagttatttactggctgacggctggattatcaccatgaatgcgcagcgcgacatcctggagcaggcgagtctggtgatcgagggcaaccgcatcagcgctatcggtacacgcgaagccttacagcagcgctatcctgaagcggaaatcattaactgtcgcgaacgcattatcatgccaggcatggttaacacccatacgcatctgtttcagacgctgctgaaagggctcggcgatgacatggtgctgaagaaatggtttacctgcatgactggcccgagcgcggtcgcgctgacggaagaggatgtctacgcagcggcgctgcacggctgcgtggagtcattgcgttccggcgtcacttcgctggtggattttatgtatgcgcatccgcgtcctggattgaccgcaaaggttatcgaggcctttgaggtcagcggcattcgcggtcacgtttgtcgcggttttcttaccagcggcgccgagcatggtattccagcggaattgattgagacgccggaacaggcgctggcggacgcgcgcaacattattcagcgtttccataaggccgatggacgcgtcaaagtcggcctcgcgccgagcatgatttgggcgctggatgaaaaagtgctgcgcggtacgcgcgagctggcgaatgaaaccggagtcctcattaccacgcacgttgcagagactgattttgagatcgaacagtccaggctgcgttttcaggcaaccgataccgaatttctcagcgatatcggttttcttgggcgtgatgtgctggcggtgcattgcgtgcagtgtagctcgcgcgacatccgtgcattgaagcatcacgatacgcgcgtttcccataatccgtgtagcaatctctatcttgcatcgggggtaccaccaatccccgagatgctggcatcagggttgaccgtgggcctgggctcagacggtccggccagcagtaataatcacagcctgtttcaggcgatgaaagttgcagcacttatgcaaaaaggggtacatcgcgatccaaccatcatgactgcagaaaaggtgctggagatggcaaccattgacggtgcgcgcgccattggcctcgatcatctggtggggtcgctggaagtgggtaagcgcgccgacgtcgtcattgtcgatacctcacacccggcgatgacgccgattcatcatccggtgtcgtcgctggtttattctgcgctggggcatgaagtgagtgacgtatttgtcgacggcgtctgtttgttgcgcgctggcgaattcacgcagatcaatcagcaggcggtgatggctcaatcacagcgcgtagcccattcgctggcggtgcggactggcaatcataaagtgcggcagtggcgttcatctaccttctga

SEQ ID NO: 270750 - DNA, 774 bp, Klebsiella pneumoniae
atgccagccatgaagttaggcagtagtcgatataatcagtggcgggttacgcccgaggtgatagatacgcgccgcgttagtccccaaacacaggcagtgcagctgagcacgcgcgaccgttcagtgatttttgaccttcagcgcaccgcgatcatcgtggtggatatgcagaatgatttttgccatcccgatggttggctcggtcatatcggcgtggatgtcactcccgcgcgcgtgccgattgcgccgctgcagaatttgctgcccgtattgcgcgccgcagaggtgccggtgatttggctcaactggggtaatcgaccggataagctcaatctcagcccggcgctgctccacgtttataacccacacggggatggcgtgggtttaggcgatcccctgccggtttccggcgcgccggtgttgcaggccggcagttgggcggcagaggtggtggctgaactcacgccagatacccgcgatatccgcgtcaataaataccgtatgtcgggatttcaggacagcgagctcgacagcatcctgcgcaacctcaacgtcacgacgctgctgtttgcaggtgttaatgtcgatcagtgcgtgctttgcaccttgcaggatgccagtttccgcggctacgactgcctgcttctggaagattgcagcgccaccacttcgcccgattattgtcgcgacgccacgctgtataacgtgcagcagtgctttggattcgtggtgaaggcggaacagttacagcagcagctggagaacgagcaatga

SEQ ID NO: 270751 - DNA, 423 bp, Klebsiella pneumoniae
atgaaatcgtttcgcttcaacaaccttgcacacgttcaggccttccgtatcagcccggacagcactaactatttcgccattctgttcgacaagccgcttgatggtattgagaacattttcgtggtggagatctttaacgtcggcggtgcgacgccaccgaatgagcacgccaccgcgcacgagttcttctatgtgcttcatggtgaaggtgttgcacgttgtaacgatgatgaactgaagattaaaaaaggcgattcgcttctgctgcatccgggtaacgatcatgccatccgcaataccggcagcgataagctctatacgctgacggtgatgacgccgaatgaagggttctctgagctgatccgcagcggtgaacctgttgagctcgatgaagaagacttacgcgtgttaacaggggcctga

SEQ ID NO: 270752 - DNA, 939 bp, Klebsiella pneumoniae
atgaacgtatggctgaatcttgataccgctttttttgtcagctggctggcggcggcggtgcgcctcgccggtccggttttgctggccgcattaggggaaatttacgccgaacgcgctggcgtgttaaacatcggcattgaaggcaccattctgctcggcgcgctctgcagctacatggtgtccgtagagagtggatcaactgcgctgggctttatcgctggcggcgtcggcggcttgctggtcggttgcgtgctggcggcactctacttgcgtgcgcacgccagccagatcgtggtgggtatcgtcttcaatatccttgctgccggtttagccagctggatttacgcgctggtgatggggaatacctcttcgcccaccattccgatgctggagccgtggcatgtgccgctgttgtcatcgcttcccttattcggtccgattctgtttcagcaaccgctaccgctctatctcacgctgctgctggcggtggtggcccatttcggcctgtttcacacccgctttggtctgtcgctgcgcgccgtgggcgaaaatccgcgcgccgcgcatgcggccggactcaacgtgctaaagattcgcacctggggcgtgctgttttcctgcgtcggtgccggtctggcgggcagctatctggtaacggcgcagatcggcctgtttcgcgacaacatcgtgagcggtcagggttttattgcgctggcaatcgtcattttcggccgctggagcccgcttaaagcgctggttgccgctttcatctttggcgcagcagacgccctgcaactgtcgctgcagctgtttgaaaataccctgccgccgcaggtgctgctcgccctgccctatctgctcactattctggcgatgtccggagtgacaggacgcacattgcaacccggcgcgttaacgcagccttatcgaaaggaataa

SEQ ID NO: 270753 - DNA, 1116 bp, Klebsiella pneumoniae
atgaagaggctgcttgaacgccgtcttaagccggtagagtccaccactgcgctggtgttgaccagcgtttgcggcatcgccgccgcatttatgattgccggtttactgtttatcccgtttggcggcaatccgctatcggcctacggttttctgtttgatgccgcttttggctcgctgcgcagcgtcggcctgagtctggttcaggcgacgccgctgatgctgattgcgctggcaaccatcgtggtgtggcgcgccgggctcggttacatcggctttgaaggctgttttttgctgggtgccgccgcggccagctggatcgccctcgccggcacgccgcagggctttccctgggcgattccttctgttctctattggccgctggtcttgcttgccgcctttgttaccggggcgatttgggctggctgggttggcgcattacgggtgaaatttggcggaaacgatgtattgatttccctgatggccaactatgttgcgctgtttatcgtgcagtacctcgtttcaggtccgatgcgggcgccgggcgatctgcctcaatcgccgcgcttgccagccgaaagctggctgcccttcgtgatgagcggtatgcgcgcgcactggggtattgcgattgcgctggttgccacgctgtttgtgttctggctcatgcgcgccacccctgccggttttgagatcaaaatttccggtctcaatccgcgcgccgcgcgctacagcggcattgatgtcaatcgccgccagatgagtgccgtgctgctcggcggcggcctggcggcgctggctggcttatgcgcggtgctgggtgtgcaacaccgcatgatggagggcatctctggcggcgtcggtttcatcggcgtggtggtcgccctgctggcgcggctgaatccgctgctggtgatcccgacggcgctcctctacggcgggctggaagtgggcggcagcgccatgcagcgccagaccggcctgccgacatcggtcgtgctgatcctgcaaagcctggtggtgttactgattctggcgggcgatctgctgcgctattaccgcatcaacctgcctggccggcgtaaaacacgcagccagctggcggaggaacaaccatga

SEQ ID NO: 270754 - DNA, 1548 bp, Klebsiella pneumoniae
atgacagcaaaagtacgggtcgcgcttaataacatcaccaaatgcttcgcacgcgtagtcgctaacgatggtgtgtccctccacatcaaagcgggggaaatacatgccctgctgggtgaaaacggcgcaggtaaaagtacgctgatgcaaattctgtacggcctgtatcaggccgatgagggtgaaattgtagtagacggcgtaccgcagcgttttcgcgatcccagcgacgctatcgcctgcggcatcggtatggtgcatcaggaatttatgctagtgcaacccatgagcgttgtggaaaacgtggtgctgggactgaaagaacgcgccagcggcgtactcaatttgcacgcagcggcgcagcgtttgcaggcgctgtcagacaaacacggtctggcgatcgatccctgggccaaagtgcagcatctgcccattggcgtgcagcagcgcgttgaaatcctcaagctgctgtatcgcgatgcgcaggtgttgatccttgacgaacctaccgccgtgctgacgccgcaggagaaaaatggtctgttcgccacgctgaaatcactctgtgccgaaggccgctccgtggtaattgtgacacacaagctgtatgaaattatggcgattgcgcatcatgtttccgttatgcgcggcgggaaaatggtggattccgtcgatattaacgcgacttccgagcacgatttggcgcggcgtatggtcggtcgcgatgtggtgctgcgcgtggaaaaaacgccgtgtcggccgggcaaagcggtgttgcaggtcgataacatcgcggtgaaggacgccagcggccagcaaaaaatctggcgggtgtcgcttcaggtcgcggccggtgaaattctcggcattgcgggcgttgaaggcaacggccagtcagagttagccgaagcgctgctcaatctgcgcgaactggaagcgggacgcattctgcttaacggcgcggatatcagcgacgacacaccagcgacacggcgcaaaaaaggcatcggctttattcctgccgatcggcgcggcgtcggttccgtcaccgatctctcccttaccgataacgcactgctgggccgacaacacagctttacccgcgcgcgcggctggttactggatcgccagcgcatcagccagcatgcgcgcgacattatcgcccgttttgcggtacggacgccagatgcggagtttgaagcgggcaaactctccggtggcaacttacagaagctgatccttggtcgcgaagtcgccagcaatccctgtttgctggtggtggaacagccgacgcgcggcttggacgtcggcgcgattgagagcgtctggcaaggtttgatggcggctcgcgatcgcggctgcgccattttgctgatctcggctgagctggaggagatcattaatctttccgatcgtatcactgtgatgtacagcggccagattgccggtgagctgaccgctgctgctgccacccctgaacgacttggtgaactgatggccggtgcgcacctgaagaaaaaaggaggcggagatgaagaggctgcttga

SEQ ID NO: 270755 - DNA, 1011 bp, Klebsiella pneumoniae
atgatggcagacgtatcccgcagacatttcgcgaagttagtggctggtacactgttgttacctgtgctggcacctatgttgtcacgcaatgccttggccgcgaataacatgacaaaaatcgcgctgttgctgcccggttctgtcgcggatggcggctggagttcactggcgtttgccggattgcagaacctgaagaaagcaggcttcagcgtagcgtacagcgaaagtgtaccgcaggcccagatggagcaggtgatccgcggctatgcagacgatggttatacgctgatcattggtcacagctttgagtacggctcagcatttgcggaaatcgccccggactatcccgacacttacttcttcgcttcaacctttaaacccggcgaaaaatcaccggccaacgtggaatacgtcaacctcgcctatatacagggagcgtatgccgccggcgcgctggcagccctgatatctgacaaaggcaaagcggtgggttttgtgggcggcggcgacaacccgacacagcaggcgatgatgcgcgcctttatccaggcggcagagaaaacccgaccgggcattaaaggtatgggcgtggttaccggcgattacgataacgccgctaagggacgtgaagcggccactaccatgattggtaacggcgcggatgtgatctggcacgccgccgacgtgaccggtctcggcgcgatgcagggcgcggcggcaggcaaagtgaaagcgatcggctgttacgtcgatcagcgcgatgttgctccggcctccgtagcctgtagcttccgtcaaaatcttgactggatggtggaacaggtaggggagtcagtcgccaacaacagtttcaaaggcggcaaagagtggcatcccactgtgggcaaagcctggtcggttgtaaacggagaccatcagtacaacacagacctagtcagcgccagcgcctgggcttcctttcagcagatctggcaacagctggacagcggcgcactgacgccagcggtttaa

SEQ ID NO: 270756 - DNA, 900 bp, Klebsiella pneumoniae
atgcttcagcagcgtttgtttgtgtatctggatcaggtagcgcgcagcggatctatccgcaaggccgccgagcgtctgcatatttcggcatcagcgattaatcgtcagctgattgcgcttgaggaggagttaggcacgccgctgtttcagcgtttgccgcgtaaaatggtgctgacagcggcaggcgaaacgctgattcaccatgtgcggcaaagcttcaaagagatcgaaatggcgcagatgaagattgaagagttaaaaggattacgacgcggcgaagtcacggttgcgatgatgagcgggttgacggctaatcttattccgcgaaccgcggcagagttccgtcacgccaatccacgcgttaagttgaatctgcaacagcttaccaccggcgagaacatcactaatgcggtagcgagcggcgaagcggatttaggtctcggctttgattttgagctgcagccggtgcatcgcgaaatcgccagcgtgtcggttcgactgggtgcggtggtaggagcaggtcatccgctggcggagaaggatagcctgcgcctgagcgattgtttaccttacccggtggtcattgccgataaatcgatggtcatccgtccctacctgaatgaagtgtttgcgcgcgcctccattaacctgcagccggttattgaaactaactcgattgaggtgatgcgacagtcggcgatgatggatcagactctgacgtttctcacgccgatcgatatcgaatccgatcagcgtagcggcagattaatttatattccggtgcgcgaactggcgcagcgcacgcaaaccctgatgctgatcggccatgaccgcgggaccagcgccattggcagcgtgtttgctgaaaccatcaaaagcatgatgtcaacgctgcgttaa

SEQ ID NO: 270757 - DNA, 822 bp, Klebsiella pneumoniae
atgcttaagccgtcttctccctggtggtgggatctctctacgcgagaatttagtgagctagacatggcgaatatcgtcgccgttctgccgattggtgcagtagaacaacatggacctcatctgccggtgcgtgtagatgcggcaatcaacgccggcattatccagcgagccgtggaattattgcctgccgatttaccgatgctgatattacccgctttacctgttggtaaatctgatgagcatctggcctatcctggcacactttcgttgccgtacgaggtgttggggaaagtgtggtttgaggtggctaaaagtgcctggcgcgccggtgttcgtaagttgattttctggaactcgcacggcggccagccgcagcttatggagatgatttgtcgccagctgcgcattgagctggagatgtttgcggtcggtgccagctggttccgtactatcgacgcatcggatctctatagcgctcatgaacttcagcacggtattcacggcggcgaatccgagaccagcatgatgctgcatttgcatccagagctggttcagatagcgcacgccgataacttcgtctccacttcggtggcgctggaagccactggcggcatgctcaccccggagggcggagtgggttttggctggatggcgcaggatctgcatctttccggcacgaccggcaacgcgtcggcagccgatgcccaacgtggcgccctcgccaccgatcgcgcggcacgggcgctgctaaaactggtgcgtgaagtgcacgaattcaatatcgatttcctcaaggcaaagaccgcgtttaatcaaagatag

SEQ ID NO: 270758 - DNA, 573 bp, Klebsiella pneumoniae
atgatgcaaaacaatgccacaggctatgttttattggcaaccgtattcattcttacttttattaaaggtaaaatgcatgtcaagtttgtatcaattgttttcttttttgtcataatagttagcgtgtattacttctataataattattatttattcgacacatttggacagttagtaaaattaaaaattgattccttaatttatggtactgcggacagttcttcaattgatgaaagacttcttcaagtaactaatacaatgagaacgatatattctgatcccatttattttttagtagggtatggtggcttaggcggattcgctgtggagtcaggagcatattctattatcggtttctctgggttcattggtatgacaatttatgtgttcatattactttacgctttatactatacaattagagaaagagatttttttatgtttggtgtaattgtattatatatattgggaagtgtttcaattagttctttatatcttacatcaacatcatggatatatgcatttattcttgcatatctatctctgaatgcaagaacgaatattgaagtatga

SEQ ID NO: 270759 - DNA, 276 bp, Klebsiella pneumoniae; identical to SEQ ID NO: 208689

SEQ ID NO: 270760 - DNA, 1416 bp, Klebsiella pneumoniae
atgctgaaccttgccgaataccgccagcggcccgcgctgctggccgactggcttccctgggccgggctgatcgcgccgggcgtcatcttgaacaaggatggcgctttccagcgcacggcgcgctttcgcggaccggacttggacagcgccacgcaaggcgaactgatcgccacctcggcccggctcaacaacgcgcttcgcaggctgggttcgggctgggcactgttcatcgaggccgagcgccgtcccgccgccgactatccgcgttccgacttccccgaaccactgtcgtggctggtggaggaagaacgccgtgccgcgttcgaggaatcgggccatcacttcgagagcggctatcacctgacgctggcctacctgccgccggaggaatcccgcgcccgcgccgccaagctactttacgagaacacgcccagcgacggcgtggactggcgcggccggctcgatgccttcgtggcggaaacggatcgggtctttgacctgctcgatggtgtgatgccggaaatcgcctggctcgatgacgctgaaacgctgacctacctgcacgccacggtgtccacgcggcgctaccgcgtgagcgtgccggaagtgccgttccatatcgacgcgctgctggccgattccgctctggtcggcggcctcgcgccgacgctgggcgaccagcacctgtgggtggtgtcggtacggggctttccgacttccacctggccgggcctgctggacgacctcaaccgcctgggctttggctaccgctggagtacgcgctttgtctgcatggacaaagccgaggcggaaaaggagttgggccgcctgcgccgccagtggttcgccaagcgcaagaacgtggtggcgctgctgcgcgaaaccatcttccagcaggaaagcccgctggtcgataccgacgccagcaacaaagcggccgatgccgatgccgccttgcaggagctgggcagcgatcaagtcgccttcggctacctcaccgccacggtgacggtgctcgacgccgacccggccgctgccgatgaaaagctgcgcatggtggagcgcgtcatccagggccggggcttcgtcaccatccccgaaaccttgaacgcggtcgatgcctggctgtcgtccattcccggcaatgcctatgcgaatgtgcgccagcccatcgtctcgacgctgaacctggcgcacatgatgccgctgtcggcggtatgggccgggccggagaagaacgaccacctgggcggcccgccgctgatcgtcacccgcaccgatggcgcgacgccgttccggctggtgacgcacatcggcgacgtgggccacacgctggtcgctggcccgaccggcatgggcaagtcggtactgctcgccattttggcgatgcagttcctgtctcttatacacatctga

SEQ ID NO: 270761 - DNA, 1452 bp, Klebsiella pneumoniae
gtgaaaactttaaaccgtcgtgatttccccggcgcgcagtaccctgaccgtatcatccagtttggggaaggtaacttcctgcgcgcattcgttgactggcagatcgacctgctcaacgagcataccgacctgaatgcgggcatcgtggtcgtgcggcctatcgccacagattttccgccttcgctgaacacccaggatggcctgtacacgactattattcgcggcctgaacgagcagggcgaagcggtcagcgatgcgcgtcttatccgctcggtcaaccgggagatcagcgcttacgcagacttcgacgcttttttacgcctggcgcataacccggagatgcggtttgtcttctccaacaccaccgaggcgggcatcagctaccatgccggggatcggtttgacgacgcgccgccggtcagttatccggcgaaactgacccgtctgttgtttgagcgttaccagcatttcgccggtgcggccgacaagggatgggtgattatcccctgcgagctgatcgattataacggcgaggcgctgcaggcgctggtgctgcgctatgctagcgaatgggaactgccgcaggcatttatcacctggctgacctcagcgaataccttctgttcgacgctggtggatcgcattgtgaccggctatccgcgtgatgaagtggcggctctcgaggcgcagaccggctataaagatgctttccttgataccgctgagcatttctacctgttcgttatccaggggcctgcctcgctggaggccgagctgcgtctcgataaactgccgctgaatgtgcgcattgtggacgatatcaagccgtataaagagcgcaaagtggcgatcctcaacggggcgcacaccgcgctggtgccggtggccttccaggccgggatcgacaccgtgggtgaggcgatgaacgatgcggagatttgcgcgtttgtcgaaaaagcgatttatgacgagattattccggtgctggatctgccgcgcgatgagctggtgtcattcgccagcgccgtgacagggcgcttccgtaatccctatattaaacatcagctgctctcgattgcgctcaacggcatgaccaagtaccgcacccgtattctgccgcagctgctggcggggcagaaagcgcatggcgcgctgccgccgcgtctgacctttgccctggcggcgctgatcgccttttaccggggagagcgggatggtgagagctatccagtacaggatgacgccgactggatatcgcgctatcaaacgctgtgggcccgccatcgcgatggccagatgagcactcgcgagctggtcaccgccgtgctcagcgtggcggatcactggcagcaggatctgagccagatcccggggctggtggagctggtgactgccgaccttgacgctatcctgacctgcggtatgcgcgacgccgtcaaacctctgtgctga

SEQ ID NO: 270762 - DNA, 786 bp, Klebsiella pneumoniae
atgaataacctggttccagctggatctccgtcatctcccggaacattgctcccggtggccatcgattaccctgccgccctcgccctgcgccagatggcgctcgtgcaggatgaactgccgaaatacctgctggcgccggaagtcagcgccctgctccattacgtgcccgatttgcaccgcaagatgctgctggcgacgctgtggaacaccggtgcgcgcattaatgaagcgctcgcgctgacccggagggatttttcgctggcgccgccgtatccgttcgtgcagctggccacgctcaagcagcgcaccgagaaagcggccaggacggcaggtcgtgcccccgcaggcagtcaggtccatcgtctggttcccctttccgatcaccactacgtcagccagctgcagatgatggtagccaccctgaaaattccgctggaaagacgaaacaaacgcaccggtagaatggagaaggcgcgcatctgggagatcacagaccgtaccgtgcgcacctggcttagcgaagcggtggaggccgcagcggccgacggggtgacgttctcagtaccggtgaccccccatacgttccgtcactcctacgcgatgcacatgctgtacgccggcataccactgaaggttttgcagagcctgatgggccacaaatcgattagctcgacggaggtctatacgaaggtgtttgcgctcgatgtcgcggcgcgccatcgtgtgcagttcgccatgccggaagccgatgcggtagcgctgatgaaacaacttgagaggcgctaa

SEQ ID NO: 270763 - DNA, 612 bp, Klebsiella pneumoniae
atgtgcaaatgtaataccgtcacccgcgacgatattccgtttgccatctggtcagagcttcgccccgacaccccgtatcagtgcgtacgtgctcaatgtggtttcctgttctcttccgcttcctcgcccactcgctcactaacgttcggtcgctggggctgcggcgagcggtgccacctctcgcatgctgtcggtgattccgctgttgttctttcggggatgagtcgtcagatagcccttcaaacgcgctcagaagctctcagacgcacgaggcggggtttaaatgcccgtcagggcatggaaggcgcgaaaaacgcttacagagcgtttcaggaggtcaggcgcgccgatacccctagccaggggctttcaggtcgccaggaaccgcgccagccccctgcaaagcccatttgcacggtacaagcagccactcggttggtaggtggtcgtagaccgtcggtgttacagcgatggggggtctgggggtctccccagacggtttccggttgcgctcaaggcgctgccggaaccgtggcggctcggtcgttctggagatcggggagcaaaaacacgcaagggattttgaggcggcaaaagagcaatgcaggatag

SEQ ID NO: 270764 - DNA, 243 bp, Klebsiella pneumoniae
atgcacatcataatcttcaaagcaaatgctactgaaatacatagaataggcgaccatttgctttatgactcgagcaaggtgatgataaatgatattttattaacagatgctctgcgagttgaaattaaaagtgatgccggtggattactttatgccatggatgtgccaaaatccgatttctcttatggccaagaaatcgactttgacttattgaaacggccaaacacagactatggggtatga

SEQ ID NO: 270765 - DNA, 1893 bp, Klebsiella pneumoniae
atgacggtctcaaccgaagtcgaccataacgactacacagggaacggcgttaccacatctttcccgtacacgttccgcatcttcaagaagtcagatctcaccgtccaggtcgctgaccttaacgaaaatattacggtgctggctctggataccgattactccgttaccggggctggtacctattctggcgggaatgtcgtgctgatgtccccactggccaacggatggcagatttctatctcgcgtgaccttccagttacccaggagactgacctccgtaaccaggggaagttcttcgcagaggtgcatgaggatgcgttcgacaagctgaccatgcttatccagcagtgtttcagctttctacgcctggcgctgcgcaagccgtcgttcatctcgaactattacgatgcgctggggaaccggattcgaaatctgcgtgacccgtcacagacgcaggatgcggcgacgaaggggtatgctgacaatctctatcagggcgccatttctcattcagacaataactttaagcggacgctgagggttcctgagtcagaagtaggaatgcttcctggcatctcaggtcgcaggaaaaaaatactggcattcaacgataccggtaatccgatagcggtattgcctgagtcaggttctgcggctgatgtgatgattgagctggcatcagaagaagggacttccctggtcgcaaagttgggtaataaacctcttgttgcgatcagttattacaaaaatcaggggctgtccgatcaggatgctgtgcaggctgcttttgatgaatccagcaacatcacttttgataccaatgtcactctaaccagtgcgatagaatttgatcgttcggagccgtgtactgttattttttccccgggaattacagtcacgaataccaattttctgccgagactaacaacgcacccgaaccacaaaatatcaggcactacgttcagaacaaaacaatatagcgctgtgaatatcgatggaacgtcggttaagcaccagactatggctgttgaaatggctgtccacgatacgctatccagcggtcctaactatgagccgttcgttgctctgatggccgcaatagagtcattcaactgtgagcgccagaaactgtggggcatgaacatactgactaatgcccacaacctaaactctggtgatgaggtgtacgggattgagattgactgcaatgttgatggctcgtttgacggggctggaaactattgcggggtttacatcgcgggtgctggggacttatcggcatcatccggttctgatggcattcgcgttcagcgattacgagatggtgtttataaatggcaatacggtcagcgtatttttgattcagtgaccgggctggggatatacgacgcgagtaactattccatcttcgcttcaggtatagcccctattgcccggcggcgcgatacgcaatctggtgtatggtcgtttatccactcagtttcagcatctgtaattccgtggggagtggatgattatggcgatacgtattcccggcggctgtatttgggtacgggaaacggaaaagcaaaaaacagggtaaacctcgacggtggtgtgaaattccataccacatcctcagctgtcgcgtggggggcaataagtgctggcgggtattctgaaaaagatgtgacgacactgtttggcatttccattgctgactggacgaactacacgctggatgtcacccccgttggttacgctggcgcaatgcctgttgtggctgttcaggtttatatcaacagtgcgaaaacgcaggcgtacgttcgaatcatcaatatcagcggcgtggctttgtccgaatgtaatgtcggactaaatgccaaactatgtggacactcatctacaaactag

SEQ ID NO: 270766 - DNA, 477 bp, Klebsiella pneumoniae
atgtttagtgctttagccgtcgccgcgacgctgaccgcctgtgctaatcaccactcgaacaattcttcgacgcaggcggccgcgcccgacccttacggtatcgcgacgctgagcgtggcgcagcagcagccgagcgtcacggggacgattaatatccgccagagaatcgctttaccgccggatgcggtactgacggtgaccctgtcggatgcttctctggcagatgcgccagcccgcgtattgtcgcaaaaagcggtgcgtaccgaaggcaaacaggcgccatttaactttgcgctgccttacaacccggcagatattcaaccgaacgctcgcattctgctaagcgcggcgatcacggttaacggccagttgatgtttattaccgataccgtgcagacggtaataaaccagggcggcactcatgccgaactgacgctggttccggtccagcagaccgccgttcctgtcgcccagtaa

SEQ ID NO: 270767 - DNA, 681 bp, Klebsiella pneumoniae; identical to SEQ ID NO: 249102

SEQ ID NO: 270768 - DNA, 306 bp, Klebsiella pneumoniae; identical to SEQ ID NO: 249101

SEQ ID NO: 270769 - DNA, 432 bp, Klebsiella pneumoniae
atgtcggaccttgattttgaagatggttttgaagatggttttgaagatgaaaacggcaatgaaggtatgagcgagtatacccttgttgagggtttaggtaactttgatggactttccggagtcgaagagcatgaaggaaatattttagatgtgcggcaagacgatctgtcatatcctaaggttcaagttaaagtgactgattgtagtgcgtcagaatcaaagtttagtggaactgacgaatctgatgtgaatcacactgctgtattaaaatctacacagggtgagaaagaagttcaaatttttgcgaataacgaaaccggtgattaccgtacctacgatcctgatgccccagaaggtgagaaagaagaaacttttgattctccagatcagcttgtagctgccatccgagagcatttcgctaaacctgaataa

SEQ ID NO: 270770 - DNA, 369 bp, Klebsiella pneumoniae
atgagcagtaacgtgaaacttaacgaactggaaaagcgcgttgctgtgctggtggagaaggtcttgcaccttgaacaacgggtcaactcactcaccagcagccaggggggagaaatcccggcaggtatgaagccgatcaccacgctggcggctgagtttggtatttccacgaaaaaggcggaagaactggcgaaaaacactggcgtaatgctggttaggctgaaatcagggggatttgtggcaccagaggataaattcagggagacggcacggcaggtattgcggagtgctaaacgtaaatacggatctgcgtactggtatcacccgttgttaggcaaattccagatgagtggaggggtgccgaaatga

SEQ ID NO: 270771 - DNA, 309 bp, Klebsiella pneumoniae
atgaaaagtttaaattccggcttaattgctggcgctcatactcaacctaaatttacctggttgtttctggctaattacgctgattcgcaagcgcttccagttgttctgcgtactcaggccaataccgaatatgaagcccgctcacagttggctggtggcttctcgctgacattcgcggcaaaaatccgtactgattgccctcttacctgccattggatggatcaggatagctttgttttgtggtctgtcatgggctgcaatgctgacaattcctttcagcaaatgaaagggggccaatatgagcagtaa

SEQ ID NO: 270772 - DNA, 183 bp, Klebsiella pneumoniae
atgcgtaaaaccttccagatcgacggatgcgccgttaacaggcgaggatataccgtaggcattcattacaccatgaccagcaccagtccagaaacggccaaatcgacagcgcaactactggctcatagaggcggatttaaaaatgttcgtattagctgcgttcgtgaggtgcgtaatggataa

SEQ ID NO: 270773 - DNA, 201 bp, Klebsiella pneumoniae
atgcgtgatatgacggttcaacaggccgctgaaaaagcataccaggcagaaataatccttgccctgatttgcgaaaagtcggttgtacatatggaagatagcgaagttgacgcgctgctcgtgatggttaaaaagctgattggcgatgtaggtggttttcttggtgaagaagaatcacgcgcggaggtgggaaatgtttaa

SEQ ID NO: 270774 - DNA, 684 bp, Klebsiella pneumoniae
atggctaaaaaaactgtctggtcactctttgatggctccgggattatggggttgccgtgggctgaatacggtcacaccgtgtactgctttaacgcttcatcaggcaatcatggcgagtacgcaggacggaaggagcacccgctggtacatcacgtagacatgtggattgatggggattttgccgagaagtgcgccgctatgaatatccccagcccggacattatctttgctttccccgactgtacagagcttgcggtatcaggggcaaagcatgatagccacaccagccttgtatcagtagaaaacgcgaaaatggtgcaggaaatcgcagagagattcgaggctaaatggatggttgagaaccctgtagggaaaatgtccactcactggcgtaagccggattactacttcgacccctaccagtacggcggttatatgcatgggggtgaggagagttttcacccgaaaatgccagcgtatgacgggtacacgaaaaagacctgcatttgggctggcggcgggtttgtaatgccagagaaaaaaccgggcccggtaaatattgggatgttctgggggtggagatggttaggtggtaactcgcagcgcaccaagcaacttcgctcactaacgccgcgcggattcgcaagggctgtatttttggcaaaccggggagccaaccaatga

SEQ ID NO: 270775 - DNA, 834 bp, Klebsiella pneumoniae; identical to SEQ ID NO: 106540

SEQ ID NO: 270776 - DNA, 318 bp, Klebsiella pneumoniae; identical to SEQ ID NO: 197345

SEQ ID NO: 270777 - DNA, 1650 bp, Klebsiella pneumoniae
atgtctcaattcttttttaaccagcgcgccagcctcgttaacgacgtgatcgagggaaccattattgccagcccgtggaacaacctcgcccgcctggagagcgacccggcgatccgtgtagtggtacgccgcgatctgaataaaaacaacgtggcggtgatttccggcggcggctccggccatgaaccggcgcacgtcggctttattggtaaaggcatgctgaccgccgcggtctgcggcgatctgttcgcctcgccgagcgtcgatgcggtactcaccgcgattcaggcggtgaccggcgaggcgggctgtctgctgatcgttaaaaactacaccggcgatcggcttaacttcggcctcgcggcggagaaagcacgccgtcttggctataacgtagagatgctgatcgtcggcgacgatatttcgctgccggataacaaacagccgcgcggtatcgccgggactattcttgtgcataaggtggcgggctatttcgccgagcgcggcttcaacctcgccaccgtcctgcgtgaagcgcagtacgcagccaacaacaccttcagcctgggtgttgcgctttccagctgtcatctgccgcaggaagcggaaagcgcgccgcgccatcagcccggccacgccgagctggggatgggcatccacggcgaaccgggagcctcgacgatcgcgacccataacagcgcggaaatcatgcagattatggtagagaagctgaccgccgccctacctgaaaccggccgcctggcggtgatgctcaataatctcggcggcgtgtcggtggccgagatggcgattctgacccgcgagctggccaacaccccactccatgcgcgcgttgactggttgattggcccggcttcgctggtaacggcgctggatatgaaaggcttctcgctgaccactatcgtgctggaagagagcattgaaaaggcgctgctgtcggatgtcgaaaccgccagttggcagaagccggtgcagccgcgggctgttaatatcatgccgtccgcgctcgccagcgcacgcgtcgcctttacgccatcggccaacccgcaggtgggcgattacgtggcgcaggtgaccagcaccctctccggcctcgaaacccatctcaacgcgcttgacgccaaagtgggcgacggcgataccggctccactttcgccgctggcgcgcgtgcgattgccgctctattgcaacgccagcaactgccgctcaatgatttacccacgctgttcgcgctaattggcgaacgcctgacggtggtgatgggcggctccagcggcgtattgatgtcgattttcttcaccgccgccgggcagaagctggagcaaggcgccagcatggcggaagcgctgaacgccggtctggggcagatgaaattttacggcggcgccgatgagggcgaccggacgatgattgacgctctacagccggcgctggcggcgctgctggccgaaccggataatctgcaggccgctttcgccgcggcgcaggccggcgcggatcgcacctgccagtcgagcaaagccggcgccggacgcgcctcctatctcaatagcgagagcctgctcggcaatatggaccccggcgcccacgcggtggcgatggtgtttaaggcgctggcggaacgctaa

SEQ ID NO: 270778 - DNA, 1419 bp, Klebsiella pneumoniae; identical to SEQ ID NO: 197347

SEQ ID NO: 270779 - DNA, 633 bp, Klebsiella pneumoniae; identical to SEQ ID NO: 197348

SEQ ID NO: 270780 - DNA, 1071 bp, Klebsiella pneumoniae; identical to SEQ ID NO: 78944

SEQ ID NO: 270781 - DNA, 171 bp, Klebsiella pneumoniae
atggaccggctcggtcgcaacaccgccgacatgatccatattgtcgactcctgctataaaaaggggattgccattcgcttcctggaaaatggcctcagcacggaaggcacgatggggaaaatggtgatccagattttggctgctgtggcagaagctgagcgtgagcgctga

SEQ ID NO: 270782 - DNA, 924 bp, Klebsiella pneumoniae
atgaaaattgaattcgaagccagatatttcacagatgaacaaaataaaattatccatggtgatgctttaactgaattaaagaagttaccatcagaaagcgtagatttggtttttgcagatccgccatataatatcggtaaagatttcgatggtcttattgagtcttgggatgataatgaatttcttcattggctattcgagtgcattgatgaatgtcatcgagttttaaaaaaaaatggcactatgtatataatgaatagtactgagaacatgccatatattgacataaaatgcaggaatacctttcatataaagagtagaatagtttggtcttatgatagctctggggttcaagctaaaaactactttggttctatgtatgaaccaatattaatgatggttaaagaccccaaaaaatatactttcaacagtaaagatatcttggttgaagcaaaaacaggttccaaaagagctttaattgattacaggaagaatccacctcaaccttataatactcaaaaagtacctggaaatgtttgggaatttccccgagtaagattccttatggaggaatatgaaaaccacccaacgcaaaaaccaacttctcttctaaagagaattgttttagcttcatcgaatccaggggatgtagttttagatcctttttctggtagctttacaacgggagatgtatctaagtctctagatagaagatttataggtatagaaataaacgaagagtatgtaaaaatgggcataagaaggttaaacataccttcaagttacaccccaaaagaattagaaaaattaaaaaaaaggaagacaaaaaacaaatcgaagaatgtcaggggggatgataatgacatttctgatttgttaattgatgatctgccctctagtcaagaaggccatactctaatttaa

SEQ ID NO: 270783 - DNA, 1032 bp, Klebsiella pneumoniae
atggtggatttcgttaagaaaatagatgagttagcatctaaatataatgtaagtcaaaggtctgtagtttacaaatatatcgaaaaaaagactagagcatcaggcagagatagcaaagctaggcgttcacttggcaatttatatgcgctatatgttctttgtgaagcatataataatggggcgaagggcgggacctccttctctgttttaatgcagagaatgagagcgcttccttttggttctaaactgcaaaatcatcctttggataatagattgaatgatgaggtaagaagaagttttttagtgcaggataatatgttacctgtgcaaagtgcgacagaaggaacagtaaaaaaaagaataatttctattgattttctttcagagtttggcatggatccaggttcatcttcattgtttatcactaaagcaattgatttatatattgacgaaataactgaaaaacaaaatgaattcctttttaatattgaaaactcgaatggaaaagaagggatattgaaatttattgaaaattcctttagcccaaatgcagatgctaggttgtttgaggtcgtatccttttcagtgctaaaattatacttcgctaaaaaaaatattgtaataaatggaagggaggagttcttccagctgtttaaaacaggaaggactaatgctaatgatggtgggatagattttgttttaaggccagtaggaaggttttttcaagtgactgaggttttagacttcaagaaatactttttagatttcgataagacgaataaatttcctatgagttttgttgttaaaacggatcttgatccagaaggagttatgaggttaataaaggttaatgcagaaaaaactatgggcgaagaattagcgaatagatattttggcttgtttgaagaagtttttactttaccgacccttagaaatattgtaggagtgatatctgactctcttgaggatcttgaagaactcaagagagtcattattgaaaactttaaattagagtatggccttcttgactag

SEQ ID NO: 270784 - DNA, 873 bp, Klebsiella pneumoniae
atggccgttgaaatggcggtccatgacacgttgtccagcggacccaactatgagccgtttgtcgccatgctggctgcgatagagtcatttaactgtgaacgccagaaattgtggggtatgaacatactgacaaacgcacacaacctgagatctggcgatgaaatttacggggttgaggttgactgcaatattgatggcgtgctggatggcggcgggaattattgcggggtgtacatcgcgggaggaggtgatttatcggcatcgtcagggaccgatggtattcgcgttcaacgtctccgcgatggcgtttataaatggcagtacggacagcgtatttttgattctgtgaccgggctgggaatatacgacgcgagcaactattcgatatttgcatcaggtaacgccccgattgccaggcggcgcgatacgcaatctggggcgtggtcgtttatccactcagtttccgcatcggtcatcccctggggtgtggatgattacggcgacacgtattcccggcgactctatctggggacaggaaacggaaaatcaaaaaaccgggtaaacctcgatggcggtgtgaagttctataccacgaatgctgcagtagtgtggggtgctatagctgccggcggttactctgaaaaagacgtgacaacgctcttcggaatctccattgctgactggtctaactacacgctggacgttacccccgttggttacgctggcacaatgccggttgtggccgtgcaggtttatatcaacagcgcaaaaacgcaggcttacgttcgagtcatcaacatcagcggcgcggccttgtctcaatgtaatgtcggactgaatgccaagctatgcggacactcatcaaccaactaa

SEQ ID NO: 270785 - DNA, 1773 bp, Klebsiella pneumoniae
atgaccgttgccattaccgatgtcgtcctgcgcgacgcccaccagtccctgttcgccacccgtctgcgtctcgacgatatgctgcccgttgccgctcagctggacgacgtcggctaccgctcgctggagtgctggggcggcgccacctttgacgcctgcatccgcttcctcggcgaggacccgtgggtccgcctgcgcgagctgaaaaaggcgatgccgaagaccccgctgcagatgctgctccgcggccagaacctgctcggctaccgccactacgccgacgacgtggtggagcgcttcgtggagcgcgccgtcaaaaacggcatggacgtcttccgcgtcttcgatgccatgaacgacccgcgcaacatgcaggccgccctgcaggcggtccgccgccacggcgcccacgcccagggtacgctttcgtacaccaccagcccggcccacaccctgcagacctggctcgacctcaccgaacagctgctggagaccggcgttgactccgtcgccatcaaggacatgtccggcattctgacgccgcatgccgcctttgagctggtcagtgaaatcaagaagcgctacgacgtcaccctgcacctgcactgccacgccaccaccggcatggcggagatggcgctgctgaaggccattgaagccggggtcgacggcgtggatacggcgatttcgtccatgagcgccacctatggccacccggccaccgaggcgctggtggccaccctcgccggcacgcaatatgacaccgggctggatatccacaggctggagagcatcgccgcgtactttcgcgaggtgcgcaaaaaataccacgccttcgaaggccagctgaaaggcaccgacagccgtatcctcgtcgcccaggtgccgggcgggatgctcaccaacctcgaaggccagctgaagcagcagagcgccgcccaccgtctggatgaagtactggcggaaatcccccgcgtgcgcgaggacctcggcttcatcccgctggtgaccccgacctcgcagattgtcggcacccaggcggtgctcaacgtgctgggcggcgagcgctacaaaaccattgcgaaggagactgccggtatcctgaaaggcgagtacggccgcaccccggcgccggttaacgccgccctgcaggcgcgggtgctcgacggcgccgacccggtgacctgccgcccggccgacctgctgaagccggagctggcgcagctggaagccgacgtcagacgccaggcgcaggagaagggcatcacgcttgccgaaaacgccatcgacgacgtgctcaccgtggcgctgttcccgcaaatcggcctgaagttcctcgaaaaccgccacaacccggcggcctttgagccggtaccgcaggcggaagccgcgcagccagtggcaaaagcagaaaaacctgccgcctccggcgtctacaccgtggaggtggaaggcaaagcctttgtggtcaaagtcagcgacggcggcgacgtcagccagctgacggcggctgctcctgctcctgcctctgcacccgccgctgccgccccggccggcgccggcaccccggtgaccgccccgctggcgggcactatctggaaggtgctggccagcgaaggccagacggtggccgcaggcgaggtgctgctgattctggaagccatgaagatggaaaccgaaatccgcgccgcgcaggccgggaccgtgcgcggtatcgcggtgaaatccggtgacgcggtggcggtcggcgataccctgatgactctggcgtaa

SEQ ID NO: 270786 - DNA, 432 bp, Klebsiella pneumoniae
atgaaaatccccgcccacctgaaacataagccaattattcaagtagagaattatgatcgcattgatggaccatatgccgacgacactgatgcaatggggttatctgttggtatcgcacaatggaacaccccgggatggacagagctttcggcaaaggtttggcgaaataccggcgagaagtggtcccgtcagtctgaggagcttccacttcaccgagtaatagaccttgccactctgatctgcatagcgatggattacagcaaaaatgggcggctatcatccagtgacgacttcccggtcagtcgttctgcagacaaccatgaactcactcatcacatcgaactaatgaaaaaagagttaaaagaaaatcaggaatatctcgacgagagctttaaacgcctttcggctgaattgaaacgtcttggctactaa

SEQ ID NO: 270787 - DNA, 201 bp, Klebsiella pneumoniae
atgcttctaatgaatcagcccgaaaaacataaaatccagaaaatgcacgacgattttaaaaatctcagcgtagagcagaaaacatttattgccaaatcgctagacgtctctatggatgaggtggacgctcttattactaaactgttagagcctcagaaaatctctatgcaatctcggattaatcaacgaattaataaataa

SEQ ID NO: 270788 - DNA, 1539 bp, Klebsiella pneumoniae
atgaatgacatctcttctgacgacatccttctgctgaaacagcgccttgccgaacaggaagcgctgaaccgtgccctgctggaaaagctggcagaccgggagcgcgaaatagaccatctgcaggcgcagctggataaacttcgccggatgaacttcggcagccgttctgaaaaagtcccccgccgtatcgcacaaatggaagccgatctgaaccggcttcagaaagagagcgatacgctgaccggtcgggtggatgacccggcagtacagcgcactctgcgtcagacccgcacccgcaaaccgttccccgaatcactcccccgcgatgaaaaacgcctgcggccagcgggttcctgctgcccggagtgtggtggtgcgctgagttacctgggtgaggatgccgctgaacagctggagctgatgcgcagcgccttccgggtgatccggaccgtacgggaaaaacatgcctgcacaaaatgtgatgccatcgtgcaggcccccgcgccttcgcgccccattgagcggggtatcgccggaccggggctgatggcccgcgtgctgacctcaaagtatgcagagcacacaccgctgtatcgtcagtctgaaatatacggtcgccagggcgtggaactgagccgttcactgctgtcgggctgggtggatgcatgctgccggctgctgtccccgctggaggaggcgcttcaggactatgtcctgactgacggtaaactccatgccgatgataccccggtccaggtgctgttgccgggcaataagaagacgaagaccgggcggttgtggacgtatgttcgtgatgaccgcaacgccgggtcagcgctggcaccggcggtgtggttcgcctacagccccgacagaaaaggcatccatccgcagacccatcttgcggggttcagcggtgtgctacaggcggatgcgtacgccgggttcaacgagctgtaccgcgatggccggataacggaagccgcctgctgggctcacgcccgccgtaaaatccacgatgtgcacgttcgcacgccgtcagccctgacggaggaagccctgaagtgtatcggcgaactgtatgccgtggaggcggaaataagaggaatgctggcggaacaacggcttgctgaacgtcagcggaaaacgaaaccgctgcttagtaccctggaaagctggttgcgtgaaaaaatgaaaacgctgtcgcgacactcggagctggcaaaggcgttcacgtacaccctgaaccagtggccggccctgacgtactatgcagaaaacggctgggccgaagccgataataacatcgctgaaaatgcgctgcggatggtcagtctgggtcgtaaaaactggttgttcttcggctcagaccacggtggtgagcggggagcgttgctgtacagtctgatcgggacgtgcaaactgaacggcgtggatccagaaagctaccttcgccatgtccttgacgtcatagctgactggccggtcaaccgggtcagcgagctgctaccctggcgcatcacactgccaactgaataa

SEQ ID NO: 270789 - DNA, 348 bp, Klebsiella pneumoniae; identical to SEQ ID NO: 182324

SEQ ID NO: 270790 - DNA, 174 bp, Klebsiella pneumoniae
atgaataactccacctcatataacactctgcaatctgtattacaaacataccacgataattatgccatccctgtgctgaagttattgaacgaaatgcaacgtgacagaacgcctgagagccttttggcggcgattaacgcgcaggatttagggaaggtgcgaacaagttcctga

SEQ ID NO: 270791 - DNA, 1005 bp, Klebsiella pneumoniae; identical to SEQ ID NO: 133534

SEQ ID NO: 270792 - DNA, 672 bp, Klebsiella pneumoniae
gtgccggacggccagtattctttctatctgcacagcgacgatcgcaccgacatcgcagcaatggcaaccatcagcaccatctcacagcccctgcgcggtgagttcatccgtaccgccgccaccgccggggcggtggtataccaggtggatgcccgtttaccggcgctgatcccggtgttctttgccgggcagctaagtgctgtccgcctttgcgccgtgatggccctggtctccggaacctggtcctcactcaccggccttccggatgagcccgaaaatggtggggctgctctgcccgtgtcaccggagacagaataccagcgccggcgttacaccctgacgcttcagaatggccggagtggggaacgggtggaaagtgtgctgacggaagcgtcatcccgtctgcgtggcgatctgctgagaaacctgattatcaccggtcttgccctccacacgacggcaccggagctgccgcgcctgctggccagtatgccggtaccgcccacctcggtcagtgagctgcaggcactggttcagcagatggccggcaccgctgacgtgaacagggctgcagctgcagtaccggatacgccgacagcatctgccgcgccggtgtccgggtcggatacccgggaaataaagaaaaatatgcggcgtgcattcggtgactaa

SEQ ID NO: 270793 - DNA, 240 bp, Klebsiella pneumoniae
atgattaggcaatcagacattaaccaggctttccgggattccatatcccgtaaccctaaaggctatcaatacctccatacccacgacttcattgccgttctgcagcaacgcagcatccacctttccgacactgaggctaaccggtggatagagcgctacgtgacaacattccgcgacgtctcaactcaggaaggtgacgatcgcacgttccagctttacaacccgaatggagggctgtaa

SEQ ID NO: 270794 - DNA, 1425 bp, Klebsiella pneumoniae
atgagtctaaaccggaagaaaaccttaagacaagttaccatgacaaaggtcacccatgtaaatgaccctgagggggagaccattgagcttgactcaaagaacagctactcaagaaaggctatacctccccttaaagtaaatgggaagataatcaaaagttataactacaactactttccaataattataaacaaagatggctcaccatggcgtgagggtattttatacataattgcaaaagcaaatagcgattttaactataaaatatcaacttatcacagcatcatgtcagatttaactcatttcaaaaattacattgatgataataacatagatatgtttagctttcctaaaatgaagttattacggccgacatatcgatacagaaattatttactccttcttgttcaaaatgatgaacttagttctcacactgcaaaaagaagagtatcttcaatgattaaattttatcgttatttagctgaggagaattattttaaaccattaaacccgctctggaatgagcgtgacctatatataaaaaccaatgacacaaagggttctgcttttcatattaaaaaagtaacaactgatttaaaaataataccctctcccaattatgatcctttttctaacgagataatcgatgaaggtagactaagacctttacctaaacaagagcaattagaattaattaaaacaataaataacaccagaaacactgaaatgttattaatccatctaattgcattgcttactggagcaaggatacaaacagtgttaactttaagaaaatcccatttttgtaaaccactagatatcagtgatagtagtttcacattagcaactgggcatggtacaagtattgataccaagaaagataagaatttgatacttatcttccccaaattactctataacaaaattagggtttatactttaagtgaacgctaccttaacagagtaaataaaataaaaaatcatgaattcaatgattacttatttttaagcaatagaggagttccatattatcttggaaaggaatcattaaaatcttcaaatactcagtctaatgaaagaacaatgcacaatggagaggctgtaagacaatttatttctaaaacagttattcctacaatgagggttaaattatctaataacaagtatattttccggtttcatgatttacgagctacatttggtatgaacttatcagagtcacagatgcgattagttgaagaaggaaagcaaagcttgtatgaagccagagagtatgtcaaagcaagaatgggtcataccactactgaaatgacagataggtatttaaattataaaagtaaccttgatacattaatgacacatcaagaaaattatgaggattatattaacattcttttaggacatgtcgatacggagtgtttatga

SEQ ID NO: 270795 - DNA, 225 bp, Klebsiella pneumoniae
atggataaatatcacattactaaggatggtgataaatggaaacttcagaaagaaggtaatgaaagaccaagtaagacggcgacaactaaaaatgagattgtcagagaaatgcaagaatatatgactgataaaacaggctcggttaaaatccacaaagaggacgggcgatttcaggaagagcgcacttatcagcggaaagatgatccaaaaaaatccaaaggctaa

SEQ ID NO: 270796 - DNA, 597 bp, Klebsiella pneumoniae
atgcctaacttcacatttacagcagagaatatctctcatatccgcactgctatatccgaaaataaactcgatgacaaagtaaaggtgtgggagcataaattacttaaatccatgagaagagaactcaaacaatatattctttccaaccgtaatgatggtttcaaatgtgcttattgcttaaaggattttcataatgaacacaatatgaatattgatgttgaacacattctccccaagtcacaatatccagagtatacgttcacacttaaaaatttagcggtggcctgcaagagatgtaacctattaataaaaagaaatgatgtttcatttttaaatgctaacttcataagaaaaaaaccgtttaactcaaaatattataaaatattccatcctgttatcgacagaaaaaatcacttatctcttctggatgtccattttaatgggtgccacattatcaagtatcaaacaaatagtgaaaaagcaaacaacacctacatttacttcaagttaaatgaagttgagatagaaacattaaacaacgcacaaggaatagaacaaataattgatttacttcaaacatacaacccaagaaattag

SEQ ID NO: 270797 - DNA, 1176 bp, Klebsiella pneumoniae
atgaaatttgaatcaacatcgttagtcaacattatcacaggtaataatgggtcagggaaaagctcgatattagctgaaatttcaaagcaagaatacgttacaggaaaaaatgtaatatgcttatcaaacacatcaaccaataaattccctaaaataaaaagccatcgttttcacgttcttaatcagtcatctaatacacttaccaaagcattaaaaaaagttgtagtaagcaatagtcacaataagatcgggtcatcgcatgcacacattttcccaagagtattggcgtatttagatttcaatgagcaactcacatttaaatttacaatcttcccttatgaaagtttcattagaaaattccaatccgagatgtacaacaatgagttaatcggtagtgatattgatgaaataacgaatcacttaagaaatctaatcgaaataaacgatgacactgctaactctactgatcatggagtgaaaggctctcacatactttatttggagtatgctttcacatatgaatcagaaaaaagaattaacaccattcataatcgcctcattgaactaatgttaaagcatgagcgcattctaaaaaagaaccatttaatacatgacattgaaataaccttaagccgtggccatagtataataccatcatctcatttaagctccggtgaagcgtgctacatggcaacacttgcttttatccttacatatatatcggataacaacgtaataataattgatgagccagagaatagtttacatcctcgttggcaaaaaaaatacacatcaaaccttctggatctattatattatttcgacatgagaataatattagcgacacattcaccaatgattgttataggggcggtagaagaccatagtggcctaagtgttttcaaatccgaaaatagtaccctttatccccttgaaggaaatgaaactaatattgatgaagtaatggtggatgtgttcggtgtattaacgtcaagaagcagatatttcagctacaagataaatgagattcttaatgaatacaacaataaaaaaatagatataaattcagcgcgcgacaaattaaataaaacaaaatcactcgggcctgatgaaagccaagtgaaaataattgaagcagccaatgaaatattaaatcagatggtgaaaaatgcctaa

SEQ ID NO: 270798 - DNA, 789 bp, Klebsiella pneumoniae
atgaataatatgattgaggcaacagggaataataatttttcatatgaagactttaaagagtcaattgaagaatttatctggagacaacttgaccattgttttatagtcatgaaaacgattatcaatgaggctgttaaacctaacttcagagcagagtgtgataaattattaagtgcactttcaaaaaataacaaaattatagaaaatggattgatttctgaaaaaattcaacttgctaaattcaacatcagcgaaaaattatcagacattgaaaattggtttcgtagaccaagtaaagaattagatgaagatattgaattagctactttactcattgcctcaaaagattatatagaaggaatttactctccccaaaaaataaaaattgagttaagaaataatgagcatgattctttaaaactgagtaatgcctcgttattaaatttaactcgttcactagtaactatgtataataactgccttagacatggtatagacctcgttggtactcctatatccgttactactacagtcattgattcacaattaaccatttcagtcgaaaatgaaatatcctataataagcggcttgaactttttaaaagaaatattactgatgaagtcgactcatatcccaacaacgattatagtgatagattaaaaatggaaggaggcactggcctatataaagtatttaagaatattcaagatggatttaaaaacagtcgatttacagttgaattaaacgatgatactttcaaacaaataattgtaataaatttggagtaa

SEQ ID NO: 270799 - DNA, 447 bp, Klebsiella pneumoniae
atgaacattcttatcattgaagataatttatataagagtgataaaatacttatatttatgaatgaaatattctccgaccctacaatcacattggcacactcagtctctagcggtattaaaatactaaattctgaaaaattcgatttagctattattgatatgagcctgcctacatttgataaaactcaaggccaaccgccaagtaatccaaaggtattcggtggtttagagatagcaaaacacattcatagaaaaaagtccaagattaaatacatcatcctaacccaatatcaatcatttgctgaggatgataaacgctatgacctaacctcaataaaaaacatattcaaagaaaaatacataaacaatgcacttggttgcgtattttatgaaaactcaagccttaactggaaaaaagaaataattaacattttggatttagaatga

SEQ ID NO: 270800 - DNA, 1131 bp, Klebsiella pneumoniae
atgaataaaataattgtcgtagatgatgatgcagtacgtagaaccaaaataattcaactgctaaatcaagaacatgatattcctgtaaaatggattgatgaatgtgactccattaattcagcagttcgacttcttagaagcacttattactcaattgctttaatagacatggggctgcctaaactttcaggtggggaaccggataatttcggtggtgtagcaattgttgagtctatttataaaaataaagtcaaaagcccaggttttattttgggatatactgctattattgataaccttgaacaaagaactgcagcgtttaaagataaaggtttcagattagagcagagttctgctggtgattattcttggttgaataatgccaaagccgaaatcaaacattttcttactgttttttcaaattatgaaagaggtaattataacatttcagttttaactgttcatggaattagaagttatgcttcttggcaagaagatattgagagaatcatcgtcaataattctgaatcacaaacacagacattctttcattataaacatactttaatttccacttattcatttcttaagtcaaaaaatcgagataaaattttagatcactttacccttgagctaaaacaatggatcaataataatagaagcaataagattatttgtgtcgcacatagttttggtacttttttattgatggaaggcattaagagattaaatgatgatagattgacaaacagtttagaccttataattctttgtggaagtgttttacctgaagactataagtttaattttctttctaacaatcgtgatgtgcatattttaaatgaatgtgccatccatgattatccattattattcaatggcgcgatagtcaagaattccggtttggctggaatccttggatttaaaatatttaatgggcagaaaattaaaaatagatattttaatggcggtcattcattgttttttgatgaaagccatataacgaaatattgggttcctgtatttaacaataaggaacgagtaattgatattaacgagggagttcatcaaaatatttttttcaaaatcatgctcagactgagccagcttattggaaaactagtaaaataa

SEQ ID NO: 270801 - DNA, 231 bp, Klebsiella pneumoniae
gtgtccaacttttggggtgcagtccagtggctgacgcggctggagtaccagggcgtactcctcacgctggacggcctggcccttaacctgcaggcgctaaccagcgtggaggctgcgctgactcgcgtcgcgggattcgcgccggcaaaagccggcgggacccagcgcgacgccgaggggcgttggcagttcagttttaccctgacgggagcgcgcgctgatgcggattaa

SEQ ID NO: 270802 - DNA, 186 bp, Klebsiella pneumoniae
atgcgccagcttgaggaagaaaacctcaggctgaagaagctggttgccgatctgagcctcgacaaggccatgctgcaggattgtaagtatcccgataaagcggaccattcacatttagagatcttccggcatactaattatgtgtattggctcaaacttgatctggcactgggctttgttgaataa

SEQ ID NO: 270803 - DNA, 150 bp, Klebsiella pneumoniae
atgaaaaaatcacgattcaccgaagagcagattgtttttgccctgaaacaggctgaactggggacgtccgtgccggacgtctgtcacaaactgggtatttccgatgccacgttttatatctatggactacctccgttttgcaagtactga

SEQ ID NO: 270804 - DNA, 195 bp, Klebsiella pneumoniae
atgaaccattacgagaaaggaaggcacatcccggatatcgatacacttaagcgcatggccgatgaacttggagttccgataaactacttcttttgtgaaagcgaattgacggcagaattagccaagctgatagcaaacatgactgaaacagagcaagcagctctgattgctgagctcaacaaaaagcagccttag

SEQ ID NO: 270805 - DNA, 570 bp, Klebsiella pneumoniae
atgaagtctgcagtaaagttgcatccctatatttataatttattgatagaaaaggattttaaagatttcagtaccactcagctcagggatgcattgctgaaaattacggatgaatacagccaagtgagcgaagctaggaagttcatctatcgccagcttcttcgactagaagcactgggatttatatgtaaaattgacaatagggatgggcggcccaagaaattgtacaaaaaaacggcgctcttttattccgcgacattcacatcgggaaaaatacccaaaaactcacgccttcatacagtgccatcaacacttgactcagaagcagctgatgtcgatatctttttaaatggccttaaaaaggaaaagctaattcatgaggccaaactcgccgtcgtacttagcgaaatcgaggagtataagtctcttatggagcgctttccaactaagcgaacttatttgacaggcctatatcagcaggccaaaaatcagtctgctacattacttggtagagtgacggctttatcaaaagtacttggacaggatagcattgagaatcacatatgctga

SEQ ID NO: 270806 - DNA, 1389 bp, Klebsiella pneumoniae
atgctgagggaatggcagaatcagtgtgctgatgcagcactaaataaatatcaatcggggtcgccgcattttttatgtcttgcttgcccaggtgctggcaaaactgtaatggctgctgaggttgcaaagcgaatgcgagaactcgatctagtagatatcattatatgctttgccccttcaacagcagtggtttcatctataaaaagcacattctcatatgttttaaaaagtaatttttgtggggggcttggatcagttggagctgcttacacgtatcataatctcatgtattttggtaatgaattctggaattctttacaaagacaccgattattagtgatatttgacgaaattcatcattgctccggtgattcacttgataatgccaatgtttggggtggggaaattcttactcacgttcaaaaatgtgcaacatatacattggcattaaccggaaccccatggcgaactgataatgtgccgatagtattatcaaattacaccaatccggatggtgagatctgctgcgactacatctacggcttgcatgaagccattatcgataatgtttgccgcaagcctaagattgcgcttatcaatagcgatagtttagttttttgttcagatacggctaccaaaagtttcggatctgtctcagaattgttgagcgaaaatttaatttcctaccaatcaatattttcgcaccccgaagcaatgaagtatgttattaaagccgggtgcgaaaaacttcgcgaaatcagacaggttaactctgatgcagggggattggtagttgcttcttcagttgaacacgcgtaccaacttctggctattctggaaaatgaatttgcacaaaccgcaacgattgtgacatatcaggataaagaagcactttcaaaaatagggtatttccggcaaggaactaccgaatggatcgttagtgtcggcatgataagtgagggtgcagatattcctcggcttcaggtctgctgccatctgagtactgttaaaactgaactttactttagacaggtgcttggccgaattcttcgtgttaatcaaagaaaaaatcaggaagcttggttattcacgatagctacaaaagaattaacattatactctgagcggttagttacggatttgcctgaagattataacattttgcaggaaatacgtaaatcggcatcaattaatataggtgttaatttatttgacttattagaagtaaagcagaataatgatatgaataaagagggtgatttttctcttaaaatggattttaatgaaggtcagcaatcaatcttcactgtgaaagaaaaaactaatagattgaagataaattcgttttatcaaaaagttattgatgcatttgtgtatcctaatggatga

SEQ ID NO: 270807 - DNA, 336 bp, Klebsiella pneumoniae
atgaaaaatattgatatttatttttctgctttagaacgcttaataaaaaatgttcccgtaaatgttcctttaggtacaaaaataagttatgacgctgtttcactagaggcaggaaaatctaagggtagtataaaaaaatccagaccaattttcaccgacttaattaaaaaaattgatagctataaaaaaagaggaaaagacactgatctacttgatataaaaagactccgtcttgaaaatttagaactaaaaaatcagcttgataagtctctttcaagagaaatatgtttaatcatcgaacttcaggaattaaagaaatgtaaacaacacacataa

SEQ ID NO: 270808 - DNA, 1971 bp, Klebsiella pneumoniae
atgaaaactaacaaggttctttccgctaatatttttcttacagaaaaaatgtccccacctgatcctgtttatctgccggataaacataccccattaccatcccatgttataagccgaagtatttatggggaggttatttcaatatactctgacgatgagtgggattttagttgttacgataaaaaaaatcgcccttgtctactttcattcaaacattgggctaaaggtgagacaggagatcttatagacaatatgatttctagtttgaaaaagttaatttttgcttacatctggtacagaaatggaaaggcatatcaggttaagaatatatctaatcttggctctacattaaatactttagccagatactgtactgaattaaatataaccatcccggaattattaatatctaaacagcatcttaataactgtttaatgtccttgaaacctggaacaatgtatgatgttaggagatttttattggctttcaatgatgttgacaatgaaaacaagccatttgaattttgtgatataaaaaaactgaccgagatgaatatcactttaataaattacaggaataatctaaagcaattcccaccaatcccgccaagaatttatctctcatatattaatagcattacctcagacataaaagtactatttgaaaatattgatattcttttacagttcatgctagaaataaaatctaaatacgatgaaacatgtaagctttcacacaattctagatatattcacactcctacagagtacaatattgccaacattacaagaaaatataacctggagtttatatttgactattttggtgccaatgcaaatatcaaaggaatattatatctaataaatagcatattatttagatgccgattagcaatccaagttttcacgggtatgagaatagatgaagcaacaaatttacatattaactgcggacaaatctaccataaaaatggtcagaatcattacattataaatggtagaacgaccaaactatcggaaagagaggctaaatgggttactaatgaagttggctataatgccacatgcatttccagtaaaataagtctctttattgttaatcaaatagaagatttttcatatgaagttcacaacctccctctttttgtgcgtacatcttatttaggtatagcaagaaccgcacctagaatagaaaactcaataatattacctgctgagttagcaccaaaagatgaaatgaagaaaatttcatggctaaatgttatgataacaaaagaggacatcgctgaactaaagaaaatcgacccgtttagagcttgggaagctgaatctaaatttgatatcgggcaatactggcctctgcagacacatcaatttagacgttctcttgcattatatgcttcaagatctggattagtatcattaacttcattacgcaggcaattacaacacttatcaactcaaatgactctttactactctcgcggaagcgcatttgcacaggatttagtttcgaatgacaagtctcactttgctgcagaataccaagaaatacaaaattatactcaggcactggattacgttgatttaatcttactatctgataataagttatttggtacacaaggaaggataattgaaaataacattaaaaataatatatccattgataagaaagagactgtgagattatttaaactaggtcagttggcatacactgaaacttgtcttggcgggtgtacaacattagaagtatgtacacaacgttcaacgcgttccttagttagttgcttaagttgtgaaaacgctattattaaaaaagacaagcttgagttagtaattcaagcacaaactaaattattagaaaaagttgatgtaaattctttaacttatagaacagaaaaacaagatcttcaattgcttgaaaaatacctaaacgtatataactcaaaatcaggagacattaaatga

SEQ ID NO: 270809 - DNA, 633 bp, Klebsiella pneumoniae
atgcttgacctaggctatacgaaaggtttaattgttgcacgagaatggagatgtttgaaagctgaatggctaattaacaatgcagacccgtctgttgcagcgaaacttttacaaaatactgaatcgacaatattgaatcattattcttctggaacgtttactaagcaaacagaggaccttagtgactttctaaccaaattgtccaatgtaattacgggcacagaggctccacataaaacattaacctctgtcggtgggtgcaaagacgttgataacccgacgagtatttctggcgagttggcatttaaatcagattgtaagcaaccagagggttgcttattttgcgctaacttcttaatacatgcagatgaaaatgatttacgaaagattcttagctgtaaatattgcattgagaatactcaaggtttatctagaacctatgatgactggcataatatttatgatcctgttttgatacgaattgatgaaatagttaactgcatagccgaaattaatatccatttagtagataagattaaacatgaagtgtatacacagggaaatcttgactcatattgggaaggcaaattagaaatgctagtaaacattggggcaattacaaatgaaaactaa

SEQ ID NO: 270810 - DNA, 1248 bp, Klebsiella pneumoniae
atgaatagcagactcagcgaacattttatttttgcagcaggaaaatcgttgagtgcggttgatgctgtaccctccagatctaatcagcatgagataggaggattggttagagtaggctttggagaagcaataggtggcattccatctggggaaaagctacagatcccatgtttgatggtttggttatctgatgatgacagtcatctgataagcacaacagtaacttggtatgatgcaagagctggtaaagcgcaccgtgcccctgaataccgactttactatccaggtaacgaagtaacggaacggatcggggaaggcgattttctactaactgctcttcggcataacaacgagttggtaatctgttttgctcccaaagatagccaagtcgaatggcaactgcggtcgttattcgggcttgcttcaagtaatattgcagatcatcatttccatggtgccgagttatccgataaaacgttgttgctacctataagaatttttcttgaagaaattgggattatcttcgagcctgaaccagatccccgagatgcaactttggagtggttgctttctcgatatcccgatggttttcctacctccaaagttttttcagaattggcacgtgagcgagttggtcgctattctgttggtgcacccgatgaaacactcatggcctggctggaagaagaagagatgctatttcgtgtgatggaaaggcatattgtcaggcagcaacttcaggctggattcggagctgagaaagatgatgttgatgctttcattcaatattctttgagtgttcataatcgtcgcaagagtcgtgtcggtttcgcatttgagaatcatctcgaaactgtatttatggaacatggcctagtttttgaaaaaggcagtcgctgtaatgttactgagaataattcaaaacctgattttttatttccttcattttcagcctaccataaccaagagtatactcaaaacaagctgatccttctcgccgctaaaactacatgcaaagaccgctggcgtcaggttttagcagaggctgctcgtattccaaaaaaacatctgatcacgttacaatcattaataagtactaaccaattagaggaaatgagatatcaccaattacagttggtgattccatctcctgtacttgcgctttactcccctgacagtcagggtttcttaatgccactatcggaatttattggtgtcgtcaaaggggtaatgctgccaacttactga

SEQ ID NO: 270811 - DNA, 1440 bp, Klebsiella pneumoniae
atgaaagagttacaacctgtgattaatgaacttattcaacaatcactgggcgcagatcagcttaaacaaaaagaagaattgtgtcttttgaaaaaagttctggagatctatgaccaaaaggttgtggcagaagtgttacgagcagtgagtggcagtgactggactcgtgaaactatcaatcgctgggtgaatggcaagttaacaaataagcgattggttgatgtcgagattaagatgcttaagagtcttttaccgtcaccgccagcgcattataatcaaagtcgttttcgttttgtcgacctctttgctggtattggcgggattcgtagtggttttgaggccatcggtggaaaatgcgtatttaccagtgagtggaatgagtatgccgttagaacttataaagctaattggtactgtgatgaaaatgatcatatttttaactcagatattagagatgtcaccctgagtaatcaggatgatatcactgaagaacaagcttacacccatattgacaaaagtattcctgatcatgatgtcctgttggcaggctttccttgccaacccttcagcctagcaggtgtcagtaaaaagaattctttaggacgtaaacacgggtttgaatgcgatacgcagggaacactcttttttgatgttgcccgcattatcatggcaaaacagcctgctgtttttgtcctagaaaatgtgaagaacctgaagagtcacgataaaggtaaaaccttccgtgtcatcatggataccttaaatgaactagggtatgaagttgcagatgctgattctatgggggcagatgatcctaaaattattgatgggaaaaatttccttcctcaacatcgcgaacgtattgtattagtgggatttaggcgtgatttaaatctcgctgaaggtttcactcttagggacattgtcaaagaattcccacaacggcgactggcagttaaagatttgctcgataaggaagttaatgacaagtacatattgacgccaaaactctgggattatctttataagtatgctaaaaagcataaagaaaaagggaacggatttggatttgggcttgtaaatactctagataaaacaatgaattgcaggactcttagtgctaggtatcacaaagatggatctgaaattctaattgaccgtgggtgggatatgagcattggagaaaaggaatttaatgatcttgaaaatatggctcgtcgtccacgtaggttgacccctagagaatgtgctcgactaatggggtttgagcagcctggaaaagaaacttttcggatccccgtatctgacacccaagcatatcgacagtttggaaactcagtcattgtaccggtttttgctgcagtggcacgtttactagattcaagaattgcacgcgctgttgaaatccgaaaatcaaagaaactaagcaatgcaagttga

SEQ ID NO: 270812 - DNA, 162 bp, Klebsiella pneumoniae
atggggccagtctacttgtcatccgtggactccgtcattatgaatctcagctttaactggcgcagcaaacagcagcatcaggcaaccgcatataagcgcgagagcgaacaggctgagaagattgccaaactcgaacgccgcctagttgagcgtgataaatag

SEQ ID NO: 270813 - DNA, 1392 bp, Klebsiella pneumoniae
ttggcttatcatcgtgcacacccgaaaacaaatgcgtcgataatttcgatgatacagaggtttgctgatatttctgttgttttttcaggtttaggctttgttgtctatttaaaccagaaaaacttagattatcagcatataataattgcactaattgcactggcttttttccaaatggttggtggtatcactgatttttatcgttcatggcgcggagttaaactatctactgaacttaagcatataatccagaactggacgttgagtttattattcacaacaggattactttatttcgtgtcaagtattcatgttggtggggtgattctacttgaatggtatttcataagttgtataggaatgataatttctagatgtgctatacgttattgcactggagtattaagacatttaggatataataccagaaatgttgcaatagcaggatcattaccgacgggattaggattattaaaagggttcaaagaagagtcatggcttgggtttaatgtcgtgggggtatatgacgaggttcatcctgagaatctagatggcttgccatatgttggaaactttgataagttaattaaagatgctaaatctggaaaacttgagcgtatatatctggcgacgaaaatgagtgattatgaaaaactaatgaaaattgtcactgagttaaccgatacgacatgttcagttagtctaattccagatattttaacatttaacattttacaatcaagaacggaagaaattaatggtgtccctgttgttcccctgtttgatacaccattgaatggaataaatatggtatttaaaagagtagaggacgtattcttctcgataattatccttttcctaatttcacctgttctggcagtaatcgcacttttaatcaaactaacctctccaggaccaattcttttcaagcagataagatatggtatggatgggaaggctataaaagtatggaagttccgttcaatgaaagtaatggagaatgatgatcgggtcattcaggcaactaaaaacgatacgagggtgacaaaagttggtgggtttttacgcaaaacttcattggatgaattacctcagttcattaatgtcttattcggttcaatgtcaatcgtagggcctagacctcatgcggttgctcacaacgaacaatatagaaaattgatacagggttatatgcttcgtcataaagtcaaacctggtattacaggattagctcaggttaatggctggcgaggtgaaactgatactttggataaaatggagaaaagaatcgaatacgatttagaatatattagaacctggaacattgttctggatattaaaataatatttttaacggtgtttaaaggttttataggtaaaactgcttattaa

SEQ ID NO: 270814 - DNA, 450 bp, Klebsiella pneumoniae
atgcaaatcagtaataacggcatcgcgctgattaagcgatttgagggttgcaggttaaccgcatacccagaccctggaaccggtggtgatccatggacgattggctacggctggacgggaaaagtagacggaaagcctatcaagccaggaatgaagattgacgacgcaacggcggatcgcctgctgcgcactggcgtggtgagctttgaccaggcggtaagcaaaatgctcaaagtaaccgtaacccagaaccagtacgacgcgcttgtgtcgctggcctacaacatcggtacgcgggcgctatccacctcaacgctgatgaagaggctgaatgcaggtgatgtgaaaggcgcagctgatgagttccttcgctggaaccggtcaggcggcaaggtaatggctgggttaacgaatcgccgcaaggcagaacgtgaggtatttctctcatga

SEQ ID NO: 270815 - DNA, 237 bp, Klebsiella pneumoniae
atgcacttcattagcgccctggcgaaaatggaaggagagctgatcgtcgaacgtacccgagccagtttagccgcagcgaaggagcaggggagagtcggcggccgccgtcgggtaatgactgaagaagtggtggacagatgccgcagaatgctgggtacgggcgcaatccggcagcaggtagccgatgtgataggggtgaatgttaagacgctatataagcacctgccagcctcttaa

SEQ ID NO: 270816 - DNA, 549 bp, Klebsiella pneumoniae
atgactgatatcaccgaactgacaccagaagctgcccgagagtcggggagtattttgattatcgtcgctgcacgcatggctcgccgagagttttttacaccactgcataccctgtgtgaatccggtaagcgtgtcgtcagtaccagggaattgcgctgtgctgtagagcgtgcagaagagcatatggttagccaggtaccgaaaatcgttgatggtcacgacaggttgaccaaaaaactgaaagaggctgaatcccgaaatgctgatctggtagaggcgctggagaaggcgcaggccaaagcagatgtatacgacatgcttcgggatgactacggtttgcgcgaaaaaggtgttggacttgcagacttcgttgactggcaggctaagcgcatcgccgagttggattcccgagcagtgaagcttcctcagcgtcacagcatgcttcttcgcgaaggcttcaatgaggattatcacactgaaatggcctacaaagcaggtgaagtacaggcatcgctggctgcagttggcatcaaggtggaggttgagtga

SEQ ID NO: 270817 - DNA, 549 bp, Klebsiella pneumoniae
atgctaagtcaggaatttttagaaagatgtgtttaccctgcagtaaagcatgaagccgcacactggttggctgcgtacctgtatgggtggggtccaagagttattgggataaggatcccagagtcagaaaatactcaccatagctatgttcaggtgagtcatgcagtaaaaatgacttcaatcgaagatgtcattgattacacgagaaaaagattagtaattctttatgctggaatgtacgctcagcattcggatggccgttcattcgacagtcaagccatttcagattgtgttaaacctgatgggggatcttattccgacttctggaaggcagaggaaatttacttcttttattacaactgtttgcaaaaccctcagggatgggagattgagttcagaccaatagtttctgaagtaaaaaaaatggttataactaactattggtttcttgaaaaggttgcaaaggaaattggtcatcgcgcaacacatattggacaagaaatttttgttcaacccgaagagttgattgaaatgtatgaaaataaataa

SEQ ID NO: 270818 - DNA, 228 bp, Klebsiella pneumoniae
atgacaacaaccgagctggaggcctattttggctccccaattcaggcatcaaatttttttgggctctcgcctgaagccttttatcaatggcgtaagcgtccgggtggattaattcccaaaggccgggcagcggaagctgcttatcgaacaaatggtgagttggtttatcgccctgagctttacgagaagactagcaaccgtaatcgaatgactaaaccacagaaataa

SEQ ID NO: 270819 - DNA, 645 bp, Klebsiella pneumoniae
gtgaacacttttggatcacggcttcagagcctacggaaggaccgaaaactaactcagaaacagcttgggaaaatagtgggcgtaagtgatgtaaccgtaggctactgggaaaagaatcaaaatacgcccggaggggtatccctaactaaactggctcgctatttcggggtttctgaagatttccttttaaccggaaaagatcaggtatctaacgtcgctccatcctttggtggagggatgcaggtgcccgttatcagttgggttcaagctggatcatggacatcagaaagtgacgcacgcaatttggaaggtgctgtggattacgttctaacaacggggcgtcattctttagggacgtttgcgctcaaggtccgcggtaagtcaatggagccggaatttaaagaaggagatacgcttatcgttgatcctgagctttgcccctctcctggagatttcgttatagccaaaaatggcagtgagtacgctacgttcaaaaaataccgctcccggggcgttaatgaaaatggtgaagacgtttttgagcttgtcccattgaatcctgattttgccactttgaactctcttaacgagaagattttaatcattggtgtagtgatcgagcatcgccgccaaatgcgtaagtaa

SEQ ID NO: 270820 - DNA, 585 bp, Klebsiella pneumoniae
atggattggaatgacttaatttcaaaagctgccatcgcaattattacaggtgttgttgctgcatttttctccgctagatatgctttagggcgctattacaaagaaaagtggtgggacaaacgattggatttatatttgcaattagtagaatgtattcatttattgaaaaaatacgcagattattggaatggccgtgcacaatcaagcaaggctgaatatccaacgggatttgaaataaaatcacaagaagaagagaaaaaattatcagaaatttttcatacagagttggaaaaccttagaagaattggtgacctatcccctctgttattaaatgaaaaatgtgagcaattgatagctgacttcttcgagaatgaagaaaatatttctctagcttgggaatatgatgcaattgagttttctgatgctacaaactcaagatatgaaaccctaaaatcaatgttaaacgatataatcacagaagcaaaaaaagaactcaaaacaaacaacagaaaattgaatataaaaattaacatttataaaacaaacaaaggtaatgagggtgatgatataaattattatgcctaa

SEQ ID NO: 270821 - DNA, 225 bp, Klebsiella pneumoniae
atgcattttgacttggattttagagctgctgagatctatcctgaagcaggatcggttgatcaatgcgtattactcattaaccatgatggggattatgtggttggaacgccgttcttcagcgaggatatgcaatttatttgcgttatgagtagcatgggcccaattcacccaaatgattatagtatgtgggcattgctgcccacaccggaagttagaattgattga

SEQ ID NO: 270822 - DNA, 915 bp, Klebsiella pneumoniae
atgctttacatgaaagaaaatggtgtattgatcaaactggacagctgggaacaggtttattcaagacccaatttcattaaagatttagacctcaaagaaaagaaattaaaagcacttattggctattacaaaaatgagcctcctcgtaaatgtggaatcaaaagctgtcatagcagccacatgaaagggggcatcgtgctgactgaagatgattttgaagcctctatcggccatatgtgtggtagtaagatttttgaagaaaaatttgacgatcttatcaagcaacttgagaaggaagtcgatttcgaaatctacaaagaagccgtagcgagccggaaagctcgtgtgttcgagtactggaacaaggcagctgcacttacttctggaaaaaatggtgttcttaagcttgctgaaaaaatcgcagctcttaaagacccattggttgctggacgattccctgtaatggaattaggccgtatggcagctaaccaacaaacaaaagtgaccaaagaaatctgggtagaaaaaaagaaaaaggaactcaccgaagaagaagcaaaaagcggtgagaaaaaatataaattagaaacagttgtctgtggtcagataaaaaatacagaagtcctgctatcagtcaatgatttaggtaaaatttttaaagaagatattgaatctgtgattcagggccttgaaaagttagacttacaaaaggctacagcaagacaaatccaaactataggacgggctgcttcagccctggatgtccgacttgaaactgcatctaggttaaaggctcttgcgacggattttttaacccgtgaaaatctttacccaatgtacgaaaaaatgttttcgatggatacgattagccggaaagaccttgaactgtacgaagagctaatcaatcaattctaa

SEQ ID NO: 270823 - DNA, 288 bp, Klebsiella pneumoniae
atgactgatataaccgagcttactagcgtacaaaaaaacgcaaatattcaccgtttatccaggctcattgcctacgcacctgacgatgaattgcggcaactggcttttgaagtagagctttacacgaatcggctcatagaagcgctggagaagatgcagcgtaccattaactcagctccagcaatattgcgccagcttgctgaagagaaacagaaacgcggcgaagtggcggcatctactgcatttaactacgcagcttcggcactgcaaaaggagttatcgaaatga

SEQ ID NO: 270824 - DNA, 372 bp, Klebsiella pneumoniae
atgatggttgctgacgaaggtggattaataaaagaagttaagattggcgagaaggaagtggttgattcaaccacatatctaattcctgcgctaacctctaaattagaggtggtgctcagtgaaaacaaaagggtggtaatcttattttcagaagaaacgaaagataaaaccgtgcgttatactgggggagctgatgaatcaggtatggtatacactataaagcttattaattttagtaatgtactcggtgaaggcgtcatggagcaaattccgttttttaaaagaaatgatactcaatattatatatctctatgggtgaatacgaatgctgataaaagcagagtattaactctaacacttactaaaggttaa

SEQ ID NO: 270825 - DNA, 471 bp, Klebsiella pneumoniae
gtgctggcgaccaaaattctcacccgcgaaaattacatcgttaccgtcccgaacgcggtggtggtgagcgggaaaattattaatctcagcgccgaaagcgccgacggtggagtcaacctcaccaccagcgtcaccatcggctacgatacgccgtggcgtcaggtccatgcgctgctggagctggcggcgagacgcaccccggggatcgatcagcaaattgccccggtggtgcgtaagctgggattgctcgactggtatacctcgtatgagctgcaggtgcgcttactccccacaaccaagctgccggatggccgcaacgcattgcatagcagcattattgatgtgtttaacgaattcggtgtgcagattatgtcgccgaactttgtgatgcagccaaaggcggcggtagtggtgccgcaggaagcctggtacgccgccccggccgtcgcgccgcagaagcctgagaaataa

SEQ ID NO: 270826 - DNA, 423 bp, Klebsiella pneumoniae
ttgtggttcaacaataccttcaggaacgtcactggaaatcagcgcagcttttactggaacagaaatacgcttgttcccttcgatgctggacgagagaactttaatggcttcagcagagataacctgctggccgacagtttcaataacctgttttgcgtttgccagcggcatctgtgcaacatgctgctccagttcgcccagcgcagtcttcagagtcttttcggcttctttcagcgcattaaactcagtcgccattttgtccacggtttctttggtttccgccgacaatttgccgttctttttcgcttcagtcagcgcttcttccgctttggcgttaaatttgccggttgcttcttcaatggaagcggtgacttttttcagaatctcgtttacatcagacataaatggtccttatttgactaa

SEQ ID NO: 270827 - DNA, 1272 bp, Klebsiella pneumoniae
atggaagctcaagcggttttaaaccaaatcgttaatgtagataatcagctaaatgaacttacatttagagaagctgaaatttctcaattgtttacgactgatcatccaacatacaaagcattgcttgaaaaaaagaagactttagcacaagaaaaagttaggctgaataaccaagttacatcgatgccaacgactcaacaggaaattttaaggttgagtagagatgttgaatccggtcgcgctgtctatatgcagttgctaaatagacagcaagaattaaatatttccaaatccagtacaattgggaatgttaggatcgttgattctgctattgctgaaccaaaaccagtaaagcctaaaaaaataatggttgtactgatcggattagtctttgggttgtttgtttcagtcggcatagtcttagctagaatgttcttacgccgtggaatagaatctcctgaagaactcgaagatatgggaattaatgtttatgcaagtgttccagtttcggagtggttaacgcagaagcattttaaaaatggaaaacgattggctgcaaaagatgtgttcaaagaggatcgtgaatcccttcttgcattggaaaatccagctgatcttgctattgaagcaataagaagtttaagaactagcttacattttgcaatgcttgaatctagcaataatatattaatgatatctggggctagcccaaatgcaggtaagtcttttattagtagcaatttgggggcaattgtcgctcagacaggaaagcgagtactcctcattgatgctgatatgagaaaaggttatattcataaagtattcggggtaagtaacagcaatggcatatcagaaatcttgtcagggaaatccacagtcggtagcgcgattttaaaaacacaattggataatcttgatatcattactagaggacaagttccgccaaatccttctgaactactaatgcatgagagattgaaattatttttagaatcagtttctaaagaatatgacttgattttagtagataccccgccaatattggctgttactgatgctgcgattatcggccaatatgtaggtacggtattacttgtggctagatttgaattaaatacagctaaagagatcgaaatttcaaaacggagatttgaacagagtggtattccagtaaaaggttgcatactcaatggtgtggtaaaaaaagcaagtagttattacggttatggttataaccattatggctattcatataatactgacaaaaaatag

SEQ ID NO: 270828 - DNA, 729 bp, Klebsiella pneumoniae
atggctgccactgcaaccagcgagattctggatgccaccactaactctatctccaacaatctgacaaacgtcctgacaggcgctgcttcttttaaagatgggatgtcaaatattttctcttccctgggcgaaacggtgattaagacgctgatccagatggcaacacaggcgttaatcaccaaagcgattatggcgtcatttggcggcggagcgggtgggttgttcggtagtctttttggcggtgccagcggtgcggcaagtagtggtaccgctattcaaagcgcgggagctaatttttcattcaacgctctcggaggcgtttacgattctccgtcactttctgcctacagcaatggtgtttacagcactccccaatattttgcgtttgcgaaaggggcaggtgtattcggggaggccgggccggaagccatcatgccccttacccgtggcgctgatggttcgctgggggtcagagctgttggacgggaatcaccggcggtacagaacgctgcgaagcagatccaggcacagccacgaattgctgtcagcgtagatgccagaagtacgttcaccggtaaaccggatgacataacgatgcaggcaattgagcgaaggaatgacgctctggaacagcggatagttaacaccttaaccgccgaagtaaataacccccagaagaaattcggtcgggctatttattcaaatctccaatctaaaaaaccacgataa

SEQ ID NO: 270829 - DNA, 405 bp, Klebsiella pneumoniae
atgttctatatcaaagcgatcgctttcgaccagtaccgtattaagtatcttgagccggagctggaggaggctaacgtatctgtccctctgatacctcacggccagggctactataaagcgcaggagtccgggttgtggatgcctcattctattgagttattcgagcaacgcctggatgacggcgaaatcattattaaaaccaatccctgccttcgatggaatgcagcttccgctgttaccgaagcagaccagaaggaaaaccgcatatttgccaagaaaaagagcacgggccgaattgatggtgtggtggcgtcggctatggcaattggtgctgcagaaggttttgagcctgatgatggcgatatagagggcttttttgacgatccgatcatagtaggtatctga

SEQ ID NO: 270830 - DNA, 450 bp, Klebsiella pneumoniae
gtgaaatatggctttgttgctgagcgcattgctgatctttccatgatgttcgatatcaaggcgatcgccttcgaccagtaccgcataaaatatcttgagccggaattagagagcgcttctgtatcagtaccgctgatacctcacgggcagggatactacaaggcgcaggattccggactgtggatgcctcattccatcgaactttttgaacagatgctcgatgatggcgtaatcattattaaaacaaacccctgcctccgatggaacgctgcttccgccgtaaccgaagccgaccaaaaagaaaaccgcatattcgccaagaaaaagagtactggtcgaatagacggtgtggttgcgtcggcgatggcaattggtgctgcagaaggttatgagcctgatgatggcgatatagagggcttttttgacgatccgatcatagtgggtatctga

SEQ ID NO: 270831 - DNA, 327 bp, Klebsiella pneumoniae
atgttagaacttgacgtggttaaagagcactgtcgcattgagcctgactctaccgatgacgactcactattgaccctatacatcgtagctgcttctcgttatgtcgaaacatggactcgtcgcaaaatgtatgagtccgaaaccagcgaggggtatgcagatgatcctgattcaattctccctggcgatgatgtgaaagcagcgatgcttctgcttatcggtcactggtacgaaaaccgtgaaactgtctctgttggtcaggctgctacagatattccgtttactgtcgaggcacttctccagccttacaaaatttatggtatttaa

SEQ ID NO: 270832 - DNA, 546 bp, Klebsiella pneumoniae
  misc_feature (167)..(187): n is a, c, g, or t
atgtcacggaaaggtaggccggcgcaagcgcagcgccgcccggcaatgaacatccggcgccaggcgcctgtttttgcccggtggcggctgcgccttaccgggcctacgaactgcgacaaatgtcacggaaaggtaggccggcgcaagcgcagcgccgcccggcaatnnnnnnnnnnnnnnnnnnnnngtaggccggcgcaagcgcagcgccgcccggcaatgggcatccggcgccaggcgcctgtttttgcccggtggcggctgcgccttaccgggcctacgaactgcgacaaatgtcacggaaacgtaggccggcgcaagcgcagcgccgcccggcaatgggcatccggtgcctggcgcctgttttgcccggtggcggctgcgccttaccgggcctacgaactgcgacaaatgtcacggaaacgtaggccggcgcaagcgcagcgccgcccggcaatgggcatccggcgccaggcgcctgttttgcccggtggcggctgcgccttaccgggcctacgagctgcgacaaatgtcacggaaacgtag

SEQ ID NO: 270833 - DNA, 297 bp, Klebsiella pneumoniae
atgaaattcacccttattcgtaacaagaccaatccgaaatcgtattgctggaactcgatatcggagatgaaattctctttaaaagtcagttctttgatagcttcattgacgccattagaaacctggaaaactttcacttggggctttcttcaataccggtggttgacgaacatggcgatcttctccgccctcacaaacccaaccccaatacccctcactccctacttatgcgcgtcactcagacagctgatcagcgttggcggtgtgagctatgcacccttgaaggtggctctctaa

SEQ ID NO: 270834 - DNA, 969 bp, Klebsiella pneumoniae
gtgattaagtccccagtcaaatgggccggcggcaaaacccgcgtgatgccgcggctgctgaagctcctgccgaaagccgattgcctgattgagccattcgtcggcagcggtaccgtatttatgaatacggattaccgccgctatgttctctgcgacagcaatcgtgcgctgatcaacttctttcgcgtgctgacctccgatactgagcggctgattagcactgcacgcggaatgttcctgggtggcaataacgaagaacggtattacagccgcagagagctatttaattcgatgcagtggagtgacacgggtaagcccgataccgccttgctgtatgccgctttgttcctgtatctgaatcgccatagctttaacggggtatatcgcgtcaatcagaagggtgaacataacgtcccgtttgggaaatacgcagcaccttactttccggctgatgagatgcgccgctttgccgaaaaggccaacgacacaaacgcgattttccaatgtggtgattttcgtcacaccatccctgacgtcacgccactggcatatgacgcagttatttactgcgaccccccctacgtcccggccagcaaaaccgccaacttcaccgcctacggcaagccctttaccctggacgatcatcgcgccctggttgcaaccctgctcgatgctcatcgccagcatggcgcctgctcggttatcttaaacagcgatacggcggaaacccgcgagatctattccgctttcagtctccacgccttcagcgttcgccgttccgttagtgccaaaagccgcgatatggccggtgaagtgatcggcgttcttcgcggcgatgtgggctgcaaccctggcgcatgtggagcttggacgagcaccactgaacacctgcggccggcggcgacgtggatcgggtttgacccggccgccggattcgataacggggagccatctgatgaacacgcttga

SEQ ID NO: 270835 - DNA, 897 bp, Klebsiella pneumoniae
atgaccttatcggattcaatcagtgccacttcttcgccgggatcggcggatggtcgcttgccttgcgtcgcgcaggatggccagacagtcgcccggcatggacagcatcatgcccctgccagcctttcagcgcggcaggcaaagggcttgggtttgctgacgagcggcacctatggccctccgcacattggcttgtcggccagcgccgccctgtcgtggtctttggcgagcaatctggcagcgctgacgcgaatgactggatcgaccttgtacaagctgacgtggaagccctgggctatgccttcggggcggttgcgtttccgtctgcgagcgtcggcgcgccgcaccagagagaccgtgcttattgggtggccggcgccgattgccagcaatgggagaggcgcggggaatttcaaccgacaaggggggggtaaaccttcagacagcagcgttattagctggctgtcccacaccgacagcaacggacgggaagggcggttatcagggcggacggatccgcaatgggaagctatcgacggacaggctcgacgtggctgcgcagcctacgggctggccgacgccaaccacgagcaacgaccgttcaccatgcccgcaggaagctatgcagacgtatcgcgacaatggaacaaagattcagaagaggcttcaggatgtagcggcgttatgcggccaggcccggttaacggtttctggcgagatgctgactggcttcactgccgggatggaaagtggcggccagttagacccggatcatccccgttggctgatggggttcccaccagagtgggaagactgcgcgcctatggaaacgccatcaacattgaagcggcggcagcgttcataaaatcctatatggcagcggtggatcatgtctga

SEQ ID NO: 270836 - DNA, 2184 bp, Klebsiella pneumoniae
atggccagaattccagaatcctcattgtgggaagaagagattgagctgatttccagaagcgagcgtgtttctggggggctggacggcgtggcaaacaggccactaaaaagcctggcaaatcgcacgcgctggcttaaagaaaaagtcgataaatcagaagagagtgccgctgaaaaagtcagtgcggtaaagacctttgcggaaggtgccacgctggaatcgccacgcgaagagatactgtatggcgcataccgcctcgtctggacgggtgagtttccgaaaacggttttagctggtagcacaccgcagggaacaggcggggttggtgctggccgttgggcctatacatcagatgctgttatccgcaaggatttgggttcaagcgagccaggcatgggggctggcatttccaacacaacgctcgatattacggtacagaaatatattgataattcttctccgagaatctctgattacaaagtcacaaaaggcgctgatgcgactctggcttttgcgaaagcatttgctaaagcagcagaaacaacaggttttgttattgttgatgtcagttgtattctgccgacagctgctccccctgaaaatattacggtgcgaatcagcgactatgtgacggtcactcacccggaaaacgcaccggcgtccatgtttattttatcctccggctcggtaatcaagggaaataataaaaaaggtcgcctgaggggtaactccgcgaatcagtcatcgatacgccgctgtatcagtgctataggcgtgacggacgccggtgtcgatggcgtcgatattcgcgatttcaacagctacggcgcgtattttgaaaactgcgaagataccttctgcagaaggtcaaccatacgtgatattaccggcggcccggtcgaaactgccgcggggcagtacattacaaactgcattagtcatgagtcagaacgtaacgacatcagggataccggaagcaacggcattaagttcagggccgacaccggtggtctgacacgggcctgtagctcatcgcacgacaaagtataccgggctggatttattggaattgctcacggaaaggtgcaggaccacacgacaagttatgcgtactgcgaaaactgtgttgataacggtctggatatgaatggttgtcagaactgcactttcagtaattgcacttcagttgggtgtcaggatggcttctatatgggagaaaatggaattaataattgccatatcgttaattgtgcagccagaaactgcaggcgctcaggagttggcagccttggctcccttgtcatgtgttcggtaattaacccatcaattgatggttgcggagctggtatttactgctctggttttaacgtgttcaaaatacgcggcggcatgattatgaactgcgttaaaagagtttacgttgataacgaggataaaaataacccgaacaaaatgagtactggtatcgggattgatattcagtctgacctttccgggctacctgcctgtaccacgcctgatattgagggggtgactttcctgaataacgcagggcatgacatcgcttttgggggcggccggctccagtcgatcgccgttactgccggggggagtggctacacctctgcgccaacggtgaccatttcaggtggtggcggaaccggggctttagcgacagctaccgtttctggcggatcagtgacaaaaatatctgtgctgtataagggctttggctatacatcagcaccaacggtaaccatttcaggtggtggcggcagtggtgcgacggcgacagcgacggtgagcagcggcggcgtaataggccagctccagcttgggcgatgcacattcaaggacagcggtggagacggcaaaatatactacggtaccgcaactctcgcagacagccagataggtaacagcatggggtatatcgtctccagaacgcagacgtacaatctggctggcgatggtacgaccattgagtttacgctttcactgcccgaagaagtcactgacgcaaattatcgcattatctcggtggttcctgactggctaacaacggtcagatatttagataataccaaaggcacttcatatttcggcgtcacgtttggcagcgctccaccggctggaacgcgccgtctgaatgtcacgtttgaacgtctgcgcccggcgcattga

SEQ ID NO: 270837 - DNA, 195 bp, Klebsiella pneumoniae
atgacaactaaaaaatttattgaactggaggtgggggacgttatcgttcccgttccgggagtggaaataaccgtgacgtctgcgcccatcctgaccagaacagatgacggagagaattacaccctgaaaggggtgcgggatggtaatgaagttggtctggcggggttctccagttctgctattgaagtcaaataa

SEQ ID NO: 270838 - DNA, 729 bp, Klebsiella pneumoniae
gtgctggcaacggtagaggatgtgattaatgccggtaacaacgctaaagactatgccgatgagcagctgagcgagcacgctgcgtcacgacaccaccccgatgcgacgctcaacgaaaaaggatttacccaactcagcaacgccattaacagcgatagtcaggagcgggcagccacgccacttgctgtaaagctggcagttgagtctgccatccgttcagcgtgggaactagacaaccctgtcggcacggtgaagttttacgcgcagaatatcaacccgaatgacagctacccctggacggagtgggtttatactggcgaggataaaacgatccgcgtcggcaaggctgacggttcagatgtcggcacgaccggcggtagcgataccgtcacactccagaaggccaaccttcccgccgtgcagattgacgtgaccggtgaaaccagcgagcagcccgagcagacgctgaccacgacacccgcaggaaagcacaaacacggcggcgtgccgagccgggaaaatccgtgggagatcggcggcgatatcagccagcgatttaacccggcgaatctgggcgaaacggatgaggccgacgaccatcagcacgaagttgtgcaaccgccgcacaagcacacaactagcggcaaaaccgccaatctcggcgagggtaaatcgttcagcgtggtagaggcacacatcctgctgatgtgctgggcgagggtggcatag

SEQ ID NO: 270839 - DNA, 321 bp, Klebsiella pneumoniae; identical to SEQ ID NO: 161841

SEQ ID NO: 270840 - DNA, 423 bp, Klebsiella pneumoniae; identical to SEQ ID NO: 183975

SEQ ID NO: 270841 - DNA, 1755 bp, Klebsiella pneumoniae
atgctgataaggggcaaacagggtatagaagatgtgatcccgcagacgcaccgggatcattttggcgttataggtctggttttgcttcagactgaacacctgcgaagtcccggacttcgccgcaatctggtacggcgcggtatggaacagcttgtagccggtgccgttgggcagattcgccatcccatacatgccgttgcgcacaatgccccagtacggggattttggatcgcccacctgcggcaggttcgccggctgctgatagcgttccacatgattgccctgcttcatcgaatagagcagatgcgggtcctgcaccttaccgttgttcagcagcgtggtgagcgctttcaccatctggatgggggtggcgatccagtatccctggccaataccgacggagatggtatccccctggtaccagggctttttatgcactcgctgtttccactcccggctgggcagcaccccgctatactcctcattgagatcgatgccggtggactggccgtagccgaatttgctcagccactcatggatccggtcgatgcccatctcgaaggcaacctggtagaaaaaggtgtccgccgactcttcaatggctttggtcacgttgagcatgccgtggccggttttcagccagtcgcggtagcgacgctgcgtgcccggcagggtccacgtcggcgccccgaagaaggtggtgttcggcgtgatcacaccggcggagagcgccgacagcgccatatagggcttcaccgtcgaggccgggggatacagcccctgggtgacgcggttgatcagcggccggtccgggttatccagcagcgatttataggcctgatagccgatacctttgacgaacgggttaggatcatagctggggctggagaccatcgccagcaccccgccatcccggggatcgaccaccaccaccgccgcgcgctgccccttcagtaccgactcaatatactgctgcaggtgcaggtcaagggtcaggtagaggtttttcccggccaccggcggtacttctttcaacagacgcaccacccggccgtggttgtccacttccacctcctggtagccggtggtgccgtggagcgctttttcgtaataaccctcgatcccctgcttgccgatattgtggtcggcagcatagttctcctcttcgccatctttcgccagccgctgcaggtcgctgtcgttgattttcgacacatagcccaccacgtgcgccagctctgcgccgtaggggtattcacgctgctgatagctctccaccgtcaccccggggaaacggaattcgttgaccgcgaagcgggccacctccacgtcgctgaggtcggatttgagggtaaccgctttatagcggctgctgtggtgcatatcgtcgcggaagctggcgatgtcgtccggcgtcaggtcgacaatcggcgtcagggtttgcagcagcgcggccatatcgggaattttgctcgggatcacctgcaggcgatacagggtaatattctgcaccagcggtatgccgttgcgatcgaatatcagcccgcggctgggggcgatgggcagcattttaatatcgttttggttggagcgggtctggtagaaatcgtgctgctccacctgcagatggtagaggttgaaaatcagcacgccaaagcagaccaccaccagcagaaaggcgattgcggcccggcggataaacagcatctcttccgcggagtggtcgcgaatttcatctctcaaaaggggcattag

SEQ ID NO: 270842 - DNA, 858 bp, Klebsiella pneumoniae
gtgtttaaacttaaaagaccaatatttacttatggtaatgcattaactctatgttgtaatggaattactgggaataatgatttactagaaaaatttcataaagcttcaactgatttggagttacaagtaagttcttatgaaaattcagcattaactgaagagcttttcacaattcaacctatcaaaatggatggtgttgcagatcctgtaatattaaaaggtttgaaaaaatctgatttcataaaattatatacactttatttggtcggaatgacgaagccagcaagagaaatttatgatgtacttatggcttcagctaatgaaagatgtccgttttgtggtggaatagggcgtccaaggaacctagaccattacttaccaaaggcatattttccacagtttgccattgcaccgatgaatcttgttccatcctgtcgggattgtaatatggatggtaagggagaagattttgccacgtcagctggtgagcaaatacttcatccttatttagataatgatcgctattttaatgatcaatggatttttgcgcgatacttagcgggtgcccaaggtgaacctggggtaattgaatattttgtttctcctcctgttgaatgggacgcaaatcaaaaagagcgagtcataaagcattttaatgattttaatctgtcgttaagatattcgaaggaagcaagcgcaagacttggtactttattatctcaatatgatggattgcttaaaataacattggataaagaaacatcgaagcaaattatatttcagacagttatagacaatgcggcatttatcaatcattgggaaagggttatgtgtttggcacttatgagagatctttag

SEQ ID NO: 270843 - DNA, 1524 bp, Klebsiella pneumoniae
atgaacattttaatcatccctcgagagcaaagaatcccttattcaggggtaaacacagcttatctacatgttgatcgctgggatgattactctttcataacaatgttttatttgtctttacatgatgaatcaggaaatttgcatgaaattggaaatgtaaaaattggatttcaaggtcaagttattggaaagccaacacatacaaccctagggcatgcatttcaggctttaccaaatggatatttttcagttggtcaagacgtggaatattatcaaaaaatatttaatctttccgattctataaaaaataaaattcttgaatcattaaaggatatagcttattcatcagaggccatggcattagctgagaccgaagctgtttttaaaacatctcttcttagagatgttagtttgtcagttatcaaaggtcagtttactagggttattgaaggaaagaatccattaacaaactttgaatttaaattcatgaggcctgctacggaaaaaatttcaggcattgagttaatgtttaaagttgaaatagatgaaaaacccagtacaaatattcatgcgataataggtaggaatggagtcggtaaaacaacccttctaaatggaatgattgaggcagttaccagcagaggacattcaaattcaaaattttatgatgttgagggtttttctgaaagtccaatcggaaaagattattttagtagtttagtttcagtctctttcagtgcttttgatcctttcgaacccccgactgaacaagatgatccttcaatgggaacatgttacttctatataggtttaaaaaaagcaggtgaagttcttaaggggcttaatgatattcatgaagattttattcaagcattaaagcaatgttttagccaaggccctaaaaaaaagaggtgggtaagcgcaattgatacccttgaatctgatgagaattttgaaagtatggatcttaaagatcttgtgcggtttaccggtgcagatttagttaataatgctcgaaagctaataaagaaaatgagttcaggacatgctattgttctattaaccatcacacgattagttgctactgtagaggaaaaaacattagttctaatcgatgaacctgaaagccatctacaccctccattgctttcagcttttattcgagcgctatcagatttgttacttgaccgcaatggcgtagctctcatcgcaacacattcaccagtagtccttcaggaagtgcctagaagttgtgtttggaagctcaatcgttctcgattagtaacagtggtgcgtagaccagatatagaaacgtttggtgaaaatgttggggttttaacgagagaagtttttggtctagaagtagtgaagtcgggttttcatgatttattaacaaaatctgttgaatcaggtcaatcttatcaagatataattaatgaatataaaggtcagcttggggttgaagcaagggcactattaaaagctttagtgatccaccgggataggggggcaactagtgtttaa

SEQ ID NO: 270844 - DNA, 1551 bp, Klebsiella pneumoniae
atgacctcttttcatcgtgaccaactcactgagatcattaaaagaatccctgactggaatgatggctgggctaaatctgttgtcatcaattggggttcacggacaggttgggttcgtacagacgaaaagccagatataatcttagatcttcctgtaaacgaaattatcccaaaagtaaaagagatacttaaacgagaggatgacagctttactagtacgcaaccatttatcggattgataaaagaaaacccgcgtaaggcattgtctgcactcgctattgcagggagacggggtgattaccctaaggaattttggtcaccaatgataagtgaattacctaaagatcttaaaccaaggttgagacgagtattcctgaaccgaattgtgcggttgccagttacagctttggtcgagttacgacataaattaagtaactggcttgaagaaaatttagctgagactcttgaatttgatgaggatctcgggtgggcagtttacgatcatgtcatagaagggatacttagtggtggggctaatgcaacacaaagtagtttcggggaagttatccgaaatggagaggttgtaatacagtctcggcgaacatacagccatgcaatcaatggtcctgtaggtaaatgtactcaagcactttttaaagcaataccaagtgaagaacaaaaagctggttcgcttattccgtattctattaagtgtcgtattgaacatcttttcactgcaccaggagaaggttcggatcacgctatagctataacgacacgcaatctaaattggttaatgtttgttgatcctgcatgggtaaaggaatggcttatacccattttggatttaaaacatcctagagcagaacctgcatggaatggttatcttcattgcgatactatgccttcgattgcagttgctgaatttattaaaccttattttcttaatcttataccctggatcgaacatctttcttgggaaaaagatttttcagttagagcttcgcaatggctaggtttaatgagaatgttccacccagatgagccttccagcccttccaggactgaaatgcgctccatattgcgagcactatctgacgacgctcgaaatcgttttatttcctgtttaggattggtcggtcagaaaaacgcaaatggctgggttaagtatgtgattccattaataagagacgactggcctaaagaacgccaatataggacaacgaactctgtaaaagcatggattggcctacttgatgatactggtgataacttttctgctgtttacgatgcagtaaaaacacacttagtgccaatcgatacaattgatcacttgttctaccgattcactcgggatattggtggcaatcgagcaattgcagctatttttccagatactacacttgatttaatggacaaaataacccccaaaatattcactcgtacatcaggagagctgcagaagattcttgagctaattgaagatacagatataagtctgaccaaggattcacggtacttacggcttattgcactggttgagaaaaattag

SEQ ID NO: 270845 - DNA, 687 bp, Klebsiella pneumoniae
atgaaaatagtcagcaataccgtttgggatggacttaaactgcctgattatagggctcgtttttttatagaagtttggaaggagattttgtacgtcaacactccttcattttatcaatctaaaatgattaatacgatgtcaggtgctgaggagttagtcgaagccattgatgattacatacaagatgataagagtaaaaaaagtttattatcaatgatagaagattacaaaggtaatttaaaaaaagactccatagcaaaagacacttttaaaaacttgcatgcaacgcttttaaaaaaaattgagactgttcctgacccaatatctagtaattatattttagaattaaaaacaattgttaaattagtattatccaaagaaagtgactattatcacgaacttaaaaagcagctaaaatcatctattttgtctaatgttgatttgaagaaaaaagcccgtttaatggactccatttatcaattaaccaaaagcttcattggctatctcctgtggaaggggtattcaccaacttatttatataatagaatggaatatcttacgagaattaaaaattatggcagtagagactttcccgctcaatttaatagttgccttgataaattaactattaggattcatgctgtctcttatacacatctgacgctgccgacgatctactctgtgtag

SEQ ID NO: 270846 - DNA, 1110 bp, Klebsiella pneumoniae
atgaagaacgagccaaatttcgagattttccgccaagctttttctccgagagttgagattgcagcagcgttggatggtgcactcaagtccattccgaatgacttggtgaaacttaaagaagcgtgtcaaaagctcaatgaaacgctcgatgagctcggtcagggatatgttgaagatcaatatcgtgcatattacatagcaatgactatatttgtatctctagctgagtggaaacatgctatacgtaatgctgagactgatgctcaaaggtttttatattcagcacaattaaaagcatcagagatcgacatgacgacgagtctctcggagaacaaaaaatttattgaatttatagagcaagtccgttcaatcagtaaattagattcattaaaacaaatacaagaccagttaacaagctggtcattgccactactcttattcacaaatcttcgcaataaaaatattgaggggattaggcaaggaatatctagtaaagggacaaaagagaataaaacacaagaatcaacagttgcatttctaaagtttgatattgatggggaaccagctcagcaatggaattatcttaagccgggtacggcttatgaccttaacatagaggtcagggtttcaaattggccaaaaagtgcaaatttcctctcattaaagccagtgacaattgatgctcgtgagcgagactggttgcctgattttagatttgagaaaccagagggggaaggccccttcacactgaaggggatcggtcgtgtcgtcttggaagtggcaaattcatttggttcgagaccttacgaattcctatatgctgccgagtttgacaatttaagtaattgccaaaaaattgctatcgtaggacataggcgcttactacttgaagggagtgattccgctcaagctccattaactggattttcaaacgtcgataggcatcttataaaaattcgtaacatattacgagctttccctggattacactcagatgacattgctaatacaatggttatacttggcggcttaggaaatgttgcagcacaagctcttaaagctagtttatttattgctggcacatcagagcaaaatttcagcgtaaaatag

SEQ ID NO: 270847 - DNA, 156 bp, Klebsiella pneumoniae; identical to SEQ ID NO: 158366

SEQ ID NO: 270848 - DNA, 123 bp, Klebsiella pneumoniae
atgctagctaaaatcatcgcctgccaaccggcagagccgggtaccgcacaattgatggttcgcctgcgcggcgaaactgcggtgctgcccgatctgacctttacgctttgtaataacgagtag

SEQ ID NO: 270849 - DNA, 483 bp, Klebsiella pneumoniae
atgacaagacttaacaggctctatgccagcagcgggccggaggtgatcattgaaacgctgcagatcaccgttggctcagatgttcactacctgtgccaggggtacgaggatattacggcgacgacggagagcggcgataccgtaacgtttaccgcctgcgcgattgacattgcactgccggcgcgcaacgcggacggtacgcaagatttgaaattcgccctgtgcaatgtagatggtgttgtgtccacgacgatccgcaatgccctggctaacaggttgtctgcatcgctgacataccgcagttttatctccacggatttagccgcgcctgcggcagtgccgtatacgctgaaaatcaagtcgggttactggacggctacagaggtgcagatcactgcgggatatatgaatgtcctcgatatggcctggccgcgttaccgctacacgctccctgtcttccccggactgcgttatatcagctaa

SEQ ID NO: 270850 - DNA, 381 bp, Klebsiella pneumoniae
atgtttaaccctgataaatacctttcagtcacctggctgaagggcgggcgctcatggccgcaactcgactgcttcggcattgtgaacgagatacgccgcgatttgggcttgcctctatggcctgattttgccggggtcacgaaagacgacggcggcctcgaccgggaggcgcgtcaaatgatgcttaccctggaacgctgcgagccctgtgaaggggctggcgtggcctgttattccggctcagccgtcacccatgtggggattgtcgtcagtattgatggcctgctgcatgtggcggaatgcaatccaggctctaacgtaacgtttcttccgttagcgcggtttaagcggcgatttgtcaaagtggagttctggcaatga

SEQ ID NO: 270851 - DNA, 852 bp, Klebsiella pneumoniae
atggaaaataaaataattgtattccctgaaatgcagatcaacacaattaataaaaccgcgatgcttagaagtgatattgataaaagaaaactaatacgcaccgttcttttttgggataaaataataataccttgcaacacgaatatttttgtaataaatctagaccacatacctgagatcgtaacgctacgcgctgaaaaaattcttgaagaacctaaaatacaggtaagtggggatggtgaattaacttcagttttatatggtatgtacatgtggtatatcatgcaaatgatgaaaagcaatgatgcaaattactctacttatgaactggaaaaaatgatcataagtgaccatgaccaagtttccccttctggcggagagcttttgacttttactaacgcgttcccggagcctgatgtaagcacagaaattaatgatatcctggaatttaagttaaagagaaaagatcaattgaatttgttaatggcgcatttgaactctttagagttaagagttttgaaagccgaaaataaacacacagaacttaataaagcaataaatgaaatagatatagcgtgcgctgacgtaataaggctctataaagaaaaagggataaaatttaacatatccaacgcaaaattcaacttctcaatgaaagaaataattgaggttactggtgcaacatatgcaggttctgttattgcaggtctaccacaaacagcagcggttctggcctctcttagcgcaggaatagctagtgttgtagaaattaaagacgctatttcatttaaaaaaattgataaaacaaatccgttcaactacgctggagaaattagcaaacacctttgctag

SEQ ID NO: 270852 - DNA, 195 bp, Klebsiella pneumoniae
atggatgaagaaattgaagtaaacgaagacgtaaacgaatttgatgtctggtatcagcagttaatttccgtgctggcactaacgggtaagagggccccttacaaaatggcatggatggacttgtatgagcggggtttgactcctgaagaggcggccccagaaggtccatgccaattggcttttgataatgtttag

SEQ ID NO: 270853 - DNA, 141 bp, Klebsiella pneumoniae; identical to SEQ ID NO: 220399

SEQ ID NO: 270854 - DNA, 2103 bp, Klebsiella pneumoniae
atgaataaggagtcgatttttcgccaactagaacaacggatcgccgggcgagcgctgacggcggaagcgctgggcgagtttaacgctatggccatcgccgatagcttgaagcaaaaacgcagcatcatcagccatcatctgaataatctccatcgcgagcagcgggtggtcaaagtgaacggtcgcccggtgctgtttttacccgttaccgttctgcgcgatcatcaccgcctggcggttcggcacggcgaatacgcctccattcaggcgctgtgcgcggatcgtcaggatagtctggcgcagctgattggcgcgcagggcagcctgcaggaagcattgcgccagtgcaaggctgccatcagctaccctggcgcaggtctgccgctgctgctgcggggccctactggcaccgggaaaagttttctagctcgccagctctggcactacgcaatagatgaaggtattttacctgccgatgcgccttttaccgtatttaactgcgccgagtacgcgaataatccagaactactgacctcgaagttatttggtcatgcgaagggggcctttaccggcgccgataaggccgttcctggtcttatcgagaccagcaacggcggggtgttgtttatcgatgaggttcatcggctgccgcccgaaggccaggaaaagttgtttcattttatggataacggtagctggcgccggctgggggagagcgccgacgagcgcagcgccacggtgcggctaatttttgcttcaaccgaggatctggaaaaacacttcctggcgacctttattcgccgtattccggtgattgtaaaaattctgccgatcgctgaacgcggccaattcgagcggctggcgtttatccaccactttttccgccgtgaagcccagcgtttgaaccacgatctggcgctggatggcgaaatcgtcagccagctaatgcgtgaaacgcttgaaggaaatgtcggtgggctggaaaatttgattcgcaatatttgcgccagcgcctggacatttggcgaacgtgatagcggtcttttacatataaaagcgggtttgctgcccgaccgattactggcggatgcgccttttacccttcagcaaaatagcgagcgggttatgatttaccgcgatggcgacgcgcagcctcttttttctggtcgtcaccatgaataccaacggctaacggaaaatatttgtagcctgtgcgaggagttggctcaggataatattagcgtgcggacctttgaaaagcttatttatcagaacgtgacgctctatcttgatgcgctgatgaatcaggagagtacggtctctctgcaggacaaacggctgcgctttattgaagatgtgggcaaagcaatcgctgtcaattatgaccttcagctaaatgtcgaattcgcttatcttaccggccgctacctcaccagcctccctctggcgccgcgcagcgttgctgagcccgtgcgtctggtgatgcagcgctggctggactcctcggcggggctggcgcaacgcatcgcggagaaactactggatgtcgtcaataataaatacgatctgctcatcgatacgcttgaccgtctggcgattaccgccattgtcagtaatgctatcgatgcgaccagcggcggaaaagtgaaagcgctgataatcgcccacggttattcgaccgccagcagcattgccggcgttgccaaccgcctgattggcgagaagatctaccaggccatggatatgccgatggaggtggcgtttaacgatgtcagtcgcgccgtggttgattatctccagcatacggacacgcgtgcgggtgtgatggtgcttattgatatgggctacaccaaggagattgccgatgcgcttttgtcggtgattaacggcccgctggtagtggtggataacgtcacgacccgcatggcgctgaacgttgccagcgagatcgcgttgggaaaaaacatcgaacaaatcgccgaagagatcgtgccgcttaatcagtcgcgttgggatgtgttctggcccgcagaaaaaaaagagcgtgtgctgctggtgacctgtattacaggtatcggtaccgcatttaaatggctttgttga

SEQ ID NO: 270855 - DNA, 2190 bp, Klebsiella pneumoniae; identical to SEQ ID NO: 269622

SEQ ID NO: 270856 - DNA, 849 bp, Klebsiella pneumoniae
atgccgcatgagaaagatttctttgtatcaaatcagtttagtgagtctgatttggaaattttactaaatttccaaaagataaaaaacagcaaaaaaataaaagatattatttcccgtaaaccagaaatggaaaacgaaaatcaattcctacttgatgtagcaaaaaatttaacatttaacaaaaataaattatttagaaaaagagatgatgctaattctgaactaataaacttatggttgtcattaatagaaaaaaagtcattaaatacctatttaaaaggaaaaacaaaggtcttcacagatctggattttgaaaacctcggcataattgcaagtttgagcagggatgtccaatctcttcattatatttcaagaatccttaaagaagaatatggtattattttaataattgaaaaatcattcaaaggtatgaagttagatggctgtaccttttgtttgccaaataaaacaccagtcataggtctaagtttaagatattcgagatatgattacttttggtttacattgatgcatgaattatcccacattgctctgcactatgataaattagatacgccaatcctcgatgatttagacattgacacagaaacagacgtagagattgaagctaacagagccgcagctgatagtctgatacccagagaagcaaatagagctgtctttcggacatttaatgaacctgatagtctaatatctgtctgcgaaagatttaatatacacccaataatcgctgctggtgcggtaagaaataaacacaaaaattatgttatcttctcaagtttagtcaattcaattgatgtcagaagggagcttggtttcaatgagtaa

SEQ ID NO: 270857 - DNA, 627 bp, Klebsiella pneumoniae
atggagaagagcctgctcaacgattttgatattaacatcatcgcctgcgagtatacgcgcttaaaaaacagtcgtacggcggtatcgttgctctaccagtatgaagttattgcggtcgtgggtacccacgacccgcagctggccggagtgccctgggttggcattgaggaactacttggcgagcaggggcatcgacatctgagtcagctcttaagcggctatcttaatgaaaagcaaattgcgctgattaataaaaatatggttcgtgagttttcactgcataacgttgtcaactctctgacgatactgaatgctggaaaaaccatgggccatatcgaaaccattatcgctgagtggcaaaatacgcttggttttcattttaataataacttaattatcagtttatatgtgcatctcagctgtatgattgagcgtctggtaatgcgtaatgaaattagccattataaagatcttgagcaatttacccgccagcatggtgaatttattgccatggtgaatcactcgttccagcgcctgaaaatactctataacgtggcgctaccggtagcggaaattggctatattcacgatatttttgaattacgtattgaagattttagctggtaa

SEQ ID NO: 270858 - DNA, 1002 bp, Klebsiella pneumoniae
ttgctttgccacggaacggtctgcgttgtcgggaagatacgtgatctgatccttcaactcagcaaaagttcgatttattcaacaaagccgtttgttggctgcggtggttcattaaccggtttctggccggggaaatattttctcgattgtgaagctaaaaagctggccgtcggctatgttaccagtaatgaatttgtccatgcgacgccgaacgcgttaggtaaaaacagcgtagtgatcctcgcctcgcagcagggcaacaccgctgaaacggtggaagccgcccgcatcgcgcgtcagaaaggcgccgccactattggactggtatatacccccggcacgccgctgtgcgaacacagcgattacactattgaatactgctgggcgcgctatcccgaaaccgtcgatccgacgcagcaaaaagcggcatacagcctgtggctggcgctggaagtgcttgcgcaaactgagggatacgcccattacgatgagatggtcagcgcctttgccagttttgaatccgtggtacgcggcgctcagcagcaggttcaggcggatgcgcgccattttgccgaagcctggaagaccgaaaaggtcatctacatgatgggcagcggcccctcattcggcgccgcgcatcaggaatccatctgtattctgttggagatgcagtggattaactccgccagcatccacagcggcgagtatttccacggcccctttgagattaccgaaacgggaacgccgtttattttattaaaaagcagcggccgcacccgcccgctggatgatcgcgcgatccgctttatcgaacgttaccagggaaaactgcagattattgacgtggaaaaggtgggaatcgacgcactgcacgccagcgtgcgcgaatatttctgcggcctgctgcacaactgcgtactggatgtttacaacctggcgctggccaccgctcgcaaccacccgctgaccacccgccgctatatgtggaaagtcgaatattga

SEQ ID NO: 270859 - DNA, 1167 bp, Klebsiella pneumoniae
gtgtatggaaatataggggccaatccaaatatcgtctggaacgcgacagcggcatttatagcagtcatcatcatcagcctgctgcttgatgagtccgggttctttgaatgggccgcactgcacgtctcgcgctggggtcacggacgtggccgcctgcttttcacctggatagtcttgctcggtgccgctgttgctgcgttgtttgccaatgacggcgccgcgctaatccttacgccgattgtgattgcgatgctgctcgctctggggttcagccagcgcacgacactggcctttgtcatggcagcaggatttattgcagatacggccagcctgccgctcattgtttcgaacctggtgaatatcgtctcggcggacttctttggtctgggttttacacagtacgcctccgttatgatccccgtggatatggcagcgattgcggccacgctggctatgctgcatctcttcttccgcagggatattcctgcgacgtatgacgtttcactgctgaagacgcctgccagtgcgataaaagatctggcaaccttcagggcgggctggattgtcctgttattgctgcttgtcggtttctttattctggatccgctggggatccctgtaagtgcgatagcggcggctggcgcagcagtgctgtttgtggtggcgaaaagaggccatgccatcaacaccgggaaagttgtgcgcggtgcgccatggcaaattgttattttctcgctgggcatgtatctggtggtctatggcctgcgcaatgcaggactcacggagtacctgtccggcgtgctgaatctacttgaagacaagggcttatgggcagcgacgttcggtacgggcttcctgacggcgttcctctcatcagtgatgaacaatatgccgacagtacttattggcgcactgtcgattgaagggagcacagcaaccggcgtcgttaaagaggcaatggtttatgccaatgtgattggctgcgatttaggcccgaaaatcaccccgattggcagtctggcaaccctgctgtggctgcatgtgcttgcccagaaaaatatgacgatcacctggggatattacttccgtactggcattatcatgactgtgcccgtgctgtttgccactcttgccgcgctggcgtggcggctctctgtcactttgtaa

SEQ ID NO: 270860 - DNA, 321 bp, Klebsiella pneumoniae
atgagcaacataaccatctatcacaacccggcctgtggcacctcgcgcaacacactggagatgatccgcaacagcggtaacgaaccgacgataatttattatctcgatacgcctccgacccacgatgagcttattaaacttatttcagatatggggattacagtgcgcgccttgctgcgtaaaaacgttgagccttatgaacacctgggtcttgatgaagataaatttagtgatgagcagttgattgatttcatgcttcaacatccgatcctgattaatcggccggtagtcgttacgccgcttggtggctttgttgaataa

SEQ ID NO: 270861 - DNA, 1158 bp, Klebsiella pneumoniae
atgactacactaaaagaactcaatgaagagcttaagcagctcaccgatgatggcgataaaacgaggaaaaaagcagaaattgcggctttggtagccaaagccgataatgacataagacttgcacaaaggaatatcggctacaacgtcagggagtggaccgtcgaggtcattgtccagaaatatggcgagaatctcgatattgatgcgaacgagttatttatcccagattatcaacgtgattacaaatgggatgtgaaaactgcctctagattcattgagagtatattactcgactttcctattccttacttatacatcgctgatgtattcaatgaagacccagaactggatggaagagtagaaatcatagatggttctcaacgaattcgtgcaattcattatttttggaacaatgaatttgaactgaaggatcttaaggaacttaagagcttagaaggcttcaagttttcagatcttttagcgagtcgacaaagacgttttctccgggcttcgctaagattcattgagttaaaaggtgatgttgaagaacaacaccgaagagatctttttgaaagaataaattctggtgtgaaaagactcgaggcaatggaagtaagacatggttctgatgctgcagcttccattttctatagggatgtgatctctccatgttcagttaatccattattctcacagttagctccgttatcagatcgtaaacgttctaatggcgatcatagggagcttgtattacgtttctttgcttatttaaatgacttagataattataaaggtttcgttgctccatttattgatcaatatatgaatacccaagcaaatcaagtaacacagcaaaatgtaagttcatatactgatgaatttgaaaaaatgcttcaatttgtcaacgctcattttcctatggggttcaaaaagacacctacaagtaaaacaacccccagagctaggtatgaagcgattgcagtaggaacagctttagctttaagaagtaacccgcagctcctggaaccagcccagcctatttctgactggttattcgaggcagaatttgaaggaattgtaacagcagatagtgccaacaacactacgcagctcaagaatagaatattctatgttagagataagttattaggggtctga

SEQ ID NO: 270862 - DNA, 756 bp, Klebsiella pneumoniae
atgtcttatacactgcagcaattaagttactcagttccatttactggagctgaatatgttgatacatcaaaattaacaccactttttcctcagcccacccctgctcctgaatccgatgctcttggtcaatgggaatttggcccggactcttccagtctgatagatctggttaacggcaggacgttaacgcctctcagtgccggcaatcccccgacatatggcacaaactacctcaagcctgttgccggaggtctgtacggccttgtgagtgatattgctgatgcaggcggcccatggacgcactgggctgttgttcagtataaggctgcaggtggatatctgtttggtaccgcagacggtaccgcagcgaacggcggtgcagcattatggattaatccaacaaatggacagctggtatcaaccatcaggggattcagttccggtattgctaaagtgccgacaggcgtttctgatggcgactggatttttgttgctctggctatgagcactacaggtatgctgatatatatcggtaactctgatgttgtgccagttaccggaacatatactgcaccaacaacaacaaaatatcatggggttggtgattgttatcatgccgggagtaacttctatggggcaacacttgagcatgcatcgcatggaattcatgcctcggcaaagtcacaatcagatcttgatggcatatatagccgagtaaaaaccagaatgtcagcaagagggatctcggtgcattaa

SEQ ID NO: 270863 - DNA, 123 bp, Klebsiella pneumoniae
atgccggtgaagaatatcattattgacatcgtcctggcggaaatgattttccgccagccaaaagcagtgaacctgcgcagccctcagcgtcacctgacacaattacagcggggcaaggcgtga

SEQ ID NO: 270864 - DNA, 1083 bp, Klebsiella pneumoniae
atgccacacgatttaattattgatagtgtgaatgtaaattcaaagtgctgggttgtacgttctggtgttcgataccgttacgcaacacaattttacgaaggtggctttattgcaactggtcatcttgatgactttgatttagctccagatctatttgaccaagcgttaaactatgggaacatttcccaacatattcctgaactagatgaaacaataactaggaatattaaaactcagatcgaaaattttgtgcttgatatgaacattggtgatgttgttttcacgatggattcaagatacgtaattcctggtgtagtaaaatcagcaccttttattagtttagatgctatttcgcaaaatgaacaattttgcgttagaagaactgtcgagtggggagaacctattctaagaagttcaattcctataacaattcagcgaagttttaatgcttatcaagcgatcttttctctgggtgaaaattccaaagaaatattccactggttaatggcattctttatttcagaggatagttattatggtagtttgcgagtggaacaaccgagagctatacaacatcatactttgaagcaattgaatgaacttattgacaggatacaagttctttcgctgttaatcggtgaacatttagataacgacatccaggatgactttattttaacatttgaagacattcaagctgctacagagcgattttctgatactggcgagcttaatcttactgttcagcaaatgttaatgtcacctggcgatctttggttgaaatttacaagtgcctcgaacattgctggtacagcattcctttgcgcgcttctatcgttttcatcgccagcatcatctttaacatttgttaatggcgactataatgataacattgagcagattacacagatgatcaacgctaatcgcgatgttgtgtatcaaggtataaatgttgaagcagttaaaaggcagctgatcttggatgctgcggaccaaaacacggacttcgtagtgtctgagccaactaaaaattcagatgacggtttccctgaagatggtgacccaaggcatgttgggggatga

SEQ ID NO: 270865 - DNA, 645 bp, Klebsiella pneumoniae
atgattattgtcggatgggtattattagcgttattggtgattgttcttgtttggcaagctaggaatatctggcaaaaccatagtaacttcaataatattgccattgctttatgcgcaatcctgacattggtgtggggagcatacacatttgatgccttacatcggaaagatatggccgaagccgaatatgcggaacttcagcagaaaataagaaatacagaatcaactttttttaacattgatgccacatttactaagtcttcagacggatactatattactccagttgtgaccataaaaaatagtggttcagagccgatatacattaaactaaaaaatgactcggtgtctatacgtgcaatcgaggtgcgtggtgatagagttaaatctataaagacttacacccctaatatatatgaagaaatagcatcaaatacaaatgagaaaaacataccaatatatgattggaaaattccaatttcggcagagcgaaaactcaattatgttgccaaagttgaatcgcctggtatgtatttcataacgttttctgctacggaaactgattcgaatttcaacgaaaaaaacaaggatataaacggaaagccgatgatttggttcgtttctaaatacgtttatgttaagtga

SEQ ID NO: 270866 - DNA, 528 bp, Klebsiella pneumoniae
atgaaaaatggtaagtcgcagttttttgttatacttgtcggatatttagtgagtgcggcattgatagtctggatagcctgggttggcgaggataaggctggtttgctggggagtcagctcccatatcttgacggggggatggtcaatagtaactatctcccagtcagtattattcttaataattactccatatatattggtgttttccttggcgcattggtttcgttattgatgttttttttgattgaacctgacaagatcaatggggggcatcattttccaaaagtgtttattggttgtgttttagttgtgtttgctttgatttttatgactatcataatgaatcgctcggatttggtaaatgctaactacatgtttagagcgttttcttattcgtacatcagtactgttttttattatctgttatcactttttttcttctatgtcatgtccttgatctctgttttgggtttagttgttttgccattgatgatggcaatcaataaaatgaaaaaagccggggtgtaa

SEQ ID NO: 270867 - DNA, 1242 bp, Klebsiella pneumoniae
atggcacaatcattagactatgttgtagacgttcccgttgacactcttattgttacagctgatccgactcaacctgcaatctggacaaatacatccgagattgaaaacgcagttcaacaaagcgcctatgtggcaagtaatgcaatgctcaattatctccaaagacatgctggtgatatttttgtctcagagatgaactttggattccaggaggatgccaaacggttactcgcagccaacggcaaagtagctcaggctcaatctaacctgaatgatacaaaaacagccttagatcaggcgcaagaaaatgggacaccacaacaaattgcacaggctaaattaaattaccttaatgcccaaaaaaacctgtatcaggcccgcaatgaaatgcgtcaggcatcttcacaaatgatgagccagcagattttatataacaatggattaattggttttggtattgtacccgatggtgaaacacctgattcgttgaataacacatcaaataattatcaatcccagattaatcaaatgcaacaggcaacaaaccaggagaatgagttcatcaaccaagttaatgccaatatcaatcagacgacaaatgatttaaacactatcaatgctggcggccatcctgatggttataaaaacaatcgagagttggcaatccagtcctcgatgacgctggcagcgcaaagtgcggagaaaatcgcagaacatgcaggtaataaggctggagaaatatcacgtaatctggcgaatacagtcagaggtgataaggtacgtaattacactgatgctaaaaaaactctggacaaactccttaagaaccccaaattatcactaaagcagtcagataagaatgcgataaatcaggctataaccgctgataagatggcctccttgtccagggagtttgatgcattagggaaaacttttgggctactagacaaagggtttacaaccaaagatatttatgaaaagtacaagaccggttatgtgactggtgactgggaacctctaatgcttcagcttgaaagcatggttttaagcggtattgctgcagcatacacatacagctttgtaacgggcatatctctgggcatcgcagcagtcgttggcgttactctcccggcgaccgctgccgccatcacagcagccatagctgcagctgttgtggcgtcttacttcgacgtagattttgcggaaaaactcaacaatcagttaatccctcagctttactag

SEQ ID NO: 270868 - DNA, 228 bp, Klebsiella pneumoniae
atgaaaatcgaagttaccattgatcgcacaaagaaattgccggatggtgccattcctgcactggaaagagagctgcttaagcgtctgagtaaaccatatcctgactgtacgctggtgataaagcgtgcaggaagtgatgggttgacgattttcggtggtgagaagaaagaggtcgagaggatcctacaagagacctgggaaagcgctgacgattggttctataactga

SEQ ID NO: 270869 - DNA, 162 bp, Klebsiella pneumoniae; identical to SEQ ID NO: 183691

SEQ ID NO: 270870 - DNA, 777 bp, Klebsiella pneumoniae; identical to SEQ ID NO: 183690

SEQ ID NO: 270871 - DNA, 3501 bp, Klebsiella pneumoniae; identical to SEQ ID NO: 183689

SEQ ID NO: 270872 - DNA, 2292 bp, Klebsiella pneumoniae
atgcttgaaagaattcatcaaattactagcgtaggtttattccaggatatccgtcctgctggtatgtcctttaaaaaaatgacctttgtctatgctgataatgggcgtggtaaatccacccttgcgtctattctgcgttcctacactgaattaaatccagatattgtacggcacaggaaaacgattggggaaacaacccctcaaaatattcatctgcagttttctcagggaaatcgtgcgatattcgttaacggcacatggagtggtaagtattcagatgtgcacgtcttcgacctagattttgttgatcgtaatgtttactcaggtggtgaaatcagcgctagccatagaaagcgactgctgagttttgcgctgggcagtgatgcggtagcagcgagggctgcttttattgatgcatcagacaaggcagaggaggccaagagagttacgagactggcaagtgaaaagctgacggtggcccggggaaatgtaacgctagcaagatacataaagcctgttcaggaagagaacattcaggaaaaaattgcattagtcgaatcagaactggatctctgcaaaagaacagagacgatccgcaaccgtacgggctatcttccgttacctctttacgctcctgatttcagttcttttttttccatacttgcatcgagttatgacagcctaagtgcgggtgcagaagaggtcgtctgtgcgcatattgaccatatcaatgtcgaaggttttgagcgatgggcgagtagcggccttgattatataaaagacgaatattgtcctttctgtacgcaaagcttggagggtgttggactgatccggtactaccgggagcggtttaatcttgcatacaaagccttacttaatcaggttacaggcctagataacgttgtggcgacaaccatgcgcgttttcaatctggccttacttgagagcaagattgagcaggcggggttagtgactgaaaactggaaagattgtctccagttgaacgtgagtctccctgatttagataaaattaaagctagtttggaaggtcttcagtcatctctgagtcgcttaacagaagccaagaaaagcgatccgctttcaaagacccaaggcgactatgaaaaagaaatcgctgatgcagtaactgcaatcaatgatgagctttctgcctttaattcgggcgtggaaactgccaatctggatattcaggcttataaagaggcgcttgaaaccaaaaatgaagaaaccctgcgggttacattatcccagcatgaagcaacccgacttcgtctatcacctgaggtagtaggttttatctctgattatcagaccgctaaaacagctgaagtgacggcctctgaactaaaggaaacacggaggggtgaactgaatgcgatcatggactcgacccttggaaagtatcagtcctcaattaatgatttattgatgaagtttggtgcaagctttcgcatcacagaaattaattataactatgccggcggtggtgagcctaaatctgaatatgcaattgaacttagaggggaaaagatttcgctaacgggggaggaatacagttttcggagctcactcagtgaaggggacaaaaggacgctagccttcgcattcttcatctcagtcttgcttcatgacgttgatcttgaaagaaaaattgtcgtgattgatgatccgatgtgtagtctggacaatcatcgcaggaaccacacaatcaccatcattaaacagatataccttcgcagcttgcaggtaatcatcttggcgcacgacctgctctttatccgtaccatgcgagatgagttcctaaaaatacctgctactcaaatgcaggacatttcagccttacgcattgtccacattgctggtgatttcagtagtttggacaaactagatgtcgatctggaatgtgaatctccctactataaaaatcatcggctggtgagcggatttgccgatggtgctcatcatcagcttcacgacacggcggtggcaatcagaccgcttcttgaggggtatctgcatcgacgttttccggggcgaatttcaccgggaaatctgtttggagaggtagtaatgcagattgcacaagcacaaccgaacgatccgttattcttcgctaaatcactggtacctgagttgaatgaaattaacaattatgctggtcgctatcatcatgacacgaaccctcaggcatcatcagaacccatcacggcaggtgaactgatgtcttactctcgacgggctttgaatgtgatttatcgcggaaacgtatga

SEQ ID NO: 270873 - DNA, 918 bp, Klebsiella pneumoniae
gtggaaaaaatcagccctgcaacagttcagtttatcaagcttggtgaggccggtgaatgggagcagcagtgtctgtcggagggtacgcttcggtttggttatcatgaaactccgaacagtctttgtgttgaggggcaatgggccgacgtgcacgagatatggcttaacatccgcaaggggaaaaaaggcaatgcgagcagtgacgttaggcagatcaagaccttttacatggcggacgcagagacgctattcattaccttcaggggtgggtttctgtactggtgtcgacccgcgggtccggttaaggtgctggcggatggtagtcgagtccgaaaaacaatggaggggtggcagaacaccagcattgggggagcactgttaaccacagatcacctgagcggtgacctgttaaaggttcagggataccggggaacgatatgtaacgtaagcgcacatgattacgttgttcgtaaaataaatgatgaagatctccctgcggtatctgatgcgaagcagtctgaagagacttatctgaaggctataaaaaagctttgtcagctgctgacctggcaggatttcgaactattggtagaccttgttttttcaacaagcgggtggcgacgcaccagtattgtcggtaaaacacaaaaaacgctggaccttgagcttgaatctcccaccaccggagagaaagcgtttgtacagattaaatcacatgcggacgcatatgctttcagcgagtacgaaaagcggttcagagaaaccagtgcctatgaacgaatgttttttatctggcacagcgggtcgttatcggaaaatatcaaagtcgatggcatcacgttaatcggcccaaataagttagcagggcttattctggacagtggtttatcaaggtggcttcgaaaaaaagtttcgtaa

SEQ ID NO: 270874 - DNA, 435 bp, Klebsiella pneumoniae; identical to SEQ ID NO: 183686

SEQ ID NO: 270875 - DNA, 279 bp, Klebsiella pneumoniae; identical to SEQ ID NO: 183685

SEQ ID NO: 270876 - DNA, 378 bp, Klebsiella pneumoniae; identical to SEQ ID NO: 183684

SEQ ID NO: 270877 - DNA, 267 bp, Klebsiella pneumoniae; identical to SEQ ID NO: 227150

SEQ ID NO: 270878 - DNA, 1317 bp, Klebsiella pneumoniae
atgtttatttttattgctttcgttcgtattgtttcagtttgttttaatggttatcatgcctttagtgtaactattggtgtaactattatggccaatgacaaattatcagacatgaaactgcgcgccttaatgcgggctgatgtcacaaaaccgaaaaccatcgctgatggtgcaggtctgtccatacgtgtgaccccttcacagaaacagactggcaatgatgacaagcgaccgactaataaccttttatggctattccgttacaggaacccccataaaagcactaacccattaacacttgtgctgggccgctaccctgatttgtcgttatctgccgcacgtgtacagagagacaaatgtaagtcttggcttgctgacaatcttgacccgaaagatcaatacaaacttacatcgacagaaacattgaatcccgtgacagtaaggcaggctttgcagtactgggtagacaactatgctgttcataaccgggcaaactatcaaaggcaccaggcgcaattggataagcacatttttccctatataggggatatgcctttatcactatgcgaaaccaaacattggctttcatgctttgatagaactaagaaaaaatctccggtggctgctggttacattttccagatgtgtaagcaggcccttaaatattgccgagttcgtcggtatgcgttcagcaatgctctggatgatttggctattcctgatgtagggcaaaagcaagctaaaagggaccgtgtgcatagcgaagctgaactggcagacatatgtaatgcaataacgtctgaaaccttttttctcccctattacaatgcattgctaaaaatattactggtctttggcgctagaaccaatgaggtccgcctgtctgaaactaaggaatgggatgttaaaacgtggatttggacagtacccaaagaacatgccaaaggcggcgaaaagattgtgcgtcccgtacctgaagccataaggccgtttatcttagacctgattgagcaacataaagacactgggttccttcttggtgaggcgaaagattcttctgccgtcagccagtgggggcgcggaatctataaacgccttgaccacaaggagccttggacgcttcatgatttacgccggacattttccaccacgctaaatgatatgggagttgcgcctcacattgtcgaggggctattaggtcacgcacttggcggtgtcatggcaatttataaccgcagtcagtatctgcccgaaaagttagacgccctaaataaatgggttgataaactttcagatttacaaaaaattacaaattga

SEQ ID NO: 270879 - DNA, 1692 bp, Klebsiella pneumoniae
atgaaaagcgcgcctaacgttaggctgttaccgaaagacccttttacggaagccattatttttgccggttctgacgcctggagtcatgccaagggctgggaagaaggcatgggtaaacagatagctggcgatgatacaccgcctgtctaccttgggccaaggcaactggctgatttagataatctacgcattatcgacgatggtcgccggtctgcacgggtatatttggccggtgatattgagccaataaaaattaacgccatcgctgaaaaactggctttggctggagttaaggaagcacgcctatttaaaggaatccctgaccgcgagccagagaactggagcaactatttaaccaggattcgtgacggccaccactgtggtaaaagtctggttgaaatgatgtccgaaccggttgaatgtattccgttagacaagccattaccaacgccaggggatatctaccatccagaccatatagactggaaacgggataaagttacgcaggaatgggttttccataaagcgaaaggtacggcggaaaatttatcaaggcttctcaaagcatatggtgttcgcgttcggtacaacgagttatcacgcgatgttgagattagcgtgaacggcagcctgccaatcggcgacttggcacggaacgtgtccctgtcaaagattgaggacatttgccgcatcaacgattatccgtacacagcagcagccagccacctagataacctggcgtcagcagattcatacaatcccgcgctggattgggtgaaatcgcagccctgggacggcacaagccgcctgcgcgaactgtttgactgccttacgttggccgaccaggataagacagaaattagctggacgctgttccgtaagtggttctttggtgctgccgccctgctgagtggcaaaaccaacaagtttgaacacgtcctgattctggttgaccctatgggtggccttggcaaaacgcggttctttaacaccctttgccctaaagactttcaggctgacggcgtaaccctcaacccggatgacaaagacagcgttttgcaggtagtcagcaaatggctggtggaactaggcgagataggcgcgacgttcagcaaatcggacatcgagagcctgaaagcgttcctgagcaaagacaaagacgagctacgaccagcttacgccagggctgcaaactgttaccagcgccgcactgctttttttggcagcgtgaacaacgttcaattcctcatggatgacacgaataaccgccgtttctggccaatccaggtggctgctgtgaattatcagcactcaattgacatgcagcaggtttgggccgaagcattggcacgcatcaacgctggtgaaacctggcatttagaccagcaggaaaactgtgttattggtgagcataatgacgcgttccgcagcaaagatcgtattgaggagatgattctgtcctcatacgacccaggcgcgctgccaagccgctacgtgtcagccagtgaagtactgaatgaaattggcgtactaaatccgaagcagacggatacccgcaaggcatcggcactactccgcaaaatgtttggccataaaattagccgtggcttgacggtttatcatttgccgagcgctaaaggctttcgccatttggtttcggttaatactgaatataaagaaggcccattctga

SEQ ID NO: 270880 - DNA, 222 bp, Klebsiella pneumoniae
atgagataccaagctgaaattacaattttttgtgaaggcagagatccgtttagtattctttttaacgagatatttgacagcaagatagaggcattcaaccatggccagaagcaaatcactgacttcaccagcaagaccgaaaaacgagtgctgcatatagactgcgatgtgattgaagtgcctgaaattggtaacgctgagatattgccgtttaaaaagtga

SEQ ID NO: 270881 - DNA, 315 bp, Klebsiella pneumoniae
atgggctggggcatcaagaaattggcggcggaacgcgccgccttatcgggcgaagtgctggccgccattgagggtgccgccatgtacacgcgacacggcgatgctgaagcaccgcgcatcatcgtgcaaccagcaggctacaccggctttatctacagcgaagaagcggcggaaaagtgggtcaggcgcgcgtttatcgaattgacaccgtaccaggtggaacgcgccgtgaattacctcgcttccctggtgcgcagtcactaccgcgagcagcgcccgaaacagaagcgcgaaagctggatgaacaggtactaa

SEQ ID NO: 270882 - DNA, 165 bp, Klebsiella pneumoniae
atgaaacgacaagaaacacgccagcacgtaacggtacgcctcgcccctgacctggtgcgccaggtcgaaagagagcaagccaaactggaacgcagaacaggtatccgcccttcacgcagccaggtgattgaaaagtttctgagtagcgggctgaacggcaaataa

SEQ ID NO: 270883 - DNA, 210 bp, Klebsiella pneumoniae
atggcaaccaacaacaacatttatgaagccgttctgaacgtcatcggcgtagccgacaagatgacgaagaacaacgcaagccaactgaccgacgcgcagaaggcagcactgaaaaaccttagcaacgcgatgaaatcctggaaaggtatcacgtttggaatgcgtgacatcacagccagtgacaaaccaattgacagtaaaactgcataa

SEQ ID NO: 270884 - DNA, 207 bp, Klebsiella pneumoniae
atgctggaccgtatctatagaaaaccggaaggaatgaacccctggcctgaactggtggatgcggtcctgccaaaagttctggtgtgcaatacagcggaggaaatgcaggaacagcgagactatcgcaccgaatgcgctctgcaactggctgctgccgccttgcgggctgctggtgaacacaccctggcagaaaatttacttaattag

SEQ ID NO: 270885 - DNA, 306 bp, Klebsiella pneumoniae
atgggaaacggatggcatgaatggccgctgatggtctttacggtattcggccagtgcgtcgtaggcggctttattgttctggcgctggcgctgatgacaggcaagctttcccgtgagcaggagcagcgcgtggtgggcagcatgttcggactgtgggtattgatggggatcgggtttattgcctcgacgatgcaccttggctcgccgctgcgggcctttaattcgctgaatcgcgtgggagcctcgtcgctgagtaatgaaatcgccagcggggcgatcttcttcgccgtcggcggaattggctag

SEQ ID NO: 270886 - DNA, 177 bp, Klebsiella pneumoniae
atgtgtatagtggtgtgtataggaatgtttttcgattttatttttatcaataaaatcattatgttgatgttatttgtcggttcctattatcgcaccatcttttctcgtaaaatcattaagttactattgcagtgttttgctttgttcaacactaatgtgcatttttgcgcgttatga

SEQ ID NO: 270887 - DNA, 1623 bp, Klebsiella pneumoniae
atgataaattttacccatgagcaaaaagttgcaatagattacccatatagtatggtactgacggcttgtcctggaagtgggaaaacagcagtaatcgtagagaagattgtccgtgacttagcgggatgcaaggaatatcagggcgttattgctatatcgtatactaacaaagcaagcgatgaactgaaaaagagatgtttaaaggctacaccaaactcaaaatcaagcttttttgggacaatagataagttttatttgaccgaagtgatttatcaattcattaagcaattatggggaggagttgatgatttacatgtagttaagtttaacgagctaaattcttctgaacaagataggctttctgctttctttaatgtcgaatccatatgtgaaaagattgatgagtatgattttaaggatgttaaggaactatacgctaagggtattctaatactggagtttataccattacttgcattttatatattgtgcaactcgttatcgtgtcgccgttatatcgctaaaaaatacacctctatatatattgatgagtatcaagatgctggatttgtccaacatcttctttttcttttgcttttcgatcttggaataaaagcagttgcagttggtgatgttgaccagtccatatatttatatgcgggtaaaaactcaaaatacttaacctctttactggataaaaaaagtgggttcaccccttttaaaataactataaatcatcgctcacattcatctatagttaattatgcttctcgactattgaatgaaaactctgatttgttaattactgatgaaattcgtgtctacagaaagcttgttaatggtactcagcgtgaaatagctaagtggattgatattaatattaacaacattaaacagaaattcaatatttcaaaagaaaaagaaatagcgatacttactgcaacgaatagttctgtctctttagtatctggccttataaattctaaagcaagagcatatcttgatgatgagctatctgtgcttggtggagaagtatctcttttgttaaagagccttttaaattatcgttttaataaaataattacagcacaggctatcattgatagtttaaatcacaaggtaccagaacgaaatacaataaggaaaatgcggggtgttattagagaggttagggattctgatgatgaccaacttattccagctttacgtaaggcaataagattattaatcagtggtgatatttcagctcgccatattgatgccattaactcaattttacacaataaaatgatgctaaataattacttgccagtgggtgatgatgagttacaaataatgactttacataaagctaaaggactagagttcgactttgtttttcatttagatctttatgattggatattaccacggagagagtatataaaaagttgttttgatgaggttttttcgcaatatgagcaatgcctgaatcttcattatgttggggtcactagggcaaaaaaagctgtggtattaataaattctaccgagcgtttaaattaccaaggggaattaaaaaaagcgaaaccttctcagttcttgtcactaaaaggacttgaaggtctgtataaaaaaatttaa

SEQ ID NO: 270888 - DNA, 1704 bp, Klebsiella pneumoniae
atgtatattgataatgtatatttaaagggatttaggaactattccgatagtttcattaaatttaatcattcaactcttattattggtagtaatgacattggtaagacaaacctattgtattcattaaggattttgttagataagagtttttcagatttagatttagaacctaaaaatagcgatttccacattgatgcaaaaggaaatcaatgtgaagagttagaaataataattaattttcgtgaggtaaaagaggatgccgttctctctaagttagcggggtatgtcagtgaggatgcgcaaacatatatcaaatataaagcgcacagaactactcttgattacaaattatatatagggcacaaagaatccgaaatggatgagattagtggtagattttatcttaaatatctaaatttacgctatgtgaattcacaacgagatcttgctaaatatatatctacagagaaaaaacatttacttcggcttgctcaagaaatgagaagcgaggagcaggttaggaaggatgaaaatactttaaattcattaactgatttactaaatgatgttaataataaggtaaaagaaataagctacgtttcgaccgctacggaagagttaaatgatgagttgaagaaattatcatataacaatgaaaaggtttctgtaatgctcgattctggagcaattggtgttgatcagtttattgaaaaattagaattaagttcaaatacaaatggcaaaaaggtaatgcttggaggggatggattcaataaccaagtattgcttgcattatggaaagccaagagtgtacgcgaacatgatactgaaaatgaagtggttatatattgcgttgaagaacctgaatcacacctttatccgcaccaacagagaaaactatctgagtatttaattagtaaattgccggggcagtcactagttactactcattctccacaaattgccgttaattattcaccggattcgataattaaaatttgctcttataacggcgaatcttacgcagcaagtgaagggtgttctgattgtattagtgatgcttggagtggaatgggataccggatgagtatactcccagcagaggcattcttcgctaatgtcgtatttttggtcgaaggaccttctgaaatgttgttttatcaggctcttgcaaaagagtgccaaattgatctggatttttttaatataagcatattatcagttgatggcgttcaatttgaagtttataggaaaatacttgatgctttcgagattaagtgggttgctcgtacagacaatgattcgtctaaagttccaaagaaaaaagagtggcaatattcaggtttaaatcgagctttggttctatgtggtatgaaaccactaaagaatgaattaatggaaatatctcaagttcaaaggatagagaaacataaagtttataaagatgcacttaaacgtaataatatatttgtttcaattaatgatctcgaaggtgatattagcgttgagttaagtaagcaactgaaagaatatataggtgttgataatgaggaaattgctgctgattatctaagggggaaaaaagcaataagaatgcaagagttcttgagagaatactctcatgcacttaaaactatttcaacaggtgaattaattcaaccccttttgactgccgtaaaactggctacagaggagttgaaatga

SEQ ID NO: 270889 - DNA, 312 bp, Klebsiella pneumoniae
atggaggatggacagggccgcccgctctggttaccgaacattatcggtggcgcacctgctactgttctgcaggtgccgtatgtcgttgaccaggctattcctgatatcgcggctggtgccaaatttgcctacttcggcgattttaaccgctttatcgttcgtcgcgtcacttacatgacgctgaaacggctggttgagcgttacgcagagtacgatcagactggcttcctggccttccaccgcttcgactgcgtactggaagataccggcgcgattaaggcgctggtgggtaaaccggcatctggcggctaa

SEQ ID NO: 270890 - DNA, 1050 bp, Klebsiella pneumoniae
atgtccgaaccctcgaaactaattgagctattgccatcgatacatgctggagttctcgcaatcattagcgcagttataattgcatggtacgtttacgcattaccaaaaatattaatcaaaaaagaaaacataactaagttaataacatcatcaactaagtacatccaacctatagttagaggcggtgatgataacccattaataaaaaataggagtggagaaatagataccaccgttttatacgaacatctagccgacatttcaattaacataaaagcgctaacaaagtctgacaatacaaatcacctcgaacaatatttagcgacaatagtcaacattataagccaatctatttcaatgaaaccattttacggtaaaaaaaattaccaacttgattcacccatacctaacgacactcacatccccgaattaattaatttaaaaaaatgcgagtcaatcacctcaagaatactgagagacattggctccaatcttaataacatagaactaatacagaaaaaaatcacagccgagaatctattgcaagcagacctaaaatataatgagttcatgaaacagcaagagggtgtaatagatgaaatgattattaaaaatctctctaagggttcagaaaatgataaaaaagaatacaaaaaaagagaacttgaaattttaaagccacgagctgaagctataaaaaaatgctccataatggctaagcagaatcattatgaaacaatacatgcatacataaaaaaccttcaagaatatatgcgcattcttgaagagataattaataaaagagaagaatatgaacttgaaaaaaagaaaaacaaaatccatgaatcatttagctctgctatatacttcataatgtatatcctcctaactggtgtaacaattcctctttttttacttggtcctgtggcggagataatccaatgggatagtatttacataagatttataagctacattctattggcaataacagttttcccatattttttaataacttctatggcactcgattcaattagaaaactataa

SEQ ID NO: 270891 - DNA, 1398 bp, Klebsiella pneumoniae
gtgctttactctgcgttgggtaatggtaagacaatactattgaagcagctacgaagtttgttatcacaaaaaggttatgactgttatgaaattgctgatgaggatgctgatttcattgctgatattgattttttagctaattcgaaaagaaaaagcattattttattagatcgatacgaaaagcatattgagatgattgagcatatttcccgtgctgattacgacaatgtaattatcttggctacatctcgagttgcagaccatgaatatcatcgagagcaattagataaaatacctttcagatactcagaaataaacattgatattcttgacgataccgaacttaaagaatttgtcaaaatcattgataacttgggactttggggggaaagagctgggttaaatgaaagtcaaaaaatgcgttatttgagttatgaaaacgttagtcagttttctgtaaccctgttaacattattaaattcccctcaaatcaaaaataagttatcaggattattacttcaaattaagaaaaataaaaaatatgaaaacacaattatagctatttgcttatgtcaaattcttggtatagataccaatagaagtatcatttctgaactggcaggtaatgatgctatttatgatcccgtatttaccgctaataaaaatttcaaggaaatatttaattttaataatggtagggttataaatggttcaagtttgttttgtgtgtttttagtgaagaataattttacagcaacagctataacacaaaggatgcttgctatagcttctaagtttagtcagttaaatacaaaagaccatgaacaagatagaatttttaaagcgatgttaaagttttcatttgttgaacagttattacccgaacaccttaaggttggaaatttacaacgatactatgaagatcttaaggtggaagtttcatggttaagctacaatcctcatttttggttgcagtacgcaatgtgttatattgtttttgaaaattatcctcgagctcagcgatttttagatcaagcatatgcattagctgtacaaaaaactaactatcatactaacaacatagatacgcaacaagctaagctatatttgttatcgagcgataaaattgctgatggtgctgttgtgtactccaattttgaaaaagctaatagtcttttgaataaccttaatgtggatatatactctcttaggcaaataactaaatataaaggattttatattgaaaattataaaaaactatccaaatctaataaagctaagttcttagattcctgcaaaaaaatgcttgataaaattacaagctatgaaggcgatgacagtgtgagccaaggcattttactaagagcgaaagatgctttgacatcaattgtcaaataa

SEQ ID NO: 270892 - DNA, 1281 bp, Klebsiella pneumoniae
atgaccgtaggaattaataccgaagcaattaatcataagaatattccctttaccatgtatgatttagggtgggtggtgctttgcatcggagctgccattggctccggaatcgtctttttcccattacaggttggatcaaaaggggtgtgggtctttgccctggccgttatcctgggctatccggcagtttattacatgcagaagctgttcatcgaaacgatggcgcgcagcgatgagcaagattcctacctgagtattattaccagctacgttggcagccgctggggcgtactgcttggcgcgctttactccttcaccatgctgaagtcgatggtggagtatgctcttgccattaccaacgacagcgcctcgtatctgaaaacctttggccttactaaccagacgttatccgaacactggtggtggtctctgctgttaatcgccgggctctctctggtcgcgtcgaaaggagaaaagctgctcttcaaagtttcaggcagcatgatcgccgtaaagctggtgatcatcgtagcgattggtttcgtggtgatccctttctgggatgtgagcaatattggtgcattcccaaccgttagccaccttgtcgtaggtacgttcccgacgcttccgttcgctatcttctccattatgtttgttgggatactaaatccgatgaacatcgcctataaaaaacgtgaagaagataaggacgtggcaaaatataaaattttacgcgtacacaaagtggcttatttagttcttgtcgctaccgtgctgttgtttgtcatgtccatcgtactttctatcagcgaagccgatgcgctacgagcctatcaggataatatctcggccctggcgctggccgccaaggtcattcctggggccacggtgaagtatatgagcgttattctcaatgtgttttccattgtgacggcattcctggcgctctatctggccgtacatgaatcttttgtaggtctgatcaaagtcactgttgaaaaaatagttaagcctcaggaaaacaatagtaaggcgatctcagttgccgcttttgtcatggttgtgctggtgctgtggctgatagtactaacgaactttcccattctgaaggtgtttgtgtttggtggcgtgacttacggacttattagctgcatcattcctggttttattattcttaagaatgacaagttttctgaccttcgtggcgtctcggtttactatgtgattttaatcggcatgctcatgtgcattggaccttttgtcatgctgttttcacaataa

SEQ ID NO: 270893 - DNA, 582 bp, Klebsiella pneumoniae
atgattcaaaatttaagaaaagcggcgacccgcatcgcgggcatgctgggcattggtcgtattaccagccagaaagatagcggggtggtacaggaagtgcagtatcagaccccgctggaagtggccagcgcgccgcggttttctgattttggcttttcatcggggctaccggcaggtgctgatgtggttattgcatttctgggaggtgatcgttccagccccgtcgtcatcgcctctaaccatcagggctatcgacataccgggctgaaaccaggggaaacggtagtctacaaccagtgggggctgaatatccatctgaccgagtcgggcattttcattgatgccaaaggtaaggatgtagagatcagcaatgctgcaaacatcactgcgacggcaacggagcaggtaaagctggttacccccagacttctggtgaccggagacgtcatcgataactgtgagacgaacgataaaacgctcaaagaactgcgtgatgctcacaatgaacatgaccatgacgttaaaaaagttcagtccggtgacagcaccataaccagcgaaaaaacagagagtcaggtatga

SEQ ID NO: 270894 - DNA, 498 bp, Klebsiella pneumoniae
atgagaaaagttggaagtacgacagatactgctgatgctaatggtgaatatactaatggcaatgttgctaatgggatttcaccgaccattattaatgctgaaatgctgaatacatttcagcgggagctagttaatgttgttgaaggttctggattaactcttgattcgggcgacgatggccaggtatttaaaagtattggtgaaattattaaaaataatttcccagctttgctggaagcaagaggttatcagaaatttccatcaggattgctaatccaatggggtcgggaatattcaagcggaacttcattaaatattacatatccagttgctttctcttttcctcctttttttgtttcttctgttaagataacatctggagatggtaggttttctacagttagtgatccaagtgcagaaggatttactgcatatgggcggctggctaatgatgcggtggcaattgataactttttttggtttgcaattggcgtataa

SEQ ID NO: 270895 - DNA, 1062 bp, Klebsiella pneumoniae
atgaatacaaagttaaatcattggttggatttttgccgagcactagctataagcttggtgcttttatcgcatgggcgcaccttcttggtgccattaatgcccgaaaccaatatatttaaattcggcggatttcttggagttgagttattctttgtcctttctggatttttaattggaagaatattaattgaaaaaacaaacaaccaagaatctcatcgggagtggattcctagtttttggttaagacgctggcttagaacgtatccaagttatattttatttctcttcataaacataattcttatatttagcattagaccggatatcttcccaagtgttttaagatatttgactttctcgcaaagcttgctatctccacacccttcattttttggggaggcctggagtttggctgtggaggagattttttatcttattaccccattgttgttttgggtgttttttgctctaacgaataataaaaaaacatccattaacttggcaattgtggttctaattactttaccacttgcactaagaattaacgcagcttttaattctagtcttacatttaatgaaatcagaacaatttcattatttagaatagactcgatagtgtatggcgtcttgggtctaattatttgcaataccactacctttaataagataaaaatgattggagtagcattaatacccttgtgcatctacatttccgcacaagatgacgaattaataaacaataacgcattctataaagtatttttatttcccatggcaaacatagggtttgcattcatgatatgcggttggatacatataaaaataagcaagcagattatgtacatagtttcacgtattgccagatggtcctatgcagcatatttaattaacctgccagttatttttttacttaaacaaactctccccacaccgaccacttacgcaagttgcattactcaatggttattattctttttattaacactatcactttcatgtttcatttataacacattcgagaaaaccatattaaaggcaagagataaactaatctcatcataa

SEQ ID NO: 270896 - DNA, 1455 bp, Klebsiella pneumoniae
atgacagcactagtcagtagttttaaatgggttggcattggacaacttgtaaaaatagcaacacaattggtttcgttattctacttgacgcacttaatccccccatcgagctatggactattagcaatgtcatctgtggttatgaatttagcaaacatattcaatgacatgggaactggggcggcagtaattcagcgacaagaggcgtcgatcggtttttataattacatatacaggataaacatttttactgggttgtttgttatgctgcttgtaataataacatcaccattaattgtcgtgtactttaacacacccgagctatacccggttctatttctattggcttttagctttccaatttccagcttaacaataactcacaaagcaaaattagaaaaagaaatgaactttaaagtcatcattgcaattgaaattttctctagccttacaggaatggtgctggcaatagttttagctaatttaggctttggtatttatagtttgatttttcaaacactgacaacaatatcaatatccacaatatgttttttgaaggtttccgggttgagtttatcattgagaattaaaaatatcagccatagtgacaagtcaggagttatagggtttagtggttatttattgtcttttaatttaataaattattttgccaggaatcttgattctattttaataggccgttttttctcatccgcaatacttggggtctattcgattgcctaccgcattatgttatttccgttgcagagcctgacgtttgttttttctagagttttcttaccacaccttagcaaaaacataaataacactaataacactaataaacaagattacttaaatgcattaaaacttatactatcattaagcgcgccactgatgctaggtttatctgctacatctttttcttttacgaggattttctttgatcctaagtggcacctacttggagacttattgcattggttggcacctacagcgattatccaatcagccttgagtacaacaggttctgtttttatggcctacggaaaaacaaggtggttgtttttcttaggttgcattggcgcttttttgatggggttgtctttcattataggtgttcatttcgatataaaaacattggtctgcctttatttttttgcaaacttaattaattcactcccggcatttatttcacttaagaatatcttgaagtttagttacattgaattggtaaacgtgttttttagaactatctctccagcttttttgatgttcttacttattaaagtatggcagcatttttcctttttcaaaaatgccagcattgatttttcttttaatgtcgcattgggtatttttagttatattgttttttataccttgtttaatttcaatgaggttgtgaggacaggagtaattcataagttaagatgcatgaccaagttaaagtga

SEQ ID NO: 270897 - DNA, 3774 bp, Klebsiella pneumoniae
ttggcaacatcacgtgcaggctctcatgctggtcggggttttcgatatcaagatgctgctggcgtctggctggccattcgctgctgggctaacgaactcccctacggggctgtgattcccgaagggaaagatgattacgaactaagtagtactataggctctgctctcgtgcaggtgaagtcacggcgtgcccatcttggaccatttcccgtggcggttgcagtcgggtttatacgagcgctctgggcgcgcgttgaaaatgcagccttccatacaaatctaattcttgttcttgagcatcctgttgccgaggggccagtggttgatcatttgttggctgagcatccagctctggtcagcacacttcaggatgacccgcagtgggcagcccttgccgcacgtactcaaatctggattgcaccaaatccttttgaggctgcagtggcaagtattcattgcaccatgccctgctcagatttggcggctcagattcattatggtgagttgttgaaacagattgccgcgctggcggacaaaaatggtctggtgagggatggtcgctttgaagggctgggtatatctgatgtggaaaccattcttcgtcgaatagagccagcgctggacatggtgggaatggaatcagctttacgcgacggttactgtgatgttgtcgatttcctgacaccattcaatgacccgtccttctaccagggtgtgaacacacggcctggccatctggcagcaggtcttgttgccgagcgtccgaatgcacgtcatgaggtactctccgcattagaatctgctggtgcggctttaattgttggtctgtcaggggctggtaagtctgctttgatgtgggaaaccgcgcgggcgagtcgacatactactcgatggtttgagatgagaagaggtgatgcggctgatgttcatcttctcattcagtttacccgtgcattaagggcttctcctgacgcgcctgtcgggtttgtcttcgatgacgttggtggacgttttagtcagctttggaatgcgctgcttaaagaagttaccgttggcagtggcatactactgttgggttcaatcagggaggaagacactcttatgttggcctcgcgttcccgggctagcgaagtacgtccgctcatggaagaggctgtagcagaaaagatttggcgccaattagtggaacaaggtcagacaaattgggcgggatggcgcgagccatgggctaaaagtggcggacttcttctggaatatacgcatattttgacccgtggggaacgactgaagtctatcctcgctgaacagatagatcagcggctccgcgagtccagggatgaagaactggcggttctcagtgttactgcccttgccggggcggcaggcgcggcggttgatgtcagccgattgccgaaggttcttggcattgaacaaggcgcacttacgcgagcgttacgtcgactcattgatgaacatctggtttccacaccagtggatggtcagctaaaaggacttcatcaactccgttcaaagacgctttttgaactctgtcatacgcatttattgcaaacaccgtcacatgcggccattagtaccgcacttactgtcaacgatgacagcatgagcagctttgtaagctatgtttctgttcatattccagatgcagcaacgtctctgattgagacactggtgactcgacttgaaaaagaactttcccctgtcgcattgaacggttgtctcttcggtttgggacaggctcatatcgaaacaacgctgagtgcctggataccccaggcgcgggtgattggcgtggagccaacattgattaccctagccgtcatgttcgttgtggcggggcaaaatacatcaataattccctttcccgagcgcctgcaaaaagccatgggtgagttacgggtacgttcggccacagatccgcgacaagtgttactgtccgcactttccccggacacaataaacgcattagtcgtacgcgctgatacgccacgcttatgtaccttcatgggtactttggtcggcatggatattcctgacagtatcagggcggcgctaagcaatttaaggcctgattttgatgcgatcaacctcagcaacgccgcagagttactgggcgctgcgcgacttatcgatccacaaattgccatattctggggagcggatgatgtttgtgaacggttattggcacgcctcacagctgaaattccgtggacggataaaattgaggttgaagcgcccatcggaggtcgtttgctgcgtagtcgcatttttcacgtcgcaccttctgtccagagcaatgtgcatgaagaagtcgtgcaactttgtgagctattgcttggactagatcctactgcagcagtagtcgccgttgatgccattgctgccgataaccttccgtcaggactgtcggaatacgctgttgctaccaaacgcatacaacgagaaaatctagccaccaaggctctgccagaatggaataagcgctggattgccgcagcggcaaaattggttggaacagaaagttactccgcttacctgcagggtgcgtacgctttgctggaacagcttatgccagtattggagcgtattgtagactgtgtactacggggcaaggaaccaccaccaaaaattcttgaccgtttcggtgaggtctttgagggggcttgtaacctgacttcaccacaggaaggtctttcaactggcgaggcgccggagcagcatgttaaaccgttacaaaatttactacattcctgctcggctgatttggtcaggcgctttaaccaattaccagaaggttatggtgcattcgtcatatggacaggggatctgctaaaaaatgtctgggaagcacgcagcgaaccgtggtcaatcgtggggatggaccctgagccattattgatgcggttggaaaatacccttacctctttgcggttgttagccgccgaggctggtagcgaatcttcccatccaacaaagatgtggatagcgaaaacccgcaaggctcagcttggaaatgcactgcgtctggctaaagttgaagctgaacagcagttgaaaacgcgttccggcaggtacttacgccaaaccgaagccagactgcaggcatccggcatcgaattaacgctttatactcgtccggattggaagtccctcctgccttggccaaatgtagaacttcttgcagtggtcgatctggaaacgcctgctgattggctgatctggttcaatgagcatgcagcgcagattcgtgctgacgttggtgaaagtcgccagatgtggattatcccacgcatcgctggatttgcgattccaaaattaacagtcggtggtatttccagtttcttttcctcgccacatagtgttgatgattggcttgatacgctatccattcctcagctagacgatgccttggtgcgtgcagcacaacccattatcgacctgatcatagagcttgatggattacgttatttcagactgggtggtgacaagcgccctattcttgaacagaccgtgcgacaaaccgatgaacacaaacttgaaatggctctactggccttcgatgccagttcagcgggcacctctgttcataatcttcttcgaatgttgagcgacgacgttgcatctggagctgttaatcttgctcgagatgtcgcagcacttacacatggcaggttagctcccggcgctgagatactggtgaacattcaaaacgcattactggcgcaagatattgccaatgcaatatctaatcaatga

SEQ ID NO: 270898 - DNA, 921 bp, Klebsiella pneumoniae
gtgctgaaacagcccggccacgtcgcgggcaaaatcagacggcgttatcaccttccagatgccgttttcatagcgggacaggagctggccgttggcatccacggccagcgcttcgccgtaatgttcatgcacccgcatcgccttatcgctggcactcatggcggtaaattccgcctcgctcatagtgtcgaacgggctctgtgccgctgggcggatggcggcataaatggcgttccgcgtggcgtcctcccccttcagcatcatcgcatcattccagtcaccgaacaccggcggcagggcgacaatgccttcgcaggctgctgcggccgcggcggcttttgtctggccgttgccgttaaggtcacggtcagcggcaaacacaatctgacaggccgggtgtttctgacgggccaggctcgccagagaaaggaggttcacggacgacagcgccaccatgacggtttcgccggtcaggtgatgcacggtaagggccgttgcatagccctccgctatccacaggcgttttccggcctgtttctgcccgtcgatgagatgacatgctcctttgacctgtcctcccttcagggtgcgcttgagaccgtcagcattaataagctggaggttaaccagcgcgccggactcgtcatacagcggcactaccacatcaccggcgcggtaggtcacgccgccggttttgtgcgatgtggtcagcgtcagacactcacgaccggcaaagcccttgcgggtcaggtaggcgttgccggtggccgggcgggttttctccagcagtctgacggccagcgcggccgctgccttgcggtcggcctccgttccggcctctgcggtcgccaccatctccggggccaccggcggcagattcccggtgacggcgttcaccttcccggcggcctcggatgctga

SEQ ID NO: 270899 - DNA, 264 bp, Klebsiella pneumoniae
atgaacggcatcggcggccgcaccatcgcagaggctcaggagcggatgagtcgcagggaatttctggtttggctcaagtaccgtgagaagtacggaccgctcaacatcatgatgcgtaccgagtggggggcgtcgctggtggcgtctgtcctggctaacatcaataaggcaaagaacacgccgccgttcaaggtaagtgactttgcaccgcacatcaacgaagcgccattatctctggaagaggccatgaaatcctgggactaa

SEQ ID NO: 270900 - DNA, 984 bp, Klebsiella pneumoniae
gtgaaaaaaaaattttcgataatagtacctgtatataacgttgaaaaatacttaagggaatgtattcaatcagtattagatcaggattttaacgactatgagataatctgtgtaaatgatggttcaacagatggcagtctagatatcatactgtcatttgatgaccaaagaatcaaagtaataaatcaggaaaatcaaggccaatcggtggcaagaaatgtcgccattgaatcatcaactggtgaatatatatggtttttagatggtgatgataaaatatcacatggaagtctaaagttaatagacaagataaccaatgaaaaaaattatgggattattttctttaatgcacatgttttttttgacactccagatctggaaaaaaaaggctggcatgattataagcgctcaacatttggcgaaatagatgcattaactttctttgaaaaagaaatggcgaacaaaaaactaatagtgcaaccatgttgctatgtttttaaaagggaattattaaatggcaatgcattcattccgcatatatgtcatgaggataatcattttatagcaaccctgatttttgacaattattcaactatatgcctctcgttggatgaggagttatttcttaggagggtaagaaatgattccgtaatgacatctaaaaaatcaatgaggcacatcattggatattcaacatgcatcgatgagcttacgaagtataaaaaaacaaaaggcatacaaaacaagagctttgatagatttgtgaatggaatggttttgtcgttattctctatatcggaaacaataaaaacaaaggaagcaatgaattatgtggcgagatataaaaaacaccccggcctatcatttaaagatagcgtattaattaattacccattaattaaaaaggcttatttaaaactaaaaaacgggaaggtgtttaattacctaaggaatagcattattaataaaaaaagcaacccttaa

SEQ ID NO: 270901 - DNA, 477 bp, Klebsiella pneumoniae
atggctgtcatctgccgtgggccgggccagagggttcccgtcaacattcgtcaggtcaaagtaactccaggctccgccattaatgctcttcttaaatacatacggacgctgcccctgcgcattaccacagataaaaatataccccccagcctttaccacgttattctgaataaaagccgcagagttgtagttatacatattcccgaacttaacggggagcacatcaaggttagcgcctataaatggggtctgtgctgcgcccggaacaccaccgctcatgaggtcatcaacgtcagcgcgaatttttgcaacatcctggagaagctggtaaggacgctggaaccccgtaacagagtaaggttttgcttcgttgttcaaggaacggcgcacacgaacgtacatgaacccatcctgcgatgcgactgcactacgggtgagttgaacgtcggtggacccctcggaaacataaatatctaa

SEQ ID NO: 270902 - DNA, 321 bp, Klebsiella pneumoniae
atgaatttgttaggttctaatcccgtgcggctttatccgttcggtatgcaggacgacaatatcgtttatccctacgcagtctggcaaaacgtaggtggcaaccctgaaaattatctaaaccagcggccagatgcggatcattattctctgcaggttgatgtctatggtgatactgacaccgacgtgatcgccgttgcccgtgctttacgcgacgcgattgagggcaaggcctatatcacccgatggggtgaacaaagtcgcgaccctgaaacaatgcgataccgctattccttcgatgttgactggataacgcccagataa

SEQ ID NO: 270903 - DNA, 321 bp, Klebsiella pneumoniae; identical to SEQ ID NO: 270902

SEQ ID NO: 270904 - DNA, 483 bp, Klebsiella pneumoniae
atgacgcagattaaacgcctctacgccagcagcggaccggaggtgatcattgaaacgctgcagatcaccattggctctgatgttcactacctgtgccagggttacgacaacattacggcaacgacggagaacggcgataccgtaacgttttcagcctgtgcgatagacattgcgctgccggcgcgcaatgcggacggcacgcaggacctcaaatttgccttgtgcaatatcgatggtgttgtgtccacggcgatccgcaatgcgctggctaaccgtctgtctgcatttctgacgtaccggcgttatatatccacggatttagcggcccctgcggaagtgccgtatacgctgaaaatcaagtcgggatcctggacggcgacagaggtgcagatcactgcgggctacatgaatatcctcgataccgcctggccgcgataccgctacacgctccctgtattccccggactgcgttatatcagctaa

SEQ ID NO: 270905 - DNA, 321 bp, Klebsiella pneumoniae
atgaatttgttaggttctaatcccgtgcggctttatccgttcggtatgcaggacgacaatatcgtttatccctacgcagtctggcaaaacgtagatggcttccctgaaaattatctaaaccagcggccagatgcagatcactattctctgcaggttgatgtctatggtgatactgacaccgacgtgatcgccgttgcccgtgctttacgcgacgcgattgagggcaaggcctatatcacccgatggggtgaacaaagtcgcgaccctgaaacaatgcgataccgctattccttcgatgttgactggataacgcccagataa

SEQ ID NO: 270906 - DNA, 141 bp, Klebsiella pneumoniae
atggcgaacccagtaatcctcgctcagggaggtgatttgaatatcacgacctgtgcgcggcgactgaatgaattttccgttgccgacgtagacgccgacatggtcggcagcgccccgtccgcgggtgcggaagaagactaa

SEQ ID NO: 270907 - DNA, 213 bp, Klebsiella pneumoniae
atgaaacttgttacaggaatggttgcatctctggtgataggcaccctctctttcggcgcattcgccgcgaaagagatccaaaaagaagacgtggcgaagatgaatctgaccaaggtcggtagcattacgacctccaggacgacgtcgccgatggacgcccgacgcgatctgtcgaaaaagccgatgagctgggtgggaaatactttgtggtga

SEQ ID NO: 270908 - DNA, 744 bp, Klebsiella pneumoniae
atggccacagcaagaccaattgaagatcgcgaggtgtatgactccatcctgaagggggcgaaacaatcaattcgtgtgtcaatgccgggggttattaagtcttttgacccggaaaccgttacatgcgttgtggaagtctcgatatatatccctaagccagagtcagcggaaggcaaatccattgaccggctggcgcaggacaatgttttctacccgcttattttagatgcgccggttatttttccccgcggtggcggctgtacgctaacgtttcccattagtgccggcgatgagtgcctggtgatattcgccgatcgctgtatcgacttctggtggcagaatggcggggtgcaaaatggctcaagggggagaatgcacgattactcggatgcgtttgttatccccggcccgcagtcgcaggcgaagaaaatcagcggcatcagcactacggccgcgcagctgcgtaccgacgacggcaccgcattcattgaggtgtccgccggcggggatatcactgccaccaccgccggcaacgcgactattaacgccccggaaatcgtccttaacggcaatgtgacgattaacggcaacctgtcgcagggtatgggcgagagcggcggcacggccacgatgcacggcccggtcaccgtaaccaacgatgtgacagcaggtggtaagagcctgatgactcacacgcatggtggggttgagactggcagcgggaatacaggagagccgcagtaa

SEQ ID NO: 270909 - DNA, 786 bp, Klebsiella pneumoniae
gtggatcagggtaacaaccattttgatgttgtcgcccggcattaccatctctacgccttccggcagttcgatggtgccagtcacgtcagtagtacggaagtagaactgcggacggtagcctttgaagaacggagtatgacggccgccttcgtctttggacaggatgtacacttcagattcgaacttggtgtgcgggttgatggtgcccggcttagccagtacctgaccacgttcgatttcttcacgtttgataccacgcagcagaacacctacgttctcaccagcacggccttcgtccagcagtttgcggaacatttcaacgccagtacaggtggttttcgcggtttctttgataccaacgatttcaacttcttcacctactttgatgataccgcgctctacacgaccggtaacaacggtaccacgaccagagatggagaatacgtcttcgatcggcagcaggaacggcttgtcaatcgcacgctctggttccgggatataggtatccaggtggccagccagttcgatgattttcgcttcccactctgcgtcgccttccagcgctttcagagcagaaccacgaacgatcggagtgtcgtcgcccgggaaatcgtactgagacagcagttcacgaacttccatctcaaccagttccagcagctcttcgtcatcaaccatgtcgcatttgttcaggaacacgatgatgtacggaacgcctacctgacgacccagcaggatgtgctcacgagtctgcggcatcgggccgtcagtcgcagcaacaactag

SEQ ID NO: 270910 - DNA, 1719 bp, Klebsiella pneumoniae
atgccgataacgaaaattttagataattttttaatatcagacgaaaaggttgctttatttaaaggcgagtggggagtaggtaaaacacatttttggaagcaatattatgccaaaaagagcaagacaaaagaaatccaacaaatagcgtacgcctacgtttccttgttcggtgtaaattcccttaatgagattaaaaaagaaatatatcagaatactgtgccgattaataaagttatgtatcgcgaaacggtttacagcaggagtgagattttagcggggaaattattatcaagtattcctaggctgctgaaatataacaagataacaaaaaacctttttaagtacatcggctttgattttaacttttacggtatcaaatcttcaggtttgagctcctctttagaatattcgtttgtaaacagatatcttatttgttttgacgatcttgaaagaagaggtaaatctcttgaactcaaggattttatggggtttatcgacaacctggccagagataaaaactgtaagataatattgattttcaatgaaaataatttaaaagatgatgatgaagagaaattgtttagtgcatatagagaaaaggtatttgatgttgatataatgtataatcccagtatcgttgataatgtaaaaagagtgtttcactctaacgataagaacgttagttatatcttattcgcctcaaatgaattgcaaattaaaaacatacgtattcttaataaaataaagaaaatattatatacatacgaccatttattgaattatgcacgtgtagaggtaagaaaagagtttgtgtatagagtagtactcttggcatacgttttttactctggggttaagggggtgtcatatagagatttttacaatcgaatccagagcatagctatgactgatagccactcaaagaaagatgacataccttctgcagttaaggattttatatctacgctacatctagaatttgtcagctcagaaagtttattcgactacgatattgatttttttcttaaaaatggatttattccatccaactcaacagttgaggatggtataaagtctagaaatagcgattttgatgatattgaattaaacggtaaaattgaacagatctggagtctcttcagagactcatttgcgttgaaccaagattacgttattcagaaattaaaagagttgttagatgaaaacttaccaagaattccattggggagaataaataacatttttttattattggataatttagggcataactgcgataactacgcgaatagatatgttgatgaacttgtaaaaaataacaaactaatatcagaatatcaaagattagctaatacttttatcgaacatagtactctaaataagttaataaaaaaagagttaatggttagtaagaaaaaagaatttggacttgatgagttaattactaggctttcaaacagtaataaatacacatcaatgcacattgaagcattaaattcctatagtgaagatgattattttgattggatattgacctgtgaggacgatgttgttcataaaattagaaatggacttctgaaatttgacaaccatgtaagtcctctacctatgcaagaagaaattacacgaaaagcaatggctgctattaggcgtgtcgcttcaacctcggagttaaacatgatgagagttgaacgtattttaaagatatctgttcgctag

SEQ ID NO: 270911 - DNA, 525 bp, Klebsiella pneumoniae
ttgccccacacacacaggccatacccacctcttcctgccaggctaccgaaaagaccaacctcattgccccaggctaccgaccccatgaaacaaacctcgaccaccaccaaaaagcggcgagagaaaggcaatttctctgaacgccattccccaatacacggaagagaatacccgggaagaaactccagacaagaccaggccagaacagtacccggcgccatatcgtttacccactcttaccccgaaagaaaacgcaaattgctgataagtagggaacgccattacttcacatgcggagaacgacaacagaccagaaaccacatcacccacactttcacctctcaaggtaaacgaaaggaaaagcgcacacgccattactccatacacagagaagaactatccccacaacgaagaatacagaccagaggaaaaccacaagacaaccacctctacaacatcagaaaaccacttaccggcagagagaagaaagtcgccttttctcccatacgaatggtcaccgtatag

SEQ ID NO: 270912 - DNA, 240 bp, Klebsiella pneumoniae
atgctcagacattcagacatacagaacgcattcaggaattcactatcgcaaaatccaaaaggatacctatgccttcgtaccagtgacttcatcagggagttgcgagggaaaggcattcacttctcagacgatgaggccaatcggtggattgagaggaaccagtcttgttttgcagacaaaacgcctgaccatagcgaaaaccggctgtggatgatggccaacatggggagggttctgtaa

SEQ ID NO: 270913 - DNA, 285 bp, Klebsiella pneumoniae; identical to SEQ ID NO: 201727

SEQ ID NO: 270914 - DNA, 696 bp, Klebsiella pneumoniae
gtgtcttactccactcccggtatgaacaagtggctccatcggaatggtttttcatggcaaaagccgactggcgtcccgcataaactcagcgaagaaaaacagcagcagttcatcgctgaatatgaggctctcaagcgcactgcgggtgataaagaacccatcctgtttatggatgcggtgcatcccactcagtcaacgaaacttagtggtggctggatacgccggggtgagcgcaaaccggttaaaactaccggcagccgtacacggatgaatatcatcggggcattcagcctgaacgacatcgcacggactgtgacctgcgattatgcgcagattaatgccatgagcatttgtgagttttttatcgccatcaggaagacttaccccgtcaggcagaaagtacaccttatactggatggtgctccatatcaccgggcctctctggtgcaggactgggcggtggtgatgaatattgaactgcactacctgcctccttacagcccgaatctgaacccgatagagcggttgtggaaggtgatgaatgaacatgcccgaaataaccggtattttgcatcagcgaaagccttccgggcggcaataaacggatttttcagcgataccctgccagaaatagcggggaaactgagctgtcgtattaacgataatttccaggcactcaaaccggcatcctggtga

SEQ ID NO: 270915 - DNA, 639 bp, Klebsiella pneumoniae
atgatcgggcgtaattatgttgctaagagagcttttatgccaaaccctatatcagataccaccattgatttctataaaaaacatgctcataaatgggatgaaataaggcaaaaatatttccgtgagaaatcatggatgaagcattttttatcagaaacgtcaccggagggaaatatacttgatatcggttgtggttctggtgatcctctggggggatatataatcaatcagggatataatctcacagggattgacacatcttcaccattaattgaactctgcataaaacgccatccttcgcataactggattgtaggcgatatgcgcacactatcactgaataaatcctttgatggtatccttgcctgggatagtttcttccatctaactcaggatgatcaaagaaaaatgttttcgctctttaaggcgcattctgacaaaggaacaatgctaatgtttaccagcggaacccaagatggggaagttatcggaaaatttcttggtgatgacttatttcatgccagtttgtcgccggaagaatatcgcagacagctagataaaaatggtttcgatattgttgaacatgtccaaaacgataggatttgtgaaagaacaatttggttagctaaatgtaggtaa

SEQ ID NO: 270916 - DNA, 1059 bp, Klebsiella pneumoniae
atgagtaacatttttacccctgccaaaatggggcgatatactttgtcaaaccatctcgttatggctcctatgactcgcagccgtgccaattatgatggtacgccgggcgacctcgttgttgagtattacgagcaacgcgccagtattggcttaatcattgctgaaggcacgcaaccttcggatgacggtcagggctacctgatgacgccgggtatttataccgaggctcatattgcggggtggaagaaagtaacgaatgcagtccataacaagggcggccatatcttcattcagttaatgcatgcaggtcgtatgtcacatcctgataatacaccgcatcatcgtcagggtgttgctccttcagcgatctcaccagccaccccgatcttcactccaaccggaatgcaggacattcctgttccacgtgcgctgtctactgaggaagttcgcaacaccgttaatgacttccgcattgctgcccgtgctgcgattgatgcaggggctgatggcgttgagattcatggtgctaatgcctacctgatccagcaattctttgcgccaagcgcaaatacgcgcacagatgagtacggtggttcagtagaaaatcgtgcacgttttgccatcgaagttgcggctgcgattgctgaagagattggtgctgacagaacgggtatacgtctgtctccaggtactgcaatgtgggggattgatgaaggggagcaaggacctgagctgtatcggtatctgattgcagagctgaataaactcggcctggcttatgtgcatatcatgcacctgggtaacgaagcgctgctgggtgatatccgtcgtctctggtctcaggcattgattgtcaatcgtccgggacaggaccgggcgaaaattggtcatgatattactgcgggtcttgccgatctggaatcttatggtcagatggtgctggcaaatcctgattttgttgagcgcctggaatcaaaagccgaaatgaataccgccgatcacacgacttattttggtggcaccgaggttggatacactgattatccaagcctggcataa

SEQ ID NO: 270917 - DNA, 477 bp, Klebsiella pneumoniae
atgagtgcacgtattctgaatcccggtgaaggccaaatgactggcgtagccggagacatctataccattaaagccagcagtcgcgatacgaatggcgcatacaccatcatggaagcgattatcccggcgcagaagggaccgccgccacaccgacattcacgcgaagaagaatcgttctttattctggatggcgaactggaattttttgcagatggagagcgaagtgtggcaggaccagggacttccgttaccgttccgatcggttcactgcattacttcagaaatcttggtgatacaccggccagaatgctgattgttgctgttccggcagggttggatgactattttgttgaagtcagtcagccagcggggacattttctgaagcgaatccgcccgcgatggatgaggcccagattaagaaaatgattgagaaagcgcctgattacggcattgaaatcgtacctcctcaacattaa

SEQ ID NO: 270918 - DNA, 873 bp, Klebsiella pneumoniae
atgcctactgaacaagttttaacaacatcagaaattaaaatcactcaccatactgccgtcgtgaatggagttcgcctgcattatgcgatggcaggttcaggtgagccgctggttctcctgcatggctggccccagacctggcgcgaatggtacgcgatgatccctgaactggctaaaaaattcactgtgattgtacctgatatgcgaggttttggcgattcagataaaccgggttgcggttatgacaaacgcacagtggcggaagacatttttcaattggtgaaccatctcggctatgacgaaattaatctggttggtcatgatatcggtatgatggtggcctatgagtatgcttcagcacatcccacaaaagttcgtaaactcgcagtgcttgaagcaggtctccctggcttaggactggagatgctgatggatggcgctaaattcccgcagttctaccatttttcattcttcattgcgccaggtctggcagaatcgttagtcgccggtcgtgaaaaaatgtttatcacccattttattcgtcatctggcttacgatacttatgccctcagtgatgatgacctgaatgaatatgctgaacgtctgagtgcaccaggcgcgttgcgtgccagcttcgaacattatcgtgccttccctgttgatgcggttaacaaccaagaaaacgccaggactaaacttactatgccggtgcttgctgtaggtggtgaatactgcatgaacgaccaggttggccacatcatgagtccgctggctgacaacgtccagacagcagtcatcgagcgcagtggtcactggcttacagaagaacaacctgaagagttaactgccgtattgttaacgtttttcgcctaa

SEQ ID NO: 270919 - DNA, 756 bp, Klebsiella pneumoniae
atgagtaacatgttaaaaatatttcgtagtaataaacatcgtcatggttcggggggatttggaattgagatcctctggccaggaatggttcagcaatctgatgacagcggcatcggtgcaatcggtcgtatcgaccatgcgaatatcaaaccgggcaccgttattccaatgcacccacataaagacgatgaaattctgacttatatgcgtaagggcagaatgcaacatctcgataccgtgggtaacgaggaagagatttccaatacccgtctgatgttgatgaatgctggccataccttccagcatgaagaaaggattccgggtaacaaagacgagtcgatgcagtgcttacagatattcgttcgtccagcagagactgacctcgccccacaggtacagtttcacgattttggcgttccctacagcgaaaatgcatggcgtaaaatcgccggaccaactgaagaagcacccctgatttttcgatctcaggcatggttacatgacgcgcgcctgctcgcaggcaatgagataaccttaccggaagtgcctgttaatggcgcatcaagaatcctttatgtatttgaaggcaaggcaaatatcggaagttatcagctcgaaagcggcgaaagtgtgcttatcaatgatgatgaagcgcatatcgtgacagcacaggatgacagtgatttggttctattcactactgaccctaacgctaaggtgttcaggggaggaatgtttagcggtaatatgcgataa

SEQ ID NO: 270920 - DNA, 807 bp, Klebsiella pneumoniae
atgaaatatatcgacgttaccgaaaactcgcttaattctctgatttctctgaaaggacgtactgccgtagtgacaggtggtgctgtcggaattggccaggcaatttgcaaacgactcgctgaggccggagccaatctcatcatcggcgatcttaacatcgaaaaagcacaagaaacggctactgaactggaacaatttggcggcaaacatctgggggctaagcttgatgttaatgatcatgcctccgtagcggaacttgctgaactggccttgtcgactaccggacgcctggatatctgggttaacaatgcgggcatttatccctctcgcccggtactggagattagcgataatgagtgggatcgcgtatttgatctgaacacccgtggaacatttttcggtgcccgtgaagctgcactgagaatggaaccgaataagggggtgattatcaatatcgtttccactgccgcatttaactccagtaatggtgcaaacccggcccactatgtcgcttccaaacatgcagttgccggtttaaccaaaagcctggctgtagaactggggccaaaagggatccgcaccgtcggcatttcaccgacattgacggaaaccccaggggtgaatagtaaacgagctgaaggagatgcggtcacggaagcactcgaggcatatgcaaaaggtctgccgttaggacgccttggtgttcctgatgatatagctcgcgtagtgttgtttgccgcttctgacctgggagcctttgtaaccggtagtattattcctgttgatggtggcgatctcgctcgctaa

SEQ ID NO: 270921 - DNA, 582 bp, Klebsiella pneumoniae
atgagctttgaaaaattcaccgctgacaattccgcaatgctgctgatcgaccatcaggtcggcaccatgggctgggctaaatccatgccattcgaagaacttaaacgtaacgccctgatgctggccaaatccgctgccattcttggcatgcccgtggtactgacttccagcatggaagaatacgctcagggaccactgctggacgagttgaaatcaattctgcctaaagagttcgagacccgcgttaaacgcatcggcatcgtcaatgccatggacgatgaaaacttcgctgctgcggttcatgcaacgggcagaaaaaaactgattatcgctggcgtaacaaatgatgtttgtactgtttacccggctctttcgctggcagccgatggctttgatatccaggtcgtcgctgatgctggtgcatcaccaacaaaaatggccgatgacattgcattacgtcgtatggacaaaaatggcatcacattaactaccaccaatcagctgattgctgagctggctggcagttgggcaacgcctgagggtgaaaaactggttcatgttctgatggaatccttccagtaa

SEQ ID NO: 270922 - DNA, 876 bp, Klebsiella pneumoniae
atggaactgcttaaccacatgtcttacttcgttgaagtcgtcaaagcgaaaagtttccgtggcgcagctgaggcgttaggcatgccaaactcgactctgtcgcgcaaaattggcgaactggaaaaaaccattggtcttcgcctgttgcatcggaccacacgtaaaattgagctgactgaggctgggcagatttactatgatcgttgccgccgaattgttgatgaagcccggttagcacatgagcaactgggcaccatgctggcgaaccctgaaggtttgctgagaatttcacttcctgctgatcttgctattgtggtcctgtcgccgatcatctgtcagttttcggagcgttatcctgggatcagttttgattttgatttgacgccaagaaatgttgatttagtttcggagccttttgatctggcaatacggatgggggtcctgcctgattccggtctgattgcccggaaactaggttctctgccgcgttatctttatgcttcccctcaataccttgcaacaaaaggcgtgcctgctacgcctgaagaactctctgagcacgagtgtttggtgatgcgccctgaaaaaaccaccacctggcatctgcataacgatgaagaaagagtcagtataaaagcctccggccggtttcagatgaatagtatcggtatgatgcgccgccttgcggcaatgggaatgggtgtggcaatgctgccagaattgattgtcgaggaagatataaagcgtgatgctctgataagggtattagccccctttgaagccgatgctgttaccatttacgcgctgacggaaacgaggttgctacctgcaaaagttcaggtattcattgagtttatacgtgagcatctgaaatga

SEQ ID NO: 270923 - DNA, 327 bp, Klebsiella pneumoniae
atgatgtttgaaaatattattctttggtccgtcattgtggtctttctggctggttttgctatcaatacattaggtcccaaaccagtacgggaagagttttcccgctggggcatacctaaatgggtccggcttgctacaggcataactgaaggtgttatcgctattctgcttatttttaaattgtggacaatggctgctctttttgcagccgcgttattaatgacagccgcagttcagatcgtactttataatcaggaaatgcggcgcgcactgatcccctttagcgcattgatactcgtactgatatctctggcgcagcatatgtaa

SEQ ID NO: 270924 - DNA, 717 bp, Klebsiella pneumoniae
atgagtgataacaaaaaaataagtccagtcgccgtggtggccggggcgggggccggaaatggccaggcgctggcgaaacggttttctgatgctggatatgcggttgccttgttggctcgcaatctggaacaaactcgtgctttggcgaacgaactccctaacgctaaagcctatgcttgtgatgtcgggaacaaagatgacgtttcggctgctttcgcaacaatccagaaggaacttggggctgtcgaagttctgcttttcaacgcggggtcaggcatatttgctgatgtagagtcgataacacctgaacagtttgaatcagcatggcgagtgaatgcgtttggggctttgttgtgcgcacagcaggttatacctgctatgaaagccagaaaaaaaggcagcattgtattcattggtgcaacagcttcgcgtcggggtggcgccaataccgccgcatttgctccagctaaagcggcacaatatagcctggccgaatcgatggcgcgtaaactgtggccagaaggcatccatgtttctgtggtggtgatcgacggtattgtcgatttaccaaaaacccgtgaaagcatgccggatcggccagaagatgagtttgtgtcaccagaagcagtggcagaggcggcctggttcatgacaacgcagccacgtaaagggtggagtttcgagactgaggtcagaccctggcgtgaaaagtggtaa

SEQ ID NO: 270925 - DNA, 774 bp, Klebsiella pneumoniae
gtgaataagctgtttactgatgccgactcaaccacgcctgctgtgattgccaggctcaattatgccaatcacgatagtcgtttccgtagttacgggctgagagcaggcggtaaatcagcgctgttttcaccatttcttggcgtggatcattactggatgggggcaccgacatttccaccacacaagcattcgggaatgtcggccgtgtcatacctgcttcgtgattctgaaacaggtatgaacaaccgcgactccatcggtactcagaacctgatcaagccgggaggcttgcactggacaacggcaggtcgtggagtggtccatgaggaagtccctgctgagcagggtaaaaccgtacatggattacagatattcgtggcacttgccccgtcaaagcaggagatagccccttttccgttgatgcttgagccagaggatgtgtcggtgattcaactaccaggtgccacgatacgcgttccgttaggaaattatgcggataagtattccccattgaccccaccgactgatgtgacgctactggatatcactctggaagagaatgcggaagttaagatccctgttcctgccgggcatttactctttgctatgcctatttccggcgcgatagagatacaaggccagagtttcagtctcaatgaccagaaattgccgttatttgcggcacaacacgctccgcgcgaaatcgcgttgagagcacctatgggaagcgtaaatgtcgtgctgttcagcgcacttccgctacgcttaaactga

SEQ ID NO: 270926 - DNA, 606 bp, Klebsiella pneumoniae
atggctcaagaacgattcacggctgaaaactctgcattactgctgattgaccaccaggttggcacgatgcagttaatcaaaaacattgattcccagcttgccgctaagcagtcaattgcgctggctaaaatggcaaaaattttgaacatgccaacgattatcacctcaagtcaggaaactaacgcccaggggccgattttgcctgaaatcgcgcaaattctgcctgatgagcatgctgcacgtattaagcgtcctggcgtggtcaatgcctgggcttaccctgaattccgcgacgcggtgctcgctaccggacgtaagaatctcatcatggccggtgtgaccactgacgtctgcctgatcttcccggcgattgatgctgcccttgaaggttttgccgtgcaggcggttatggatgcttcaggctctccaagtgacctgtccgaagagttctctcgccagcgtatgcatgacgcaggtgtggtgctgacagcgacgaataccctgatggctgagattgcacaggactggtctacaccgcagggtcagcaattgattggattgttgttcaccgacgtattcccggcactgggtgcgggcatttcctga

SEQ ID NO: 270927 - DNA, 1158 bp, Klebsiella pneumoniae
atgaacactgaatcaataaaacccaatactggcgaaatcactattatcggcggttcgctggcggggctgacactggcactcgcctgtgctaacaggggaattgctgtacaggttattgagcggtcaaccgggcattttcagggtggcgatagcctgagtatcgatctctctgtggtggcagctaccgtgggatatgacccgcgagtacatcctgttttacccgtggtgcctgcttatcgtgaattaaccacctggcctgcgctctacgggtggctgcgagaacgggcaatggcgacacccggtatcaacctcgttgaaggtaaaaccatcgcttcagtcaatgaccttgatgaccatgcacgcattacctttaccgatggcagcgagcaaatttctggcgtggttatcggtgctgacggttatcgcagcatcgttcgtcaggcgatcacgccggagaacccgttcgctcaatacgccggttatctggtatggcgtggactggtagaggaacgaacgctggaacatcccgttgcatggccgacagatggcgggctgtggattgattttgtcaatggttatcggctggttgccgcaacgcttcccggtcgggatggttcgctagcagccggacagcgtcagattactttcgcatggttcgacgtgcaccgggatgaattgctgcgccaaaaaggttgcctgaccgccgaaggcaatattgtgggaacgctaactcgcggaactatcgatgaaaaagtcagagaagaattggttaccctcgcaccacagctttggcccgctatctgggctgaggcggtagtcgcaggtgtacgttcccccacaatattaagcggtgcacccatcgctgagttcaaaccgccacggctggtacgtggagcattagcgatgataggcgatgcagctcacgtggtttcccccatgaccggacgcggctatttgaccggtgtagaggatgctatggtgctggctcaggaactggccaaacgcaaacccgatgtgcccctatccgcagcactggctcgctacgagaaaattcgcctgccttatgttcaggcgctggtgaatcattcaggcagaatcagtgctgaatatcgacgctatgcaaaatcaggcggcgtgggtttttccggggaaatataa

SEQ ID NO: 270928 - DNA, 1164 bp, Klebsiella pneumoniae
atgagaagtttgaatatccccattctcgctctggccctgggtgccttcggtatcggcgtcaccgagtttgcaccaatgggcatgcttccgctaattgctcatgatctcaatatctctatccctacggcaggcatcctgatcagtgcctatgccctgggggtgatgataggtgcaccattcatggcgctgacgaccagccgcatccccaggcgcaaactgttgattggactggtggcaatattcaccctgggtaacctgcttgctgctgtttctaatagttatggcatgctgctggtggcgagggtgattacctcacttaatcatggtgctttcttcggtattggttctgtggttgcagccagtctcgcccaaccccatcgccgtgctgcggccatttcctcgatgtttatggggctgacgattgcgaatgtcgtgggtgtgcctttggcgacctggacaggcgaagtgatgggctggcgggcggcattctggggcatcagcgggattggcgtattcaccatggctgcgctgtggaaaacactgcctgttataccggctccaaccggaaacaatgctgtcgcagaattacgtgtattaataagccgcccggttttggctgcgctcggattgacggtgttgagttccagcgcaatgttcacggtgttcacctatatcgttccgatgctgcgaattgagacacaggcttcaaccacctttgttacgagcatgctcgtcacctacggtgttggtctcacggtcgggaactggatcggtggtaaattcacggaccgctaccctgatcgcaccctggcaatatccctcgccgcattggttataacgctgctgctatttgcccttttattgccctatgccctgccaaccgcagcactggtattcctctggggtgtcgccagtttcgctgttatgcctcctctgcagatgcgcgtaatggccgcagcgcaacacgcacctagcctggcatcctcggttaacatcggcgcttttaaccttggcaatgcggtcggcgcggcactcggtggcgcggtaatcgctgccggactcacttatccattcgtagccgtagcgggtgcggtaacggctggtctgggtctgctcatgctgttgatattgaacaaatctacttctgccccaacgagtaactga

SEQ ID NO: 270929 - DNA, 1521 bp, Klebsiella pneumoniae
atgtacagaaaacacggcgcacttctgctgacagtctgtctgttgtgtggcctggagtttctccagagtggcatgatcgccttcgcttccgttcctatccggggagagattgacgccagccccgaggaatacagcctggttgctgctctttacgcctgcgttgcagtagtggttatcgcaaatcagcgctggctgaccgaacggctgggctggcgctattacatgatcggctccatcgtggtctacatcgttggtgcactgttatgcagcctgagtcatgatctctacacctttgctattggtcgggtggtcatggcgctgggtggtgcatcatttatgacaacatcacgcattctcgttaaccatatccctccggggcctggccgtttcgtcggtatcaaagtcttcgcagtcgggctggccagtggcaccgctgcagcaccgatgctcgcctcgcttgccgtcacacacgacacctggcaggcgatgttctgggtgctgattgcttttgcgctattggctgccggactctcggtgcgcttcctgcccaaagatccccacccagttgaggagcgcacacgcaccagccctgcgcgtgtgctactgctggcggtcggttcattttttcttctgtacgttttgcagcgttcttattacgacttttacgacgacaccggcatcatgctggtattcgccgggctggcaactttcgcactttatagctacttccatgtcgagcataaccatgaacgcccattgctgaaaatccgacagttaatgaccccgcgctacctgttaggtgtcggcatcttttctttcagctatctgatattgggttccaataactacatcctgccattcttcctgcaaaacggtctcgggtattcctgggaaactattggcagattccaggcattggggctatcggcagcactgctgacatggctggtgatgatgcgcgtactgcccaaatatccgtctccgaagaagttctttgtgctgggatttgtttcactggcaacgttcggctggctgctgtcttcactgacgcctgcggccaatatgtggcaacacatcctgcccgcactcgcgcttaacggctgttttgtcatgctggtactggcgaccacggcaatgcaaacctttcgtgatgtcggcaatgaagacaccttatttgcccatgcacagcaggtgaagaacatgttgggtcagattgcgatggcagcaggaaccagcatcgccaccatcttcatgcaatggcgcagcacggtgcaatacggggccttgaacgttcgactgaccaatcaggatcctatctttgcgcaacagttgcagcaattcagtcagttcttttcactgtcgcatgaagcgagtcaggctaaccagatggcaatggcacaagtcgcccagcagattagccagcaggcctcgcttctggccgggattgagtttttctgggtagtggtctgggtcgccattatcgccgcagttctttccgttatacagaaggtgttccaatga

SEQ ID NO: 270930 - DNA, 1191 bp, Klebsiella pneumoniae
atgaatcagaatacacaacctaatcaacccacaacaccgtccagtaatgcggatcagagcaaagtaacgcgcggcctgctgcttactgctgtggttatattgctggccgccggagcatggtatttcctgcaaagcaacgttgagcgtaccgaggacgcctacgttgacggtaacatcgtacaggtgacctcccagattagcggcaccgtaacctcgataaccgccgacaacaccgatcatgtgaaagcaggagcaaccctgatcacgcttaacccggtcgaccaggaagtccgcttcgagcgtgccagaactgagctggcaaaggcaacgaggatggcccgcacccagtattcgcaggttcaacagctacaggcagaagtggcgcaacgacaaaatgatgtccagaaagccagaaccgacctggcccgtcgtagtggactcgccgccagtggcgcggtctcacgcgaagaaatcagccataccgaagatgttttcaagaacgcccaggacgcattgaatgcggtaaaacagtctctgcaacaacgtcttgcaatggtcgatggcaccagcttgcgcacccatccggatgtgctcgccgctgcgaccaatctgcgcgatgcgtatatcgcacgcgcacgtaccaccattccatcaccggttgaaggcacggtggctaaacgcagtgtgcaactcggacagcgtatcaatcctggggtggcgctgatgtccgtcatcccgctgaaccaactctgggtcaatgccaattttaaagagtcacagattgaacatttacgcattggccagccagccgaactgaccaccgacgtctatggccgcaacgttatctaccacggcaagattatcggcctggacgccggtactggcagtgcctttgctctgctacctgcgcagaatgcgacaggtaactggataaaggtgactcagcgtgtgccggtcagaattgctctggatccacaggaagtcgccagacaaccgttacgtattggtctttcaatgcatgtttcggtcaatacacaggatcgcagcggtgaaaccatgcgggaagatattgcgcctggattcgtgtacaaaacggatgtctatagccaggaactgaaggatgctgacgccgttgtggaagcggtaatccgcgaaaacgaaggacagccgcagactgcggccgcgcaatag

SEQ ID NO: 270931 - DNA, 1449 bp, Klebsiella pneumoniae
ttgaatcactctccccacggcttacttcaaatggcagtggtcctggttgtcacgctgatactgacaggatgcgtgccaggggacttaaagacatcttcggtaaccgttaacccaaccagcctcgaagccaacaaagcgcttgaggggctctctgtgtcaaaagccaattggccgcaggaaaaatggtggcatgcttttggcgacacgcagcttaatcaactcattgatgaagcgctgttcagtagcccgaccttacgcggtgcagctgcgcgtgttcgccaggctgacgccattcaggggatggcacaggcacaacaattaccccaactggatgccaatattgccagcacacgccagcgttacagcgagaatggcacgacaccggccgtgatggctggcacctggcagacagtcaatcaggacaccctaaacgtcagctatgaactggacttctggggcaagaaccgcgctgccgttgaggctgcagttggccgaaccaaggcaatggaagttgatcactatgccactcaattgatgctgtcttcagcgatcgtccagacttatatcggattgcaagagagctaccagcagttgggtatagaacagcagatgctcaatcaccaggaaaaggtgctcgcgctgacacaacagcgtttttccgctgagctggattcgcaaattgacatcaaacaatctcaggccgcaatccctgctacacgcgcccgcatagctgccctgaatgaatcactggaactgagccgtaacaaacttgctgccctgctcggtaaaggcccggatcgtggacgcagcatcgctgcaccgaaacttaaacacttcgacacggtgactattcccagcgtattgccagccgagttgctggggcatcgtccagacgtggttgcccagcgctggcgtgtggaggccgccagccatgatatcgagggtgctaaggcgcgcttctatcccaacatcaatctttcagcctatgcgggctatcaaagtctcggttttgaccagttcgcctcagcgggcagtcgcatccttggcatcggaccggccataagcctgccgatcttcgaaggcggacgacttcgtgccaacctggccgcgcagaacgccacctacgatattgctgttgagaactacaaccagacactggtcgatgcattgcacgatatatccgatcagctcacgtcaattcgctggttacgcgaacgtattgagcaacagcaacaggccgtgcaaaccgcagatgacgccgcgagcttagttgaccagcgctacgcagccggactggcaacctacatccaggtactcaccactgaaaatgacgcactcgcacagcgtcgccagcttgcactgctccagtctcgtggcctggcgctggaagcaaacctgagccgcgccctgggcggcggctacgttcccgatttgcctgtcaataattaa

SEQ ID NO: 270932 - DNA, 639 bp, Klebsiella pneumoniae
atgaacgctaaaagcaaagtaagtgttaccaacgccggtgaaagcaaacacaaaggtcgtagccggttgtcgatcggtgcggttcgcagcccggaaagtaccgaggcaatcctgacggcagccgctgacatacttgaagagaatggttacaaggctttcacccttgacgcggtagtggcgcgtgcaggtgccagtaagcccactatctatcgttggtggggcagtaaagctgcgcttatccgagaagtatatgaacgttccggtgaggcgtcgctggttatccccgacacaggcagtctggagcatgatctcaatattcatcttggttcactgtggaattggtggagatctacccgttcaggtgaagctttgcgtagtttcattacggaaatccagcttaacccggaatcactggaagagtttcgcaaaattttcctcccaaggcgggagcgctcaatgcgccgtatttttgaccatgcgctcgcgcgtggtgagattaaagatgcatcagcaatagaagcggctgcatcaatgctgacaggtatgtcctggttgcacttgctcacaggtaatctggaagcaacgcaacagatcgagcaggcagtacatattgtgacaacagggctacgtgcgccttaa

SEQ ID NO: 270933 - DNA, 582 bp, Klebsiella pneumoniae
atgatcgtacagttagggacacctttcgcgatgattggtgcgatgatatttctcagagaaggaattacgccagtaaaaattgcgggcgtaattatttcccttgcgggcatggtagtactttcaggaagccctacgctgaattctttcaacggtgtcattattcttttgatgagcgcattgggatgggcaattaccaatattctcatcaagcaggacagaagcctttcaccgggagcaatgtccgggtggatgtctctgtttgccttaccgctgacagctgtcatgtcgctgatgtttgagaaaaaccagttagtcgctattcaacatgcttcttggcatgcatggtttgctctcatatacagtgcgattatttgctcagtcctggcttacagtctctggtactggttgctgagaaaatatgaggttaacaggatcgttcctttcaccttgttgagcccggcaatggcaattatactcggggtaatgattaacggggattctcttaacaacttaaaatttttcggttctacgctcattattttagcgtgcgtttctggcgacggccacaccgggtacgtttag

SEQ ID NO: 270934 - DNA, 357 bp, Klebsiella pneumoniae
atgtcatctatccacaccctgagtgtacatagcggaaccttcaccgacagccacggcgcagtgatgccgccgatttatgccacctccacttttgctcagccagcgccggggcaacataccggttatgaatattcccgcagcgggaatcccacccgtcacgcgctggagacggcgatcgccgacctggaaaacggcacgcgcggctacgcgttcgcctcagggctggccgccatctccaccgtgctggagctgctggataaggacagtcacctggtggcggtcgatgatgtgtatggcggcacttaccgcctgctggaaaacgttcgccgccgtagcgcgggtctgcaggtgagctga

SEQ ID NO: 270935 - DNA, 417 bp, Klebsiella pneumoniae
ttgctgatcaatggcgcgttgaacgtctgttcgctgctggcttgcgcgctgcttacgccgcagacgccggtctgggccatcatgctgatcctttatctcggcggggtgtttcgctcaatccagtttaccggtgtaagcacgctggccttcgccgatgtccccgccgcgcagatgagtgatgctaatacgctgttcagtaccgcgtcgcagctggcggtagggctggggatcacgctcggggcgattggcattcgcctgggcgagcaggtcggcgactggctgcatcttactgaactaccggggatcagcttccgcctgtcgtttgtgtttatcgccttgatctgtctggtagggatgatcgacagcctgcatctggccaaaacggccggcagcagcgtgtcggagaagaagaaatag

SEQ ID NO: 270936 - DNA, 531 bp, Klebsiella pneumoniae; identical to SEQ ID NO: 269180

SEQ ID NO: 270937 - DNA, 210 bp, Klebsiella pneumoniae
atgattattggcgcactgattttaaccattatcggccttttactcgctatcatgaccgggtatttatcggcaaataatctaagccctgtaccagccatgctgggagtcataggctcagtatttgttattgcagcacttgccctggcccatggcccgggcaacgtcaatacccagacttccatccccgttactcaggaggcaggtaaatga

SEQ ID NO: 270938 - DNA, 813 bp, Klebsiella pneumoniae
atgagggaaaactattattatggtcagggtaaggtgttcctggcacccagagataacaaacgcgcattccgttgggtcggcgatgtttcatcattgaaaatagcgttttcgtatgagcaacaaataacgaaagcatcacgcggcgggcagctctatcagaatcagaggatcattaccggggccagcggttcaatcagttctacctggcataatttctcggtggaaaatctggcgctgttattgggcgctcaaccggtggacgaaccgttttcatttaatgagcagttcgccttacctgatgggatcgttaaaggggatattatcgcgctcccccataccacggtttttaacgtcagtattaatgggctggagcgagatacagattatgttgttgaccgccagttcggcacgattgagtttcttgtaactccggaatctgcgggccttacagcggcatacgaacacctgtttaaccagtggctaccatttttctctgcgaaaactcaggatttttatttacgcttccagggggtgaatattgcagaagactcagcacctgtgttgctggaactgtaccgggtatctgttgaccctctggcagcgttggaaatgattagtagtggtaatagccttgcgagcattgacatgaattcactgattcttcctgactttgctcagaaggctgaaacagttttcagttattttgggcagatacagcttgcaacgccttattctccacaatctccgcaaacagccctgagatataacggccgggcaaattatgacggacaatatcagtatcgaggtaagtaa

SEQ ID NO: 270939 - DNA, 285 bp, Klebsiella pneumoniae
atggatgaattattcaaatggctgcttgcttttgtattttcagtatatctcttgctgtttgtattcagtaatgaccctgtaccagaagcgctcgcacaccactggactcatgactgccgcttgctggagaagaatattgataaaggtttattgtctcccacgcaaaaccggcttcagtgtggtgatgttattgaaaatgtcagtaaggctgattatgacagagcgataagtggcgataagcaaacaactctcgcagaggcaatgaaagaaatattcactcgttaa

SEQ ID NO: 270940 - DNA, 396 bp, Klebsiella pneumoniae
atgaactatctcaagaaagatactttaaatcctgaaggcgcaaatatcatcctgtttgaattatctgcttacagccgaatgaaatatattgagttcatggttgaagaaagaaaatcattacctacagaggggttgtcgccggatgagaattttaaaatagctactttgctgactacgcgtgatcaggcaatgattgtcgctttatctttaagtgaagcggatggagaggaacgcgacgggaaagatattttcccggagataatgcggaaatacccaccggggctattgggtagtgcagcattacttgtgcgtatgctttcagggatgatccccccagttaataacacctccgaggaaactgaagaagaggagtcgctggatttggaaaagtcctga

SEQ ID NO: 270941 - DNA, 378 bp, Klebsiella pneumoniae
atgtttacagtaaaaactatcattgatggcgtaacgcatatctgcgagcagccatccgtttcaattgcccgccgtggctcggcgacgtttgccgacacgctaaaactaaccaatcagtctggcagtcctgatttcgcttactggcaacctgccatttacgaagaccaggaaatgaaaaagatcatccaggaagaggagttagtaatcagcgaacgccggggagtgattgatgaagaggctgttgccatcctgattgaagagtatgccagccaaaagtttcctggcgctggtgatggctgccgctatcagttcatctaccctggcgaccaggtgtatgtaatgaactctcacggctcgacaattgaaaccgtgaagtag

SEQ ID NO: 270942 - DNA, 276 bp, Klebsiella pneumoniae
atgggcattgaaatgattattggtctggcaactgcgttcctgaccgtcgtcgctggcgcatttgggttaggccatgcccgcgggaccagcaaggcggaagccaaagccgaacagcagcgaaccgaagagaacgccgctgccagcgtcgccgtggcaaaacgtgaggcgcaatcaactaaagaggccagcaatgtacagcagactgttagccatatgcctgatgacgatgttgatcgggagctgcgcgaaaactttacccgccccggtggtggttga

SEQ ID NO: 270943 - DNA, 303 bp, Klebsiella pneumoniae
atgttcctgccacttagccataacctgatagctattagcttcgatttgtgcacgttcgctacggtcgataactccatcagctgtagctttccgaaggtattgagagtgtttccctatccactcaaccgactccatgagtctttggttgatgtcgccgttatcaacttcttcaacatcagcaaggggaacgaaaacaccaccggaggctttagcaatggcattagcgatgtgatgagagccaccagcgcgctgaaggaccatcgcccaaccaaatgggaagacctgatcaccatcagcacgtag

SEQ ID NO: 270944 - DNA, 579 bp, Klebsiella pneumoniae; identical to SEQ ID NO: 206568

SEQ ID NO: 270945 - DNA, 144 bp, Klebsiella pneumoniae
atgaacaaacaagaactaatcagcctactgatgaatcgctacaacgtatcctggcgcattgctgaagatgccctgagagataacgattgggatctgatgatggccgctggcgatattcgcgatgagttggcctccgaagtttaa

SEQ ID NO: 270946 - DNA, 564 bp, Klebsiella pneumoniae
atgaatttcttcagcacgctatcccaggtcactacaaccgaggagccaatgccggtttcaatcagctctgccgcgttatcaaaactggtggcgccgctgaggttgatagccgcagaagtctcctccgtaccatcaacggtcagagtcagcgtacccgaaagcaacttgagctgcgccagcgtggtcgcggcgtgcgatccggaacgaaggaatgccgccactgctgcagtattgaatcggctaaaatacagtttgccaggcatctgcgttttaccggtgaaagcggcgaaatacagcaccgcggcggtgtactcaatcgacgcgctgccgaagtacgcctttacctcatccgcactggaaaatgagggtactgcaccaaccggcgcgtatgcgctgtcggtcaggaacaggccattgagatcaatagccgtccctgtcgccttcagtacgccgggaagcatctgggcgatttttgatagcgaaattgccatttattatttctccggaggaaatctcacgtcgaccggctgcgatatcacatctgcgcctgtcataaactgctga

SEQ ID NO: 270947 - DNA, 606 bp, Klebsiella pneumoniae
atgcagccaacaataaacagaagaaaggagattcgaaagattgacttcggtcttctgaaacatctgttcgccgtcctggatcacgaagtggcaaacagccggcaatttggcgaattcgtttctctggacgcgccggtcgaagcggatgcccaggacgtcgccgaggccatggtggaagaggaagtcttcgaattttatcagcccgatgacacactcaggctggccgatatcatcgctgacagtcagcatcccgatgccgcaacgatcgcggaagagcaggagctagttgatcggtcgagcgagttcgcttttgcattcgacctgctgaaggacatgccgcgtttgtggcggcgcatttttctgcttatccgtgtggacgggctggatgccagcagcgtctctgagatcctgctgattcctagtaaggaagatactctccaaaggtggctcatgcaggccgaagcattcatcgctgctcatctggaagaggccggagtaagcaaaaacgggaacgattggctccaaggcgttgattggtcggcattgtctgtgacccgaagcgaggcaacctcaccgcagtccaagcaagcgaaccatgaaaaatga

SEQ ID NO: 270948 - DNA, 318 bp, Klebsiella pneumoniae
atgatcaaccgcaacaaactggagcacattctcgaatacgccagacagcagaggcacatcggccagtcctgcaaggttccgccagaagatatggtcgaaatcatggaacgattgctcagcgctggcaactctccggtaattccagaggggtacgtgatggtgccgaaggagcctacggaggaaatgcttcaggcttcctatcgtgaagcgtccgtgtatagcccaacggcttatcgagcgatgattgcagccgccccgcaggaggctattaacgcattgattcatttagtttcgcggaatgagcgggaggtgaaatga

SEQ ID NO: 270949 - DNA, 699 bp, Klebsiella pneumoniae
gtggcgggaagctcgaatgcactggtgtacgacatcatcaacacttacgcctataacgacacctgcccggtgtatggttacccgaaccacgcagcaaacgcgatggggtttgtggccgcgctgaacttcacgcaggccaatgggcgctgttcgctgaatggccgtcaggtgtccggcctgttgccgatgatcagtaacgatactgattacgaggcggccaaggccaacggctataacttctacggcaactatgcctcgaatgccgtcgaaaccaatcagtgggtgtccggctctattaccggtgattacgcgtggcttgacgcctgggctggtcaggtatgggtaaatgctcagcttcaggcagctctcgttgcgctgttccagcaggcgagtaatctgccctatgctgcagccggaaaagctcgcattgaatcgtgcatgaagccgaccattgagcaattcagggcgtggggcggtatgacggcgggcactgaccttgaccagtcgcagatcgaccagattaacgccatcactggcgtcgacgttacggattctcttctggctgaagggtattacatctacatcggcccgtttaccccggcaatgcgcgcctcgcgtaccaagccaacggtttacttctggtacaccgacggcgggatcatccagggtattaccgttaacagcgtggaggtgcagtaa

SEQ ID NO: 270950 - DNA, 645 bp, Klebsiella pneumoniae
atgcgttatattaaagaacttgaaggactccgcgggctaatggctctttgggttgtttttggacatagtcttgcggccctgccacttattaatacgcatttgcctccaaccgcgttaaattcgtatgccgtcgatgtttttattatactcagtggttttgtcattttttttatgatagataataaaaagcaaccctatcttcaatatatcacacaacggttttttaggattttcccgttatatatattggtccttattgttagtataatactaatcggttttacgagagatgtttttttactttatcccgaagcgcatgcaacgacgcgtcgtattgcacttattgatgaatatttagaatatccggctgctcactttttggcgcatataacccttttacaaggacttattcctggttttttattgaaagacagcgcttatactattgttggccaagcttggagtatttcagttgaatggcagttttatattttggctccttttctgttttttttggcatcccacctccggtctcccaggaacattattgttttgtttttaattgcagtgtttatgcttgtatttggcttttatttgagtggggggtttttaggggctttgttgaataaatcgaacttttgctga

SEQ ID NO: 270951 - DNA, 558 bp, Klebsiella pneumoniae; identical to SEQ ID NO: 145585

SEQ ID NO: 270952 - DNA, 1110 bp, Klebsiella pneumoniae
atgagcacgaacctcaagacgccgcaggggcaactggctgtcactgatactgcaatcatcgctgacaaaaacgatcagcttctggctatcgtcaacaacatgaacccggacttttcctccggcaggtttcaggatggcatcggcaggatttacttcctcgaccgcattgctgcggcgggcaccgttgtaacggccacatgctccggcgtgccgggaacggtaattcccgcacagtcctatgtaaccgacgataacggctatatgtacgtgtctttggcggccggaacgataggcgcagacgggacggtaaaaatcgagttccagaacctgactaccgggccgatagcctgcccaatcgggacgctgacaaacatctatgttgcggtaagtggctggtcgagcattaccaacgagaccgcaggcgttccgggatcaaatgtggaagggcgatctgcctttgagtatcgtcgccgtcagtcggtagcgcgtaatgccttcaacacggctgcagctgtgcgggctgccgttctggaggtcgacggggtgcttgatgtttatgtcatcgataacaaagagccgacttccgtcgagaaaggttcaacgaattacacgcttctggccagctcaatttatatcggggtttatggcggggcggtcgctgacattgccgcggccattaataataagctaccccccggtaccgtcatgaacggtgacaccaccggaaccgtgcaggataccgaaaattatgacgccccttatccggagtacacctacaggtggaaaacgctggatgcggtgagcgttcatatcaaggtggaatacgaggcgaatgatggccttccctcggatatcaacgcgcagatcagaacggtcgtactgaatgccttcactggcgcagatggaggcacccgggcgcgtgccggcgcgcgaatttatggcagccggtttatcggccctatccaggcgctcgatgcacaaaacatgaacgttctctcggtccagatctctctggacgggaccacctggtcgagcgctttgaccatgggtattgatcaggagccgactcttgatgcgacaaacatcacaacggaggcggtaagtgaataa

SEQ ID NO: 270953 - DNA, 612 bp, Klebsiella pneumoniae
atgaatacagacgccatcaccgattccagtgcggatgagcccaccaaaacactgtgttcattgaccgaaaattggtggattattgcgttgcgcggtgtcttggcattgattttcgcagcccttgcgttctggatgccacaatcggctctgttggccatgaccttagtgttcggcgcattttccttggtcaatggcgctttcaacttggttgcagcggtgcgccatatccagaaaaaagagcactggggctggctgctgttcagcggcattgtcggcatacttaccggcgtcgtcgtcctggttgctccttgggtcgccacgatggtcatggcttcttttttatgggctagcgtggggttctgggcgattttcaccggtgtgctggagatatccgccgccgttcggctgcgtcaagaaatcaagggtgaaatctggcttgccttcagtggactgctctcgattttccttggtgctatcgtcttgtggatatttttttcccgtccggtcgagtcattcctggccgcaggctggctgttgagcttctatgctgcagtctatggtgtcacgcttttgttcttgagttggcgtcttcgcaaaacgcgccagggataa

SEQ ID NO: 270954 - DNA, 366 bp, Klebsiella pneumoniae
gtgccgctgatcgatcagggcaagatcgaagaagccaaagccgcgctgcaggcagcgctcagcacgttggtcgagacgcgcagcgtgcatccgctgcccgccctgcgcgccaggctgctcctgaagcgcgccgagaccttggtagaagatggtcagcggagcgaagcgtccaatgagcgcctggagacattattgaacgaagcgcggcagcagttggaaatggcagaactgctgggctatggaaagaagaaggactttgagcccctgtatgctgaactcaagaaagtcaagcaaaagacggctgggggaggcggcggaaaaggctggctcgatgaaatcaaggcaaagctgtccaagttgttctga

SEQ ID NO: 270955 - DNA, 483 bp, Klebsiella pneumoniae
atgaacagcaacaatcaggtcaaacaattacggctgcagcgcgcctggtcccaggaacagctggccgaaatggcgggtctcagcgtccgcacgatccagcgcattgagaatggcgaacgcccgggactggagaccctcagcgccctcgccgcggtctttgaggtgacggtggccgagatcggcggcgaagcctcgcgggagggcgcgccgggcccggaagcctcgctggatctgcgtatagaggaagcgaaagcgcgggtgcagcaggagagccgcttttttcgttcgctgtcggtggcgctggtggtctgcgtgctgctggcgctgctcaaccggtacactaacccgcagtacacctggtccggctgggtcgccctgatctggggcgctctgctggcggtgagaggattacgcctgttcgtgttcggcgaatggatcaaaaactggcgccaggcgcgcctgcagcggctgctgcgtaaatag

SEQ ID NO: 270956 - DNA, 558 bp, Klebsiella pneumoniae
atggggctgatcccggcgcgcagcggtgaggtacgctggcaggatcagaacattacccaccgtaaaccgcaccagcgggtacaggccggggtggcctacgtccctcagggacgcgagatttttccgcgcctgacggtggaggaaaacctgctgatggggctatcgcgctttcccgcccgcgaggcgcagcaggtgccggaggagatttaccagcttttcccggtgctcaagaccatgaagcagcggcggggcggtgacttatccggcggccagcagcagcagctggcgatcggccgggcgctggccagccgtccgcagctgctgatcctcgatgagcccaccgaggggatccagccctcggtcatcaaagagattggcgaggtgatccgtcagctggcgagccgcggggatatggccatcctgctggtggagcagttctatgactttgccgccgggctggcggaccactacctggtgatgtcgcgcggcgccatcgtccagcagggcaagggcggagatatggaaaccgacggcgtacgcgccctggtgactatctga

SEQ ID NO: 270957 - DNA, 135 bp, Klebsiella pneumoniae
atgaaaaagcttctgatatgttgtttgtttggcaacactgccaattctctcgccaaaaagatacagttactggcggaaaaaaagggccatcctctcattgtcagcgctgccctgttgagacgcttcagcccgtaa

SEQ ID NO: 270958 - DNA, 957 bp, Klebsiella pneumoniae
atgatgaatagcatgcagtctgcgggcagtctccactattcaaccgttggcgttaccgagtcgcgccgcttcgagtactggaacgacgtagtgttacgccactgtattccagccgccagcgcccctctggctggggtcgactttgatgcacggctgacggtacgtggagtgggtctggtggatatatgttcactgtccgcgccgctacacagttgggatcgcacggcccgttatttgcgccagggccccgacgacgatctgtggttggggtatatgcaggatggatacggtcagcttgaacaggggggacgcaaggcgacgctggcagcggacagtttggtgctctacgatgccgcccagacattccgcttcagtcttggcgggcgcgataatcatctggtgcggatcccccgccatttgctgagctgtcatttacctggggtcgaacacctcaccgcgatggtgctcgacgaccgccgcccgggcgtgatcccattgcgcgaaatgctgcgtcaggcggcagcgatgcccgcctgtctggacacagcggatatctccggccgtttctcccagacgttgctggatctactggtactgagcctggagctacaggacctgaacaacgttggtgttgagcgcgatctgtattcccggatgatgaactacatccggcggcaacttgtcgatcccgatttgaacatcgaaaacctggcacgggcgcaccacgtttccgttcgcaccgtcacgcgtgctttcgcccgccataaaaaaacgccgatggcagtgatttggcaggagaggctgcaggcgagccgagaggctatcgaacgcggacgagtcagtagcgtgtcccaggcggcgctggatttcggcttctctgatttctctcatttcagccatgccttccgcaaagccttcggcatttctcctcgctctctgctgccgaagaagcagtaa

SEQ ID NO: 270959 - DNA, 894 bp, Klebsiella pneumoniae
atgactttcagtaacgctacgtttcgcatcagcctggccgcctgcacactgtggctggcaaccggcccggcccatgcggtcgatctcaattcacaggacctcattcccgcccccgccggcaccgatgccattctgggatatttcacctacgcgacgagagatagcttcaccccgaccgggggcggtgaatttaagcaagagaccgggctcgactccttcgtcagcatctttcgttacgttcactacatggacgtcggtggctttacggttgcgccgcaagtgctgctgccttacggacgcctctacaatggctcactaaacggcgtccgacttgattcagccagcggcctgggcgatcccatccttgccgcgccggtctggctggtcaacaaccccagcacaaccttcgccattgtgccttacctgtacctccccgcgggctcctacgacgccggacgcacgctaaacgttggtgaaaatcgctggaagttcgacctgcagctcggcggcgtgcagcagctgggtaacggtttcgccacccaactgtccacggacgtgatgtggtatggcgtcaacgacgacgcctcgggcatcggcaccggtcgactcaagcaggacaacacctatcagtttcagggttgggtgacctggacgccgcccgccgataagagctggaccctggccgccggttattcccaatactggggcggcaaacagcagattgacggtatcgagaacggacaggcgacgcgcgtcgatcaggtacggctggaattatcgaaattcgtcacccccacggtgcaggtacagggtctgctccagcgcgatctcaacgtcgatggcggttttaaggaagatctgcataccaccctgcgcgtgatgaaactgttctga

SEQ ID NO: 270960 - DNA, 1515 bp, Klebsiella pneumoniae
atggctattgaacgtcctaccattgaacagctgcaagcgctcgccagtcggctaaacatacgattgacgcctgcacaagccgaagaatatctggcgctgatgcaggccaatttcgacgcctatgatctcatcgacgccctgcccgacgagatccccgcggtgcactacccacgcgccgccggctatcgtcctgaaggcgacgaaaacccgcttaacgcctggtattacaagaccgaggtgacaggtgcagcaaccggtaaactggccggccgcaccgtggtgctcaaggacaacatcgcgctggctggcgtaccgatgatgaacggcgcctcgacgctggaaggcttcgtccccctctacgacgccaccgttgccacccgactgctggatgccggcgcgactattctcggcaaagccacctgcgagcacttctgcttgtcgggaggcagccatacctccgatccggcgcccgtgcataacccgttgcgccgcggctactcggccggtggctcatcttctggcagcgccgctttggtcgcttccggggaagtcgatttggccatgggtggcgatcaagggggctctgcgcgtattcccgccgcatggtgtggcctctatggcctgaaaccgacccacggtctggtgccttataccggcatcatgccgatcgaagccactttcgaccataccgggccgatgacccgcagcgtaaaagacaatgccttagtccttgaggtcattgccggcgcggacggattggacccacgtcagtatgctcccaaagtggaagcctataccgaggcgctcggtaagggagtccgtggcttaaagatcggtattatggccgaaggttttcagttgccgaacctggatgcgcgagtcgcggagaaagttcgcgctgccgtcgcccgtctgcaggaattgggcgcgacggtcggcgagatttcggtaccggagcatagcctggcgggggcgctctggtcccctatcggctgcgaggggctgaccgcgcagatgatgcatggcaacggcatgggctttaactggaaaggacaatatgacgtggcgctgctggacaagcacgcccagtggcgtgacaacgccgatgcgctttccccatcgctgaagatatgcatgttcgtcggccagtacgggctggaacgctaccatggccgctactatgccaaggcgcagaatatcgcgtgtcgcgcgcgtgcgggctatgaccgggcgctggcggacttcgacctgctggtgatgcccactgtaccgcttgtcgctcagccattgccggaacctgactgctccattaccgaatacatctcccgcgcatttgaaatgatcggcaataccgcgccgcaggatattaccggccatccggcaatgactctcccttgtgggctggtcgacggcttaccggtaggaatgatgttggtaggacgccacttcgccgaaagcaccctttatcaggccgccgccgcatttgaagcttccggcgactggcggatgttttaa

SEQ ID NO: 270961 - DNA, 609 bp, Klebsiella pneumoniae
atgagccatcaacacgaccacgaccatactgaaccgccggcggacatcgagctacgcgtccgggcgctggaatccctgctacaggagaaaggactgattgacccggcggcactggatgaactgattgacacttatgagcacaaggtcggcccccgtaacggcgcgcaggtggtcgctaaagcgtggagtgatccggagtataaacgtcggctgctggcggacgccacagccgccatcgccgagctgggtttctccggcgtgcagggcgaagacatgcaggtagtggagaacacgccggacgtgcacaacgtgaccgtctgtacattatgttcctgctacccctggccggtgctgggtctgccaccggtgtggtacaaatcggccccctatcgttcgcgtatcgttatcgacccgcgcggcgttctggccgaattcggggtaaacattccagaaagtaaagaggtgcgcgtctgggacagcagcgcggaactgcgctatctggtcctgccagaacgtccggcgggtaccgacggctggagcgaagcgcagctgatcgaactggtcacccgcgattccatgatcggcaccggcctggtcgccgcgccataa

SEQ ID NO: 270962 - DNA, 654 bp, Klebsiella pneumoniae
atgaacgggatacatgatctgggcggtatgcacggcctcgggccgatcctcaacgaggaaaatgagccgtatttccatcatgaatgggagcgccgggtatttccgctgttcgcctcgctgttcgtcggcggacatttcaatgtggatgaattccgccacgccattgaacgcatggatccagcccactacctggaggcgagctactacgagcactggttgcacgcatttgaaacgctgctgctggaaaaaggggtgatcaccgccgatgaactctggggtggctcgacccctgccccctgcgcgccgggcacgccggtgctgacgcaggacatcgtggcgatggttgtcagtaccggcgcctccgcgcgcgtcagtcacgatattgctccccgctttaaggccggagaccgggttcgggcaaaaaacatcaacccaaccacccacacccgcctgccgcgttacgtgcgcgggaaaatcggccgtattgagaccgatcacggcgtgttcatcacgccggacactgccgcgcacggtctgggcgaacatcctcagcacgtctacagcgtcagcttcaccgcgctggaactgtggggcacgccgcgcccggacaacgtgtacatcgatctgtgggacgactatctggaggaagcatga

SEQ ID NO: 270963 - DNA, 468 bp, Klebsiella pneumoniae
atgagcattgcgacacagcatgattacgccgccgtcgggttaccccgcgacgaggaggggccggtttttgataagccctggcaggcgaaagcattctccctgatcgtccatctgcaccgggcggggctgttcccgtgggcagaatgggtacggacgttcagcgaagcgatcaaggcggctccggcgcaacccggcgaaagcgtgaacgatgcctactatcgccagtgggcgacagcaatggagaacatgatcaccgccctccacctgaccgcgccggatgacattgcccgacggactcaggaatggcgactggcgtatatcaacacgccgcatggtcagccgatcgtcctggccaatgccagctgtccgccggcgcatcaccaccactcgcttccactcggcgttccggtcacggtgagcccggcacaatcttccatcagccaaattaacaacggagtcacatcatga

SEQ ID NO: 270964 - DNA, 210 bp, Klebsiella pneumoniae
atgagcgatatcacccttaccaccaacaccccggccactccgataccggtcgcggcgctgttgccctgggcactgtttaccaccctgctggcgctgttagcgatctatttcgtcggtgcggaacaaggtgcgacgtcgatgttttccggcacccaggtgcatgaattcttccacgacgcacgccatctgctgggttttccctgccactaa

SEQ ID NO: 270965 - DNA, 756 bp, Klebsiella pneumoniae
atgattgggaaactattattcaaagggatgatagcaggcattttggctggactggtggcatttgcctttgcacaccatttcggcgagccgcaggtcgatcgcgctatcgggattgaagaaagtctggccgctcaatcacaccaacacagcgcgtcgactgacggcggtgaagaagaggtgtttagccgtcaaacccagtccgggatcgggctaatggccggcatggtgctgttcggcgcagcgctgggcggcggtctggcgctgagttgggcctttagctatcagcgcttcggaccatcgaacccgcgtctgttagcattaggcctggcgctggtcggctttctggtcatgagcctgatgcctggtctgaaatacccacccaatccgcccgcggtcggtaacccggataccatcggctatcgtaccgaactgtacttcgtcatgatgttgctttccatcggcatcgtcatcgcgggcgcgtggttatcacatcagctaataccgcgcctcggtagaggaaatgcgatgatgtgggcaacgctgttcgcggtggcgctgatgctcgtggtttgtgccctgatgccgacagtgaacgaagtgcccgaacacttcccggcggacctgctatggcgtttccgtatcagctccttcggcacgcacctggtgctctggagcgtcatcggtgtggcgttcggtgccttagccgaacgcacgccggcgacaggtgtgcagcgcccagccttccgtcgcggttaa

SEQ ID NO: 270966 - DNA, 588 bp, Klebsiella pneumoniae
atgagagcgtcgctaacgttgatttgtcagggagaaacggcagcgtcccgaggttcacatttcccctgtgatgaccctctggaggcgcgggaatggcagcgggcgcgtcagttacaaagccgtgtcgcccgttgtcaccgcgtctggatctccccggagaccgccgcccgacaaactgccgcagcgctctctttacagggtaccccggtgatggagctggcggaacccgactacggcatctgggccggtcggccagtacgtgaggtgatgacgcaagacgccgacgctttcctggcctggctggagggcgatccgccgccgggcggagagtcacgtgctcagttgctggcgcgctgtggccgttggctggcaaaacacgtcgatattcagggccgacacggtgtaattgcgtctgcctccactatccgtgccatgatcctcaacgttctcggcgccccacttcactcatttgcacgtatcgacgttcacccgctcagcatcaccgagttgcgcagtgacggacggcgctggaatttttgtttattaagagatgacataaagggcgaatgttcgacggtgtcccgctga

SEQ ID NO: 270967 - DNA, 345 bp, Klebsiella pneumoniae
atgaacgggattgatatcgtctgggcgctgttaacgctgttatcagtggtcctgtttatctccggcgactggctggcgcagcgaaaaatccgcctgctcaattatgtcctgctggcggcgctgttcatttatctcgccgacgtttttcagaccatccagaatctcggcaaaatgggctacctgttccggatgctgacctggaccattcaggcgtcgtttatctccctcagcctgtaccgcgtctggaaccgaccgtggtttgcccgctgcagcgcaggcgcccgggcgatgggcattgtcttcgccgcagcccttgtgtcatgcttaacgctgctggtgctttaa

SEQ ID NO: 270968 - DNA, 381 bp, Klebsiella pneumoniae
atggctgaatttttaattaacactgaaaatatctttcttaaacgaggcatttgcgaactccttatcgaaatcgcaaacgaagaaaacatcagtacccccttttcgcttcaggaatattcaccagacaccattggtcagactgatgtgctgtttacggaaatggaaacggatgaacattatctgtaccacccgttctataaaaaaatacccgtggcaacgtctgtttttgttttcgtcccctctgccagcgctgtgcgagttgaccggttaccgcagtgtctgcgtgatgccacctttatcagtatgaacaccgttctgcgcagtatcaagaatcagattgctaaacgtctgaacggatttaaaaaccaacgcctgggctaa

SEQ ID NO: 270969 - DNA, 483 bp, Klebsiella pneumoniae
atggtcccgatgaaggatattgccagagaggctggtatcggcgtggggaccctgtacagacactttccccaccgtgccgaccttattgcggcggtatttcgcaacgaagtggatgaatgcgcgaccgcagcggaacgtctgtgtcaggccttttcccccagtgaagcactggagcagtggattgcgctttatgttcagctcatcgtgaccaaacgtggtcttgccagcgtactccattccggtgaatccgcttatgccgatctccccacctattttgagacccacctcgtcaggtcgctggagaaattactgcaacgtgcgacaggagatatcccggataatgtgctggcgacggatgtgctaagaggtatcgcgctgttatgcgcgcccgccgccgcgggtgacttggcgcagacacagcgactggtaaacctgttcctcagaggtctccgctataacgaggctaaccctggcgatgaatga

SEQ ID NO: 270970 - DNA, 891 bp, Klebsiella pneumoniae
atgatgaagatactgttaaccggcgcaaccggttttattggttcttatctgctaccagaattgctccgccatgggcacgaggtcatcggcctgacacgcacggataaaggcgcgaaggcggtagaggcgttcggcgccaaagcactgtttggcgagttaactgacctgaaaagcctgcgcgacgctgcagcttccgttgatggcgttatccacaccgcgttcaatcatgatttttctaaactcaaagagaacagtgaagtcgatcgcagggtaattgaaacactgggggatgcgctggccggaagtcaaaggcggctggtggtctcttccgggacaggtctcgtcgaccgtagcagaacccatggccttgcgcgtgaaacggatgcgccagtctcctccaccctgtttccgcgcggggcgacagaagaagccgctgccagagtactggccagaggggtaaatgtcgtcgtggttcgtttgtctcaggtgcatgatacagcgcaccagggccggctggcggaacatattcgtattgcccgggagaaaggctttgtggcttatgtggggcaaggtgaaaatcggctttccgccgtccatgtcaccgatgcagccagactctaccgactggcgctggaaaagggtgaaaccggcgcccgctaccacgcggtggcggaagaaggcatccctatgcatgctatcgcagggcagctgggtgaaagtctggggttacccgtgcgcgccatcacggctgaggaagctaacgcctattttggctggatagccgccctggcgcatattgatctgggtgcttcaggtaaagcgacccaggcgcagctggactggttacctgccgggcctgggttgcttgaagatttacgcaatatgaaataa

SEQ ID NO: 270971 - DNA, 723 bp, Klebsiella pneumoniae
atgacattttcattaaacatcgttgactggcaggcttttgcgccgggcatcactgatagcgaacagtggcagctatgggcacggcatcggcacgccatcgatccagcggcgccggcggcaaaactcagcgagttgtcgatgatgacagctcgccgactcagctcaggtagcaaactggccgtagagtgcggactagcgatgctgcgtcgccatgaaatcgatgccattctctataccagccgccacggcgaactggagcgcaactatcggatcctgcatgcgttggcgatggagcaagcagtctcgccgaccgatttcgccttatccgtacataactccgccgtgggtaacctgacgattgccgcaaaaaaagcgattatgtcgtcatccctttctgccggacgcgatacgtttcagcaggggttatatgaagtgacaggcctgctacaggcgggttatcagcgcgttttgatggtcgatttcgatggtttcctcccggcgttttaccatgctcagttgccgcctgggatacccacctggccctatgcgaccgcctgggtgatcgagtccggtcgtgagtggcaatgcaaagcgcagcgccatgaagccgttgctgaatgtccattgccgcaaagtttactgtttttgcagtactatttgcaggacggccgaacgttcacccttccaggcgatcgcgtgcaatggcaatggagtcgcgcatga

SEQ ID NO: 270972 - DNA, 1350 bp, Klebsiella pneumoniae
atgaagcagcctctcccgctggaccagtggctcagcgccccgcgttcgccggaaacgccgatcgcgtggcaggacgcccaggtctggacgctcgcgcatctgcgccatgacgttgtccgcctgctcacgcacttgcgacagcagccaggcgcgcgctgggcgctgtgcattgaaaatagctacttgtttatcgtcgccctgctggcaacgctgcatgccggcaaaacgcccgtgctccccggccacgctcgcctgtcgctgttaaatgagcaaaaagcgctgtttgacggcctgctcagcgataaagcgctggcatgggatgggccgctgctgaaggtcgagtccaccatgacaccgatgcgcggcgagacagattttccggcgccaggcaaagacgcgcgcatcgagttgttcacctccggctccactgggcagccgaagccaattagcaaaccaatcgactccctcgaccgcgaggcggcgctgttatcggcgcactatgccgggcgtctgacgggctgtcgggtggtggcctccgtggcgccgcagcatttgtatggcctgacgttccgcttgtttctgccgatggcgctggggttgccgctgcacgccgcaatgctggaataccccgaacagctaacggcattaagccaccagcatcgctacctgtttattagcagcccggccttcctcaaacggcttgaccaccggctgcccccaccgccgatggcgatgattgtgtccgccggcggccagctgctctggcgggatgccatgcaggccgccagctggtgcaatacctggccggatgaaatctacggcagcaccgaaagcggcgtcatcgcctgccgcccgcgcctgcaggatcaggcgccgtggcagccctttccaggcatccgctttcagccagaaggcgacacgtttcgcctgttttctccgcttgtcgccgacaatcgcggcctgctgctcgacgacatcctgcatttcactgaaagtggtcgcttccagttggctggccgccgggatcgcgtagtcaaaattgaagagaagcgcatatcgctgagcgaagtggagcagcgcctgctggaacttgaaggcgttatcgacgccgccgtcctgcccatcacccgcggcagccgccagagtatcggcgtattgctggtgcttaatcatgacgctcgccggcgctggggaaaaagccaggagctgcaatggcggaaagcgctgcgccccctgctggaaccggtcgccattccccgcttctggcgggtggtcgacgagatcccccttaacagtatgaacaagcgtgtctacgcgcagttacaggagttatttcatgcagccccatga

SEQ ID NO: 270973 - DNA, 477 bp, Klebsiella pneumoniae
atgagccactttttatcccccggcagctacctcccgcacgacgcgccgatgctgctgctggaagcggtcgacgacgtgaccgccgataccgccgcctgtcgggtcacggtctcatccggcagcgttctcgggccattcctcgattctaatggcgatcttcccggctggttcgcccttgaattaatggcgcagaccgtcggcgtctggtccggctggcaccgccagcagcaaggacaaacgtcactcgctttaggcatggtgctgggcgcacgcgaactggtttgcgcggcagggcgtctgccgggcggaaaaacgctgtccatcagcgtgaagctattgatgcaggatgagcgtttcggcagcttcgaaggcgtgattactgccgatggcgagagactggccagcgggcgggtcaataccttccagcccacgccagcagaacttaacaccctgtttcaacaaggagcgtcagaatga

SEQ ID NO: 270974 - DNA, 630 bp, Klebsiella pneumoniae
atgtcggctccggctctgtctctatgccaggtggcgctgcgcttacctggcctacaaatgtccccgcgccgccgggccatccacaccggctctgtctctgtctctatgccaggtggcgctgcgcttacctggcctacaaatgcccccgcgccgccgggccatccacaccggctccgtctctgcctttatgccaggtggcgctgcgcttacctggcctacaaacgcccccgcgccgccgggtcatccatgtcggctccggctctgtctctatgccaggtggcgctgcgcttacctggcctacaaatgtccccgcgccgccgggccatccacaccggctctgtctctgtctctatgccaggtggcgctgcgcttacctggcctacaaatgcccccgcgccgccgggccatccacaccggctccgtctctgcctttatgccaggtggcgctgcgcttacctggcctacaaacgcccccgcgccgccgggtcatccacaccggctcagtctctgtctctatgccaggtggcgctgcgcttacctggcctacaaatgtccccggcccgccagatgcgcccccgcaggtccgctgacctggccgacaatcattcctgttccggtgactatttctga

SEQ ID NO: 270975 - DNA, 1701 bp, Klebsiella pneumoniae
atgaacgctatctttgacaaagtcataagggaatttttccctgataccaatataccatactggaaaaaaaaggttttcagagccgcatttggttataaggcatttgctcgtttaatgaatgacgaacggttagttaataaaaatggcgtgcattgggttagttctattattgattgttttaacgtccgatgtgaagcggaatactctggctttgataatatccctcgccacggtgctacggttgttatttcaaatcatccgacggtgatggatgggcttgcgttaatacatactattgctcagatcaggaaagatataaaaatagtggctaaccatatcttgccaatactattccctccggtgtcagaactgacgattggtattgagaatatggctggtaaaatgagccataaaaaattcagagagatgaacgaccatctgagaaacggtggtgttttgattatctgccccgcaggtaaattggctaactggtctctttcaggattacaggagcataagtggaatcccggttttttacaactggccatgagaaataatgccgcactggtgcctgttcatattacaggttcaaacagtaaaacttattattttacggcaacgatttggcggcaattgtcaaatataatgattattcgtgaagctttacgccataatggtaagaccatgaaaatcaaggtagggcagcaaatagccttatcttcgtttaatcgatttaataaagatctctctgctgcggcaacggtatgcttgatgcatctccagaatatagggctgaatggcccggcgcttgtagatacggtctcgccgcaagaattaacagacagtcgagaaagtttaataaacgcaatagaagagtgcgaagtattaaaacaatgtgaagatggtaggaagctattaatatatcgccgtactactgacggaacttcacccattattgatgagttagggcgcttacgcgaacattgctatcgcgctattggcgcaggaaccgggaaagatagagataacgatgtttttgatgaaacctattaccatgtcattttatgggatccttctgatgaagagatattgggcgcctatcgtctaatacccgttggggagcagttagcccaactgggggtgacaggcctctacagcaacagcctgttcaaatatcatgataatgcctattcctgtttaagtcagtgtgtggaaattggtcgtggctttatccagaaaccttatcaaaaaagtaatgtgcttgattatttatggcgtgggatatttgagttcataaaaagatatccagactataagtatttgttaggtgtgttgaccattcccggttcttttcctgaagaggtgcagaaactcattgtgagtttttataatatgtactttcccagctcggttgaaatttgtacgccaatacaattattcaccacagaagatgtatcgcatgataatcccttttccggaaaagattttagagctgactggcgtgtgcttaacgatctgctgagagaaaaaggttacgaactaccatggccttttaaacagagcgctaaatggttctctccaggtggctcgtcgatccttgcattcacaaaagatgattcttttaactcgatagctgggttaaatctgagtgctctcgataaattgaatgaaatatactttaagcattatttaaaggattaa

SEQ ID NO: 270976 - DNA, 588 bp, Klebsiella pneumoniae
atgttagaaagaatatttatatatacatatgtgctttctttggctatccctggacgatggagactgatgccagaacttgaccactacggtggtgccgaagttgcgatttccccatttgatattcccttgttttcatatctgatagttaagttattattgattgttgtatttaataaaaacacaacgattaagttctcaacagatgtcaaagttattttgctatatttattttgcaacgccatattcttgatttttggtgattcatatttttggtcgtcgcttgaacttctgagatatgtgaaattctttatcgtctttttaattatcaagtttgcattgctcaataacgaaaaaaaccacgataccttatttaatgcaattcttctggttattgttattcagttaatcacttcattaatacagcaagtatttggggtgacaatttcaggaaaaggtggagatgaagttgggcttaataacgttgatggcgaattatatcgttcggctggtacattagggcatcccggtaccctttcccagttcattgtaacaatttgtccattcttatggatggaggctattcagtaa

SEQ ID NO: 270977 - DNA, 2175 bp, Klebsiella pneumoniae
atgactgaaagaatcaagcagaccagacaatcatccaaagaaaatgatgagattgaattcagtaggttggtaggcgttttcatcgataacagatggttgattttctgtattacctcattgtgcgttttctttgggatcgtttatgctttgttggcaactccgatctatcgaagcgatgcgctaatacaagtagagcagtcagctggtagcaatatcctgagcagcctttctgatgtattgccaacgggccaacctgaatcatcagctgaaacccagcttcttcaatccagattggttatcggcaaaactatagatgacctggatttaactacacggctagaatacgatcacttccctgttatcgggaaaggtttatcaagaatttttggggattcaaataaaacagcaaaagaaagtctatctatcgccagatttacggttccatcggaactgctaaatgtttcgatgaaagtgaaggttgttgataataatcactataccctcgatgttcctgatgtcggtaagtttgacggaacgaaaggaaaagttttatcagctgatggcatagagttgttggtcaatgatattgatgctgagcctggtcaagcatttaatatgacaaaacagaccattcaaaaaactgttgctaatatattatcgaatctttcagttagtgataaaggaaaagacagcggaatcttgcaagttagctatgatgcagaaagtgaaaaggaagctaatttagttttatctagtattacgcaaaactatttgttgcagaacattgaaagaaaatcagaagaagcagataaaagtttacagtttttagaaaagcagctacctgctgagagagcttctcttgatgaaaatgaagacaaacttaataagtttcgtcaggagaatgattcagttgacttgtcactggaagctaaatccgtattggatacgatggtttctgttgagtcgcagctcaatcaattaacattcagagaggctgaaatttcgaaactgtacactgtgcaacatccagcgtacaaagcactgcttgagaagagagttattctagagaaagagaaagctaacttaagtaagcgcgtagaacaattaccgaaagtgcagcaagaaattctcagactgacgcgtgacgtagagtcaggtcaagctgtttacatgcagatgctaaataagcaacaggaattgagaatcaataaagctagtaccgttggtaacgtaaggattgttgataatccattaattcaggattatccagtagcgcctaaaaaaatactaatcttggctatttctctgtttattgggataattttctcggtttgtgcagtgattgtgaaacttctgctgcataagggaattgaaagcgctgaacagcttgatgagattggtgccaatgtttatgcgtcagttcctttctctgactggcaatcacgaaatggtcagaaacgtgcgaaaaatgacaatcgtccagaaggtttacttgcagttaataacccggcagacttggcaattgaatcaattcgcggtttaagaaccagtttgcacttcgcaatgcttgaagctaaaaacaacgtaatcatgatcacaggtgctacaccaggaatcggtaagtcgtttacaagcctcaacttagcagcggtcattgcgcaacagggcaaaaaagtactggtcattgatgccgatatgagaaagggtcatttgcatgatgcatttggtctgactaataaaggaacggggttatctgcatatctcgctggcattcttgattacgataaagttaaatcgccgaccggaatcgataaccttacaatgattgtcaggggtagcaacccacctaacccatcagaactgctgatggggaatcgtatgacaaaactgttagaaaaagctggtgcggaatttgacttagtcatagtcgatacccctcctgtgttggcggtaacagatgccgtaatcattggcgcccttgctggtaccaccttattagttgctaagtttgaaactaatacagtgaaggaagtggaaatctgttatcaacgttttgaacgcgttggtgtagaagtgaagggtgtgattatcaacggcgtaatgaaacgtgccgcaaattattactcttacggttcatatgcagagtatggatataagtacgagagtgataagtaa

SEQ ID NO: 270978 - DNA, 645 bp, Klebsiella pneumoniae
atgaccggcaagcgcagcgccgccgggcaaggacagcgggcgcggagccgcttttgtgccgggtggcggctcgcgccttacccggcctacagctccaaatcaccactggatgaggggccattgaaactgccggtgctggcggcctcaaaatcgctgtgcgctccctgcgccatgccaggcatcacgcagaagacatatcgggagcgcaagccgcctggaaataacatagaacgcaggtttttccagatcgatacggttgcaaaccgatcacagtatctcccccgttgcgccgttattttatcgggtggcgctttgctaacccggcctacaaagccatttatatatcagaaggttattcaacaccgtaggcccggcaagcgcagcgccgccgggcaaggacagcgggcgcggagccgcttttgtgccgggtggcggctcgcgccttacccggcctacagctccaaatcaccactggatgaggggccattgaaactgccggtgctggcggcctcaaaatcgctgagacgttcccggcaggccgggggtacagggggcggcggcgactggctgccccctgtgcgctccctgcgccataccaggcatcacgcagaagacatatcgggagcgcaatcagcctggaaataa

SEQ ID NO: 270979 - DNA, 903 bp, Klebsiella pneumoniae
atgctgatactgacagttatttttcatcgacatactatttttatgaatataacagaacggaacatctggaaactaaataatttaccgccaatggagtactgctctctcgctcgggcgcaaaaattattaaactgcgaagttgaagacattctccactggcatgacatcggtgcgataaacctatgcctgaaactcaatccgacgtcgggcacgttaaaaattgctgtcctctcacatcaggagaaagatgtcactacggcgttgccccccctcagcgctactgaggcagtggaaacgttatggtcagcgcactcccatatccacagcttcctgcggtttgatggcgatactcccgtcatggaaaccctgcgcgggaatacggtcacgcagttcaacgttaaggtcaccgcgtcagggctctggcatccacattgccggaatttaatggcgctgctggaagcgcctgacgatattcattgtgaaaacagtctcagcatgatgctgcccgagaaaccgtttgtttattgtcacttcattccgcaggaagtcgaaagccccactttatccttgagtcggctctatattaccagtaaggccattgagaaaatatatgcccacagcattagcacccgaccgatggatgtaacaaaaaatctgttacgggagcaaaccagttatgttcatcaggaattaaacttacttccgcagaatgacgtattgctggaatttatcaattatcttatccagtcccataaggtatttaatgagacgttacaaaatatggccgagccagataaatcccagttctttaatacggtactggaaaagcttaaagccgaaggagtgctcggaaaggatactcagcccgatgaggccgggatcgtcagcgaaacacacagttag

SEQ ID NO: 270980 - DNA, 333 bp, Klebsiella pneumoniae
atgaaagagttaacactgaacgaaatggcgaacatttctggtggctttagcctgaccggctcgaccagcggctttgccagctttgtcgccaactcggtggccggcttcacctcgtttgttctcacttccggcagcgcgtttgcctccttcgtgggcgacagcgcaatggcgtttggctccttcctgtccgggaagataaactgggaaacctttgtgactgccggtaaggaaaactggggaaacttcgtcaatactgccagcaacagctggaatacctttgtcgataacgccgccagcgactggaacagcttccacgacaaagcatcagcctaa

SEQ ID NO: 270981 - DNA, 285 bp, Klebsiella pneumoniae
atgatccctgaacgactgaaagccgcaaggttacgggccaaccttacccaggagcagttgggcgtccgcgcaggcattgccgaagacactgcttattcaagactctctcagtatgaaagtggaacgcataaacccacgtttaaaatggtttgtgcttttgcccgtgtgctaaacgttcctgaatgctatttctacacggtggatgacagcttcgccgaagcgctattaaagctgtatgacggtgaagttgttcagtggaatatgaaagcgggaaattgctcttaa

SEQ ID NO: 270982 - DNA, 972 bp, Klebsiella pneumoniae
atggacgatatcagagacgacttcatactgtgcattgatgcagaagaactaagattagaaaatcttccaaactttgtgttcatctgtggcggcgtgcgaaacgacgttgatgaagagttgcccggttccatgcgagatgcgttgctacgtcgccttgaactgacagatagaacactaagttctcgtatacgcgaagctgaggaatttcaagattggcttgagcattctaaaatagacaatttgatcgatcttgaaatcgttttggctgatttagcaagtgcggttatattaatcgttgaaggattgggtgcttacgcagagcttggtgcgtttagcattattgaatcaatttcaaagaaacttatcactgttctcaatactgatactattattgataaatcatttataaatctcggagtcattaaattcttagaagataataaaaagttagtacttaaatataaatggggcgtagaatatgtagcatcaggggatcgtaaaaaagttaacctacgttttaccaataatcttaccgcaataaataataaagctgacattatcttagatagattaaaacaagagatttctctaaaaacacagtcaactgttaaatttgaccgtgaacggaaaggacacatctgtttagcaattgcagatctaatttatgttttttccgcactaaaagtcagtgaaataaagacatacctatccgttggtttttctattgaacttactgtgaaaaaaatcaaagaatatctttatattcttgagaatttagagtttataaataaagttgattctggtgatatcttttatgtagcctccgaaaataatcttggttttataaagtatagatataatactgaaaagaaaaagataacatctttctcagatgttgatgatgtaaaaacaaaaatcatcctattctatagagatcgtgatatttctcgtaatgatgctttaaataggtaa

SEQ ID NO: 270983 - DNA, 234 bp, Klebsiella pneumoniae
atgtttatgaagagtggaattatattatccatcgcagactgtatcagagatacgcttcccataccggcagacgaattcaggaaaaagcttaaaaatgactgttgtgtaatatgtaaaccaccgaaattttatacccagcaaatcacccagtccgccatcattccttcctgtaccgattatattgaagcaaaaaatgcagagttacatggcgcaaatggttctgcccgccattaa

SEQ ID NO: 270984 - DNA, 240 bp, Klebsiella pneumoniae
atgaacgatcccgattttaatctgctggcggccctcgatgtgctgctgacggaggagagcgtggcgggcgccgcccgccgtctcggcctcagcacctcggcgatcagccgtacgctcaaccggctgcggcatccgtcgccgcaggggatagtgcgttttccgctgccggtcagcaccggggcgattacggtgtcgcaggcgtggcatccgcgcctggagcaggcgccgggccaccgctga

SEQ ID NO: 270985 - DNA, 168 bp, Klebsiella pneumoniae
atgataagtaatctcgattacatgaaactggcgatgtcatacgagaatgacaaaaccgaaatcgatcccgttctgcgtagtcgcgtatggggcgtcgtgttggtagggctggcgatgttctggagcatcatcgcgctcgccatctgcaacatctggattgtcagctaa

SEQ ID NO: 270986 - DNA, 1050 bp, Klebsiella pneumoniae
atgagatggagccaatcagaccggaaagtacttacaattatagccattgtcggtttgctactgtatgccatttataaaggcttacagttcctgacaggggtcagtatgggggccagttttggcgtagggctgggaggaatgagcggttctcagaaggtggaagaatcccgaaaagttgaaactgatgctccgcctcaggttctttatcgcatagataaatatcgatacctgacactggagaactacatttcttgtgataaggggggacaggtttattacaatgatactcagagggaaataaaaactcaattgggatgggagcacgatttttatgatttctcatatcgccgtggtaattattttgcggcttataaaggaactattattaatggcgcgaataatggttatctggcgttccctggtgcatcaactagacagtattgcggtagcggaagatcagcgcgagggtgtccagtttttttctttttttcagcggattatggtagaacctttatatatgaaattgtagcggaagaatacagcacacctgagcgctttagtaagctcaaagtggtggttgctaatgatggggtttatttaagagatgagtcaatgaaagaaccaatttatagtgatggatatattgatggtctttctggtgtaaataaattccgcttcgatagtaaagatagtaaattgataaacgtgtttgatgatatggataaagaagtggaaaaacggataaagaatgaagttactcataaaaaactgccatatgcgaatgattacggtcctgattttaatattttcagatatgcaagggaatctagtccgccaaaatcgcgcgacgaaactaacattatggcaaatgagttggcagatatagctaaaaaaaagttaagggaagtttatgaaaataaaattgaatttcctcagttatcctctggaagtaatgacagtgcttatcaatgcaacaatgaaatcaaagctaaaactataacttatttatcgaagcgtggcaaaagagagagtgtgataaatgagcaatag

SEQ ID NO: 270987 - DNA, 1794 bp, Klebsiella pneumoniae
atgtttaagtttaaagcttcttatgtcgcgctggcggcattattaacctcgtcggtggtttacgccgacccctccagctatacgcactcttccggcgtcacggttgtcgatattgaaaaaccgaacgccgccggcgtttcacataacctgtaccgcgacttcaacgtcggccccaatggcaccatcctcaataacagcggcgacgatgtcaaccacggtaactttggcaatatcgcccgcaacaataatatgacctctggcagcgcttcggtgattttgaacgaagtcacctccagaaacgccagtagcctgcagggctttatcgaagtgaacggcaagaaagcggatgtggtgatcgccaacccgaacggtatcacctgctccgggtgtagatttgtcaataccaacaaggccatcctgaccaccggtaaagtcaacatgaccagcgacggcgctatcggcagctataccgtgacgggcggtgccctcaccattgatgcatacggcatgaacgccgccaacagctatgcggttctgctcgccgacgcgattaagataaatggtacggtacaggcctccaatgcgctggtcagcgcaggccacttcaccatggataataaatccggcgcggtgacctcagcgggtaaacaagcgacgcttatcgaaatgacggtcaacccgcaatacagcattgatatcagcaacttcggcggcatcaccgccaacagcatcagcatgattggcaacaacatcggctttggggtgcgtaacagcggagctatcgtcgctaacagtacgctgcagttaagcagcaacggcgtgttatggaataaaggctctattaacagtaaaggcctgcttgctcagctttcctccgccacgggtatcagcaatagtggcagtatctccggcgctaattacttaatgctttccagtgggagccatatcgtcaacaccggctcgctcactggcggccagctgattgccaccgccaacagtaacatcacgagctataaatccggctctatcaccggcatcaacggtttaacgctgaccagcgccgggaaaatcaccaatgaggaaagctcctcgttactctcgaataaccagatttccatcacggcgatgggcgatttcttcaatgaaagcaaaatcagcgccaaaaacaccaccgtgactttcgctggcgagagctttaaaaataccggcaacattaattcaaccggcaaaaccaccattcgctcgcttaagcaggatggctccgcaaatggcggcgaaatctataaccagggcaacatcaccggcgaaaatatcaatctgcaaactttaggcaccctggcgcaaagcaccagtggccgaatggaagctaccaatgccattaccgccaacagttactggctgaataataacggctatatgaaagccgccgatatcactaccagtcatggcacgattaataatacaggtactatcaccgggggcaatgtttctctgacgacctattatcatgttaccaatgaagggacgatttacagcagcggcaatctgctgctggatacccagttgctaggcaatatctataactactcattaattcaggcgaatggcactctgacaatgaccgcgaaaaaggtggttaacagcggtcgcggctgcggctggttcaaatttaatacctgtgatgtcggcactatcagcgccaacaagatgatcctcaactcctcacataaatacgccaacgaaatgggcggttatcaatactttaagatggcggaaatcaataccgttctgtaa

SEQ ID NO: 270988 - DNA, 405 bp, Klebsiella pneumoniae
atgactgttcagattattaaggatgataaaggtcgcccgcagtacgccgtgatcccctatgacgaatacttccgtatgtggttacagctgatcgaaatcgacgacgaaacagatgacgatctggaagatatcgagattgaacacgatatatatgatgacgttgaattacccggcgaggtgtgcagcatcatgacctggcaagatgtcagcctgcaggcggcctggcgcatctaccgcggtctgtcccagcaggaggtggccgacaaactcggcatcagccagtccgccgtatcacagctggaagcgctggactcccgtccgcagaagcgcacccgcgagaagctggcggcgatttacggctgtacccaggagcaaatcagcctctatctccccaaagagggctaa

SEQ ID NO: 270989 - DNA, 693 bp, Klebsiella pneumoniae
atgaaatcctacatttttgaaagtgataatgagaataccatgcactcatacattttttcacagaaggcgaagccgcatgcggcaattgatagcttgctttcggtgctgttaccttttggtaagcctttcgtcgtccagtcgggtgaagaattctctctgtatacggaacagagcagtcgaataatattactggagtctggtatcttttcgatttgctgcagtgacagagggctaactgtgttatcggtttttgcccccacgcttgttgggctgctgaatatctacgataagaattgtgatgttcccgcccgtccggagcattttttggttgcggaaacagagtgtcgctgtcgtgccgtctcgttagcagattttattaaagtgacagatgagtgcaatctttggcacgatgttgcccgtcttctggcttaccgtctgatgattatgaatgcccgtgaccgggaactggtaggtgtggatgcttatcttaaggttcgcgcgttattaatcgaaatctgggcttataacgaagaataccgccagggtattaatgttcttaattttattcaccgacgcaccggtatctcacgaagccgtacaatgaaactgctttctgagctccgaaagggggggtatatcaacatccatggcgggcgattattagaggttaaaaatctgccgaaggcctactga

SEQ ID NO: 270990 - DNA, 3024 bp, Klebsiella pneumoniae
atgactgttacgcttaagaatagccagattgatgtgaacagctggtaccagaaagtcacgttaacctttacaaacgaaagcagccgcgcgatggatatgaaccaggcggtaattacgtttacggcatccggacatccggatccttggggcaatattggcggtacgctgaaaggcgatcgcccattaacattgaatgagaccttcgagggaagcctggaagttaatgagatcatcataaatcacagcggcgagctgttactgtctccgggtgaaagcggcacgctgttctttagtctggcggcgacccaggtacccgtaaaatgttcgcccttcacgcttaccctttccgccgcagacagcgatgataccgctgatgaggttgagccagaacctgaagagcctgcggatgatgcagatgatgaggttgagccagaacctgaagagcctgcggatgatgttgatcccgaacctgatgctcctgatgaggggattatcggcgcgggcttaacgctgatttcaagtgcggtaaatccttccagctggtatcagcgcgtagccttcacgctgactaaccagtattcgcaatccgttgatattaatcagctgaaattagcgtttaccgccaccgcccatcccgatccctatagtccattcagcggtaccctgccgggtaaccaggcagtgacgctgaccagcgatggtggctggccgacagaaaaaaataccatcacaatcaataacgacggagaatatcttttggctgccggcaaatctgcggtgctggaattttatctgtcggctacgcaaacgcccgtcgtgctaagcgatctgacggcgacgctggcccatgatcctggacgtcagggacaaattgttttgcaattcccgtcgttggcggaaacgacttcgctaaagcctgagatcgatctgcagtatccggatggccaacaacagcgttttgttggcgaatggggatcggcgctgacgattagggatctgagcgccggcagctacgggatcgcggtgcaggaactgtgtaatgacgagatgagtatttcacccgtcacagatagtttttcgctggcgctctcctccggtaatgacgtcagacagtgccaggtcgcttatcaggcgccggtcatatttgccgcggtcgatttgcttctggcggatgaggaactggaaggtgcggaagccgtggtggaattgtggtcagaagccggtctttgcgaacggaccctgacgctcatcgtcaaccagacacgcaacgtgccccggctggtggctaatcatcaatatgctatctgtctgcaaccgacgacggtgaacaatcagttgctgaccacgccagcagagcctgctacctttgtcccgacgacagagaaggtcatgcatgtcgatgtcgatgtgcagaaaaccgcggtcgcaagcgaaaactttgtcgaagcggtggtaacggtcttagggttaccgcaagacgtgcccgctcaacgttatcttttccgctgtggcggctatcagtacagttttatgctggagagcgatacccgccagcagacgttgccgctgcggatggctgcaggggaatatagcgtgcaggtcgcggatgtttatgtcgcgggtacgccgtggcgctgcgaggtcagctccccgctgcgtttactacaaagcgtcaataacgttaccctcgagtttattcagggcgtatcgctccaggttaaaggatggccgaattatctggcccatggtggcgtcacggttaatgcggcggataccgtcgagctttatcgcgacgtaccgttcagcgcgctgtttaaatatgatggttttgacggcggtggcgatccgatcccggcggcggaagtcgataccaatggtgatgggttccttgattacgcctctttgccaatccacaaaaccgtgccgttggttcgtcagattgaagccgaggccgggcggccggtgatgccggtgatggtggtctataccgctaacgccagcggcggcagcgcggtatcggatctgcaggatggccggcgtttacgcaaccattttggtaactttatcacccagtgcctggcggcgtcgtcatggaaagatagcgaacatcccgttccggcaacatttgtgctcaatcctgatttccttggcgccatgcagcaggagccatatggctatgctgcgctgcgtaaagcaaatagcgtgcaggtcaatgtccagctggcggcagcgatcgatgcgcttcctgcgcttcccggcttcgtggcgccgacgttgccgacctttagtaacgatctgtatggttacgttcaggcgattaactatattgtccgtcagtttgctccggatgtggccttcggctggcagacgaatgtgtgggcgacgggtacagcagactgggtgctgcgcgccaacgccgctccgcatgagcagggggcggcgattgccgaattcattaatgaattgggcgtctatcgcggggattatgcgccagattttatcgcctttgataaattcgagcgtgactgcttcagtccggatgccttagcccactatggctggaacgcgacctgctggttcaattatctggggatggtgaaggagacggccaaagcgttgcagaggccagcaatgttgtggcagatcccgggcggccatatgccgaccgtagcggaaggcaccagcaaaattgccgcgtcgcactttgcctcaggcgggaccttcttcatgggggatacgcggattggcagtgatatcaacactattacgcctccactgcttaataccgcagtgaatagcaccacatacggagtagcgacagtgggagagttcctgcgtcaggatcggggatatgactgggggcagtgccaggcgttaaatctgccggactacaatattttcgccgtgctttggggtggtgggtcgacagtcagtatcaccaccattcactctaacggtgaggatggcggttggctggcagagaaaatgaccgagtactacgctgcaccgcgttattttaattaa

SEQ ID NO: 270991 - DNA, 2103 bp, Klebsiella pneumoniae
atggctaccagcaaactgattaaaagcgatactcttactgaaaccagcaacgccgctgacggttttaacccagcaactgaagtaagcaactttagttatacttcagcccgcgtcgcacgaccggtttataacaaatataaggcggcaactaccaagccgaaagtatttggttattacaccgattggtctcaatatgatggccgcctgcaaggggatgatacaaaaaataaccgtggacgtggttatgatctcaccaatatttcacctaccgcttacgataaaattattttcggtttcgttggcgtcactggcttccataaagttgacggtcagtatcgggatgtggttgccgaaggcgctgagcagtgtggaaaagtgaaatatgaaccgacattccttgacccatggggtgacttccagtcgtatattaacgtcggccacaccgttagcggctgggatgttgatccgaagacggtaacccaggctaacacaaaaggcctgcttggcggcctgcgcgatctgcaggcgaaagccaaagagcaggggcatgacctggtgctgtccatgagcatcggcggatggacgatgagtaacggcttccatgaaaccgcagcgtctgactctgcacgtaaaatcttcgccagaggcgtcgtcaaactgttcaaacagttcccgatgttcagcgaagtggatatcgactgggaatacccgaacgcggaaggcgcaggcaacccttgcggtccggaagatggtgaaaattatgctctgctgattggcgaactgcgtaagcagctggatgccgctggcctgagcaacgtcaaaatctccatcgccagctccgctgtcgtgaagacgtttgattattccaacgtcaaggcgctgctgcaagccggtctgtacggcatcaacctgatgacctacgacttcttcggcaccccatgggcagaaaatgttgcccatcacaccaacctgaacgccctggaagcgggcggctggggggtaaacaccatcgtggagcatctgctgtccgaaggtttccctgctgagcggatcaatattggctatgccggctacacccgcaatggtcgtaacgtcgagctggaatcgctgtcgcctctgaaaggcacctacaacccgggcaatgggacgactgttggtacctttgaatccggcacctgcgaatggtatgacgtgatttacaactacctggatctggaaaaccagaaaggccgtaatggttttaatgtttataccgatcaggtcgccgatgctgactacctgtacagcccggaatctaaagtctttatgtcgctggatactccgcgttcggtaaaagtgaagggcgagtacgccgcaagtctgggcttaggcggtatgttcacctggactatcgaccaggacaacggcgtactgctgaacgcggctcgtgaaggtctgggttatgaaattgaaaatgaagtcatcgatatggaaccgttctatttcgaaggcatcaacatcgaaaaagatgagtctgatgaatctgcggatgatcaacccgctgacgtcaaccatgcgcctaaagcggctatcgaactgctggtggtgggtgggtctaccattcaactgtccggcgcgggttcttccgatgaagatgaagacgcgctgacctacagctggggcgttccgtcagaaatcaccgtggcggataaaactgcggaagtgattgagtttgtcgtacctgaagtgagtgtaagaacgactttccagttcaccctctttgttcgcgattgttacaacgaaccttcaactcagcagcgtttcgtactgactgtcgtacctgcggcatctcaggtcgaacctgaaccggctgatgaagaagatgacgctgacgtcactccggcaccaggtgaagataccacgccagcggaagatgatacctctggcgatcaaacaccttatccgctgtgggatgctaccaccgtttacggtgcaatctgggggactttcgaaacggtgagctggaaaggtcacaactaccaggtgaaatggtggtcccagggcgatcagcctgacctgaactgcggtcagagcggtgcatggactgatttaggcgcctggtaa

SEQ ID NO: 270992 - DNA, 444 bp, Klebsiella pneumoniae
atgaaaaattacatcatcaataacaactgcatctacagcgaacataaatatgagctaagaagtagctctaactcacaagttattcgtatgacagcgatgcgagctaaatgccttagtttcattatcgaaaacgcgcatctggaaattattgaacggcagaaaatcaccaatgcgttatggggaagcagaagtcattttgtgaatgatgccaatctgacgcagatactctatttgatcagacgagatctgaaagcgcttggcattaacgatctctttatcacaattccgcgtcagggattgcaggtgaacagggagatcgtcattgaggaaatcgaacccaacaagcctgcagtaaagaagttatttttccgtaaagcactggcggcgcttaccaccgtcttttccgtcacgctcggtaccatgatgtacatgcatattcattaa

SEQ ID NO: 270993 - DNA, 534 bp, Klebsiella pneumoniae
atgaatccgattattgatgggatcatcggcctggaaggcggctacagtaacaatccaaaagataagggcggtgagaccaattggggaataacggaggcaaccgcacgcgctcacggttatcaaggaaagatgaacgaactaacatacgcagaggcctataccatcctcgaagctgactactggattaagcctggttttgaacaaatctcgcaacgctctctggcagtggcgtttgaactttgcgacgcggcagtgaatattggccctcatcacccctgctgctggcttcagcgatggcttaacgtcatgaaccgcgagcagaaaaactacccggatatccaggctgacggtctgattggcccacgaacgctcagtgcgctggatgcctacttgacactgcgcggagaagaaggagaagcggtattagtgaaagcgctcaactgcagccaggcggtatattacctggaaattagcgaacatcggcagcaaaacgaagaatttatctacggctggattaagaatcgggtgacatag

SEQ ID NO: 270994 - DNA, 345 bp, Klebsiella pneumoniae
atgtctattcctaaccatttagagacaacggaagtagtgttgctggaggtagagatacttcttaccgtgattgctatcggagcctggggcggtttcgttagtttcctgcttcgcaagaataaagaagaagcgactgaagcgcatcaagggataatgtcctgtttgacccagattgttatttcttgttttaccagtttcctgctgagcgcgctggctattgataaagggttgagctttaacatggtactgttagcagccggtttaggtggggtttttgccggacctattttgaaaatattaggtgaaaaaataaaggatgctattggcggtgggaaaataaaatga

SEQ ID NO: 270995 - DNA, 945 bp, Klebsiella pneumoniae
atggaatcgaaaggtggcaacaggagctttgattataatttaatcaaggttcttgatgctgtcatttcggcagggaatgccgttaaggcagcgaaaaaattggccatcacccccgctgcagtctctctggcgttaaggcgtttgcaaagtttctatcagcatgagttatttgtcagaagcaaagatggattattgccaacagcaaaagcggttgagatacatcagaattttcgccaggctatagcgcttgtcaatggtactttcatggccgaaaaaaaaagtgatgattcccgaataacgattttaggaagcgagttcttcgagagctattatctgacgcagatctatggccattcgcgttttgaacaaggattgatcaatcatttttcggtacgcaatatcaccgttgaaaaagtgaaagagctgttattgaccgcccaatgcgatttatctgttgggactgagccgctagctgaagccggtcttgagagccaaatgatcgataattttcgtaatttcatctgtatttgtgctcgcgatcatatttttgccgagcttcagcaactgtcattgcatcagttttattcttctcggcatgctatctttcaacctggtatgaatacgtcaccaattatcgctggcaacggtttgttcaaagatgatgtgtattataatggttcgcgtcttatgggctatcgcagcgactccatcactggtttggtgagtatggttgaacgcacagcattgatagccgtgatgccgttaaaactggccctgttttataagaatcagcgtaaatacgatattaaatttgtccagccgcctccagaactgacgtttaaatctgtgcaggtttatgcatcatggagcaaaagcaatacaaatttatcaacggttaatgaaacagtggcaatgttacaaacactgtcgtcattcagacggtaa

SEQ ID NO: 270996 - DNA, 357 bp, Klebsiella pneumoniae
atgacaacgtttctgtttttatttcattccacggtgggggtggtgcgaacgcgcaaagccctgcaggcggcgggaatgaccttcgaggtcaaagatattccccgccagctgcgcagcggctgcgggctgtgtatttacctgagttgcatgccgggagaagagcaaccgtggataattcctggcgaaacggccgccctgtttcgcgtcgccggaaatgactatcacctgttggcgacctatgcgcaccgcggtagcccggatgaggcgttagccgacatccgggacgcttccccggtagcgcttacgctcaccggggctaccgaccaaatgccctaccgtagcccgggcaaggcgtaa

SEQ ID NO: 270997 - DNA, 1140 bp, Klebsiella pneumoniae
atgttaacgaataagcgagcgaacgctcaggatgagagatccacgctgtggtccaccagagataatgtgcagaaacatgcgttgtccatgagtatgccgtggctggccttcgtcaacatcgcttttgcgttaattatcttcttccgcaattttatcttttcctattttgatcaaaagttactgacgcacccggcgattattccctatatcgaagccgcgctgatcgccattgttatcctgtcggcgatgttagcggtcatcgcgatcacgccgcggctggcgcagggacgctacacgctgaatatcatcaccggcctgttgcttgccctcagcctgtgttggtcgctgagtaattacggttttatctcgtactgggcgttacccttcgcctggccgctgctggtgattttaatgaccaccggccttaccgcgctctatcaccactggcccgggattatcgcctttatgctgccgctgtgggtcacggctttagtcgccggcgtgcagattcaccatgatatggatgttcgttttttaaccctgtgggccatctttacggcgattttgctgtatggacgacgtattctccagcgctggtacgatgaagcctggaatacgcaccaggagaatttgcagcttattcagcggctcgacagtattgcccaccaggatgcgctaaccggaaccgctaaccgtcgggcgctggatgcctttctggcgcagttggcggaggaaaaatcgcccctcgcgctgattatgatcgacgtcgattactttaagcgctacaacgaccattacggccatcaggctggcgacgactgtttatcctcggtggcgagggtgcttaaaatggcggtccgggccgaagatgatatggtggctcgctatggcggcgaggaatttgtggtggcgttgccgagggttcccctggcgcatgccaccgcgattgccgagcgcattcagcacaaaattcatgaggcggcgcttccccatgaggcttctgaggtggcgtcggtggtgaccgtcagtatggggatcgtggcttccgacggcactgtgccgatggagacactgatcgcccgggcggatagcgcgctgtaccaggctaaaaaagagggacgtaatcgatggtcttattaa

SEQ ID NO: 270998 - DNA, 408 bp, Klebsiella pneumoniae
atgtctttgaacctcgacacacgcggcttatcggcaacggtaaccgctgaggggataagtgcgcccgactatcagatcgttcaggacatcattaccggctattttcaacagatttatggcagttatgcctatcttgacccagacagcaaagacggccagatggtcactctggtggctctggctatttacgatgcaaatcacacggccatctcaggttacaggtcattctcgccggcgactgtcctgggtgacgcactgacgagcaacgtcaaaattaacggcatcacctcgcgcgcagcgacaaattcaactgtcgatctgctgcttaccggtaccgtcggtacgatcattaataacggatcagtactcgacacatacagcgtagctggaatcttccagcaacggtag

SEQ ID NO: 270999 - DNA, 333 bp, Klebsiella pneumoniae
atgaaactgttatgttttgtattagctatgatagttagtatgccatccatttcagcgattcaatgcggtaactatacaatgaccggcgaaggaatgactgggattaacggtgaaaccgtcacatcacagaaaataaaatttctgggaaaggatggtgattacgtaaacatgaaaatggatatggggctaatgccttcgcgtgatggtaacaactatggattttcttccgtaaagcgaaatggcaaagctttttctaatgtccagcctctgcaaaacagcatggacgcactgaaggtgatttggtcttttccgtgcaagaaagttgacggctaa

SEQ ID NO: 271000 - DNA, 1404 bp, Klebsiella pneumoniae
atgaaagctaacgctattgtacttgccatgaccccgctgctggctgccagcgccttttccgcccatgcaggaccgcaagcccaggcggtgtgcggctacagccataccctcggtgacgacgccattatgatgttcggcatgccaaataaagccatgtggcatgacttcttcggcaatacccacaccgacgcggtctcgacctatcaaacgctgcgcgcccggccggaaaccacctgtgataataaagccgacagctctgcctactgggcgccgtcgatgaggctgccggatggtcagatcgtcaggccggcctatcagaagacctattatcaggcaaccaaagtggatcagtatccgctgcatccgttcccggcggggctggaactgctggccggcgaccaccacggttctgcccccagctcccggatcactttcctgtgcgccaacggtaagggctatagcaaccgggccggtgaagtctgcagcctgcgcaaagcgggcgatgcggtgcagttcaacatcggcatccagttccccaactgctgggatggcatcaacctgaaaccagcccacggacacagcaacgccgcctatgacatcaatggcgcctgcccggccgactatccggtgaaaattcccacggtcaatatgaatatcgcttatatattgccgcagattacctccctggatacggcgaaaatcgaactgtcgatggatccggtgatgaacggcgacaagcgtgaagagaggtggggtagcatttataccgcccacgccgactttatcaacggctggacggctgagggggcgcgctttatgaccgaacactgcatgaatgaagggatggattgcggcaccaatgtgccttaccgtttctcactggcggaggagaacgcggtggttgagagcgcgcagccgaacagcaattttggcgcacctgacgtgctgcaggtttccgataactggaaaaatggcggccgtaccagcaacccggaaaccctgaccttagtgaagtttaaaattccggcgctgcccaacgatcaggatccctcgctgtttaaatatcgtctgcgtctgtatggcggcaaagtcgaaaccaacggggcggatcagatcttcttttacccggccagcaatgactggcaggcggcgacggtcacctggcagcatcgtccatcctgtaactacagtgccgatgcgcaactctatctcaacgcctcgcgtgagtatcgaatggtggatattgataaagcggtgcgtaaagcgctggcggaagggaaaacggagatctcctggtacatcggcggcgaccgtcagggtaaccactatcagtttgacgccgcagcggcgcaaaagcagccgatcctgatgctggtgggctttaaaagcactccggaattgtaa

SEQ ID NO: 271001 - DNA, 291 bp, Klebsiella pneumoniae
atgaacatcaacgtggtcggcgccagcggctcaggcaaatccaccctggctcgtcgcctggcgcacaggctggggctgcggtgtatcgaactggatcgcctgtactggcggccaaactggcagggcacgccggatgaggcgtttttcgccgccattgccgccgccacggcctcgccgggctgggggctggatggcaattacaatcgcagccgtagcgacaaatggcgcgaggtggatctggttatgtggggggattatggcctctggcgcacgctgcgccaggcggtgtag

SEQ ID NO: 271002 - DNA, 1185 bp, Klebsiella pneumoniae
atgaaaaaaaaagttctgctcagtaccggactgctgttttcgtccgtcgctcaggccagtgcgctctatttctatgaaattggcaccgaagataccgcgcttgcaggcgccgggcagtcggcccgcgcgcaggatgcatcaacgattgtcaccaaccccgcagggatgacgcgactgcccgatcatatgtttaccggcggactgcaggcgctgggcggtaatattgattaccagttagacaataaccacttgcagagccctgggaacgtcatgaagttgacccccaatgccagcgctttttatagccagaaaatcaacgagagtctttacgccggcatcggcctgtacggcaactacggtctcggtatcgattatggtaactgggccggcgatcgcctgatcaaaaagagcaccatggtggcgatgactttgagtccttccctcgcctggaagctgagcgacagggtttcggtaggtgggtcagtgaacctcaactatggctttttatccctgacccgtcacgtagagggcggagatcaaaaagacaacgatcacgactgggccatgagctatcgtctcggcctgttgatgcagctgacagaacagacccgcgccgggatcacctggaacagtaagacggactatgacttcaacgtgaaagggaaagcgcggttgccaaacttgccgaatgttgagtacaacctgcccatttccgcgcaggttcgcgcgccgcaacagcttatgttaagtctggtacatgacgtgacgacccaatggtcggtcatggccaatctgggctggcaggactggagtcaatttggcgcgccgcaggtcacggttaatggcaatacactcgataaaaccaaccgtatgaaggacacctggcataccgcgctgggcgtacaatatcgcccgacgcagcagtggcgtctgaacgcaggggtcgcgtttgatagctcgccgtatcgcaaccagaacgacgtcgcaatgacgttgccgacgggggatgaatggcgtttcgggacgggggcgcagtatcagttgacggcagccagcaatattgggtttgcgatcgaatatctgcatatgcagtcttcgaaggtccagtcgcctgagttgctgagcggtgactataatcatccgtatctgtggtttaccagcgtgaactatagctaccagttttaa

SEQ ID NO: 271003 - DNA, 1014 bp, Klebsiella pneumoniae
atgagaaaaacaatacttctcagtatgttactgctgggtttcaattgtgccgccagctccgatatgctctcagcctggaatgatacaccagcgaaacaggccattgaaaaatgggtgcagaacgccacgcgggaaggtagccctgattttattccgcttaataagcgctatgtggttttcgacaacgacggtacgctatggccagaggccccgctgacttatcaattacagttcgcggttgacgaaatcaaacgtcaggccccggataagccggaatggcaaaacgacccgctggtgaaagcggtgctgaacaacgatctgaaaaccgtcgccgcgtccggtgaaaaagggttgctgaaactggtggcattaacccacagcggcatgacaacggacgagttcagccagcgtgtcgccacgtggatggatacgcatcaggacaagcgcaccggttgtcgctacgatcaaatgggctatcagccgatgcgacaactgctggactacctgcgagcgaacggattcagaacttggatcgtctccggcggcgggatcgattttatgcgcgtggtatcggagaaaatgtacggtattccgccggagcaggtcattggctcgttctccttgagcgaatttagccttaccgataacggtacacagctgcgaaaaaccatgaaaggggccttcaacgatgatgccgttgaaaaaccggtagccattcacctttttatggggcaacggccagtcgccgcattcggcaacagtgatggcgatcttgccatgctgcagtacacggcagccaatccggaccataaaacctttgaactgctggtgcatcataccgacagcgcgcgggaatacgcttatgacgcccacccatcagcgagcggcaagctggtaaaagggctaacccaggcggcgcaaagaggctggacggttgtggatatgaaacaggactggaaaaccgttttcgatcccgcattatgtcaagcgcgcaatcaggggacggtgaagtaa

SEQ ID NO: 271004 - DNA, 1263 bp, Klebsiella pneumoniae
atgaaaaaaagcaccaccattcccctgatcccgctgcagaaccacggacgctacctgcctgcctataaacgtcgctatcacatgatggcgaaacccagcggatcgacctgtaacctggactgccagtactgcttttacctgcataaagagcagcttttgcaccagccacacgataccggcatgagtgacgagatactggaaaaatttattcgccaatacattcaaagtcaggacggcgaggagataattttctcctggcaagggggcgaaccaacgctgatgggactggacttttttgaaaaagtcatcgctttgcagaaaaaatatcaaccgccgcatcagcgtattgaaaatgattttcagaccaacgcggtgctaattaacgataaatgggctgcgttccttaaaaaacatcattttctggtaggcgtttctattgatggcccacgggaaatacacgatcgctttcgcgtaacccgtagcggtaaacccacttttgataaagtgatggcgggaatcgaggccctgaaacgtcaccaggtcccctttaatgccctggcggtggtaaaccgggtgaatgcgcgcttccccagggaagtttaccgttttctgacccgggagcttggggcaacctacattcagtttaccccctgcgtagaagctaccgatttcaaaactaccgctccgcagttctggcaggagaatttgatcccgataaccggctcccgacgggcgaagcctggcgatctcgattctgtcgtgaccgactggtcggtcgatcccgatgactggggaacctttctggttgaaacctttgatgaatgggtgacctgggatcttggtcgggtgcaggtcaacctgttcgaaacggccgtcgtgcagacaatggggcttccgtcacagctgtgcattaccgctcccttttgcggcaaggcgctggcgattgagaaaaatggcgacgtctattcctgtgatcactatgtgtatccggagtaccggctgggtaatatacgcgagcataaacttgcgcatatggtgttctccgaacggcaaaaaacgttcgggatgggcaaaaaagagacactcccggcgtactgcaaaagctgtccacacctgaatctgtgctggggagagtgcccgaaaaaccgcatcgttcgggcaccggatggtgaagaagggcttaactacctgtgcccaggatttaagcatttttatcagacggcgaaaccaacgcttgagaagattgcttctatgttgaaatag

SEQ ID NO: 271005 - DNA, 1692 bp, Klebsiella pneumoniae
atgaataacaggtggtacaagggcatcggcgtgctggcattcgctacaggttcgcttatcccctccggcgcgacgaatgctgccggtcaaaatgaaacttcgcaaactgatggttcagcaaagaagcctaacatcattctgatagtgtctgatgacaccggttatggtgacctgggagtatttggcggtggtgaaggtcgtggtatgccaacgccaaacctcgatcgcatggctgacgaagggatgaccttttttgatttttatggtcaaccaagcagtacgcccggccgtgcggcaatgcaaacgggacgtattccaaaccgtagcgggatgacgaccgtcgccttccaggggcaaggcggtggattgccaaaagaagaatggacgctggcttcggtcctgaaaaccggcggctataaaacctttttcaccggtaaatggcaccttggcgaggccgattacgcccttcccagcgcgcagggctatgatgaaatgaagtacgtcggcctgtaccacctgaatgcttatacctatgcggatccgacctggttcccggatatggatccgaaactgcgtgaaatgtttgcccgcgttacccgtggcgcattgtctggtaaagcgggggaggcgccgaaggaagagttcaaaattaatggtcagtatgtcaacacgccggtggtggatggtaaagagggggtcgtgggtattcctttctttgaccgctatgtcgaaaaagcctctctcgactacctggaggctaacgcgaaatcatccgaaccgttctttatgagtatcaacttcatgaagaaccatcagccaaacatgcctgacccggactatgtcggtaaatccatgtcgaagacgaaatatgccgactcgatggtggagatggatgcgcgtgtcggccatatcatggataaactgcgagaactgggtctcgacaaaaatacgctggtggtctggaccacggataacggcgcctggcaggatgtgtacccggatgccggctacacgccgttccgtggcaccaaagggaccgaccgcgaagggggaacccgggtgcccgctatcgcctggtggcccgggaaaattaaagatcacagccgcaatcacgatattgtcggcgggctggatctgatggcgacgtttgcctccattgcgggtatcaaactgccgacgcaagaccgggccggtcagccgatagtcttcgacagctatgacatttcgcctgtgctcttcggcaccggcaaagatccgcgtacatcctggttctacttcaccgaaaatgaacttaccccaggcgctgtccgggtgggccattataaggcggtgttcaaccttcgaggtgacaacggggcgaaaactggcggtctggctgtcgactccaacctcggctggaaaggcgcggaatcctacgtcgcgacagtaccgcagatctttgatctttggcaggatccgcaagaacgttacgacatcttcatgaacaactataccgagcacacctggaccctggtgacctttaacgaggccatcatggaactgatgaagacctatgttgaatttccgccgcgtaagccgcagagcgaagcctatagtgggccgattactctgtcccagtaccagcgctttaaaagcgtgcgcgatcagttacagaaagaaggtttccagttggcgctgccaaacgggaattaa

SEQ ID NO: 271006 - DNA, 534 bp, Klebsiella pneumoniae
atgaacataacagttgccccggaaaacgagcaggatattaatccggttcagcgcgttatcagagaagcgtttgggtcaacggaagaagcagacttggtcagcgcattacgtaatgacactggctggatcccaacgctctccctggtggcaaaagacgagaaaggtcttgttgttggccacgcattgtgtacccgggcaagtattggctcgttcccctcactgacactggcgcccgtatctgtccttccggagtatcagggaactggtatcggcagtatccttatcaaggcctgtattgaaatggcgaagatgatgggggaaaagacgatgacagtacttggacaccctgaatattacccacgctttggatttgaacaggcctcagaccacggcataacgtgcagcctgagtatcggtccggacgaagcaaaaatggtactctccctggacggcaccaccttaccaactggcgatatgggattttgcagaccaatgtctgatgccattaaagcttacagaccgggtgaagagtaa

SEQ ID NO: 271007 - DNA, 2481 bp, Klebsiella pneumoniae
atgaaaaaccttacctcattgagtcgttggtctgtttcgctggcgactgccctgatagtactgttcaccatcgtatatgggatcgaactgatttttctggataatatccagagtcagaccgttgagaaaattttctctgttatgaatgagcgactcataaaaaacaacagtgaaatgatagcacaccgaaccagcatgtttctggatactccagtcgccgccagtaaattgatggctcatatccttcaacagaatgagcatatcagttccttcgaaattgagcaggaactccaccacatcatgactgtggatttttccgatgttcagtcaatttcatgcatcagttttgcgtctgccaacgggggttatatagcctttagcagaactgagccgaataaccaaaacctaattaaatcaacagtggcaggtgaaaaaggacgggtaacattccagggcgataatgatcgctcggcgattgctggtaaagatacaaattataacattctgaatcgcccatggtttattaaggcgcgaacgtcaaatcatgctttctggagtgttcctgctcatgacctttcacttgataaaggcggagtgataacctggcgagatcccgtgacaaacaatgcagggcaatttataggcgtcatatctgtagatattgagttgaaaagtattgctaactggcttgaaaatattaccaaagggactaaaaatcaggtaatccttcttgataaacaaggtcgcacaatggcttcctcaagtcctgcgacgaaaacaattttggctgaaatacacaacaaacagtcagcctcagaacgtagaagtaatatacctactgtatatcccacacaagatcatcgactgatattactgcgcggcgttcaagatagtgccggacagcttaactggacattaggcatagtaacaccggataatccgtggacccttctaattcatcattatagtctgtatagccttatgtggggggggagtattgttctggttgggatgctcattactatcctcgtgctaatattattcacgcgccctctaaattctctaattagcaaggtgcatctactcggcacccaagactggcctaatgctgagaactatcctttcactgaggtcaacacactggcccgggctcttgataataaatcattattaataaataaactttttgagaaacagcaaaaaatgttggaagtggatagtgaaacaggattattaacgcattctggattgcgtaaaaaaatccatcattcatccggtcgaaaaatgacagcactgattcatctgactaattattctgttctgacaaatttactcggacctgaatatggacatcgcttgcttgcccgtcttataggttatttaaaaataaccttaccaacggagtctctgttgtcaagagaaaaagtggacaagttgcttgttgtatttcctgagttacaagaaaatgagcagcaacagtggcacgcgttccttgaagaactatttttttccttcagggaaactgatattgaacaagaaacgatattgcttacaggcaacactgccatcgtatatgaatcggttacagaagagcgctttgattatattgttcttaatgctggaattgctctcgatgacgccaggaagaaaggtaacggtgcattatcagttttcaatactgtaatgcaggataacggcattcataatctaatattacataaacagttacaccagggattggaacagaatgaattttatttggtcatgcagccgatcgtcaacctggaaaacaatggtgtatgccgggaaggagagtgtctcattcgctgggaaagcccgacactaggttttgtccccccggatcagtttattagtctggcggaaaagacagggttaatcataccgctgggcaactggataataaaaacagcctgtcaggaactggctcagtttatacgtcgaggtgctcctgtggattttaaacttcatattaatatttcgccactgcaactcgcgcaaccagatttttcattaaatctacttgcatgtattaagcaaaaccacctcgaaggaaaaaacatttgtgttgaaattaccgaaggtatgattctcaataatcatcatgatacactccagcaacttgttacacttcgcaactcgggagtgacggtatcactggatgatttcggttccggttactctagtttgtcttatctgcatactattccatttgatcaacttaaaatagatcgtcagtttgtcagagatctgctatccagttctcgtagcgaaaaagttatagcctcagtgcttagcctttcacaggcttttggggtaccactggtggccgaagggatcgaagacgatgagaccggggtaaagctcaagaaaatgggttgtcatttggctcagggctattattatggacgcccgcagaaattcgagagctgggatatttcaactggaaaaatatacctgtaa

SEQ ID NO: 271008 - DNA, 1842 bp, Klebsiella pneumoniae
atggacgcccgcagaaattcgagagctgggatatttcaactggaaaaatatacctgtaacgatatgaaaaatgatacgttcaaatataaaaaaaacaccattcaacccgttaatgttcgtttttatctgtggggttcgaccgttgttactctggtcctgacatcactgctttcctggtggctgctctcttcagcatggtctggatggcataatgctggaaataatattttgcagttcaataatttctatcatgttttacaggtgtccaacgacttggcaagtgaacgcgcatttgctcatgaattaattctgagcgatgccaaacacaaagcttatgctggagtcttagtcgataagagccgaaataaaaccgaccatgatctaaagtcgataccccgaaatttactttcgccagtactcattgcggccacgttaagacaactaacagatgcacggttcgctattgaccgttttcgtaaacttacgataaatgattcccacactgcacagcaggcaatcgatagaatgatcgcagccactgatttttatcatcaggcattatttcgtcacacatcagaatttttactactggattcctcagcactggggcccattttacatgcacaggcattgggtgagttacgtgatgcaaccggtcgcctcggtgcgcaggttattatccctttggcgacaaaaacaccacttactctgaacattgttaaagcgctgagtcagggtaaagagcgcatcaatgtactatggtggcttatgaacaattatggtccggaagaggcttacatgcctggattcagacaactactcgcagagactcgtaatcaattcgaaatacatggtttgaccatgctcgacaccatagcaacagaaagtgggaataaccaaccctattctttaagtgccaaagattttgccgtgtcttatcatgcgagtcttaaatctttcaatgagcttttggatacttacctgttgggaattgaaaagtattatgatcatgtggaaagccaggcattgattcatcttataactgtgtcggtaattctaatcgtgctctatttaacggcttttgggactatttttctcttcagaaatcatatgcttaacccgatcatccatcttaacaaagttgcaggtgatattataagtggtaagcagacaaatccgagcatgagcaatacaactgcagaagaggtgtatacactgttcacttcactgggggcccttgacagtaaattacgagagcaaaaaaatctcagtgaaatacttcagcgccagtcggaagaagacccgctcactcagttgtataatcgtcgtgcattcgacactaagaccaacgatttattacagaataaaaacgaaaacatgacgctatggctattcatggttgatgttgatcattttaaaaaaatcaatgacacctgggggcatcctacaggagatgatgttcttgttcagcttgcaacaatactgaaaaaattcagccgtcctggtgatataattggtcgtctgggaggagaagagttcgctgtggcctttaccgcaaaccatgatcgagatgtgataggttacgttactcgcattcaaaatgaaatccgccgacaaacgtttgaaggtccaaaaggagaactgttttcagtcacagcaagttttgggttagcgtcggattgtgggcagaaattaggagacatattggctcgagctgacgcagccttatatgatgccaagaacagtggaagagacagactttgtggcgaaatgacctgctccccgttgattaacacaccacgatgtttggcaaccggttccgtttcggtgaaagctgaataa

SEQ ID NO: 271009 - DNA, 240 bp, Klebsiella pneumoniae
atgaagaagttagctatactgtccgccgcgatgacgctgggactatcgtcatgggctttcgccgccgacaacccgccgccgccgccagagaaaggcgcgcagcatcagggtaaaccgccggcgaaaagcggccaacacgatggtaagcaaccgcaacacaacggcaagccgcagcataatggtaagcagccgccaaaaggcggcgaacacagcgggaaaccgctgccgccaaaagcgtaa

SEQ ID NO: 271010 - DNA, 159 bp, Klebsiella pneumoniae
atgcccgaagccaagggcaacctgatctacacctcgttgacggttggccaggtcgccgacagcctggggttcgtcgagcaggcttacttctcacggttcttcaagctcaccacggacctgaccctaaaggcgtttcgccttcagcgttgggaaatctag

SEQ ID NO: 271011 - DNA, 909 bp, Klebsiella pneumoniae
atgaaaattgcaatagtgggcgcaggggcgatgggcggcctgtttggggcgcgcctggccttggctggacaggacgtgtctttcgtcgaggcgtcggagacgaccatcgaggtcatctctcgccagggcttgcgcctggagacgcctgacgtacaggaaagcgtctgggtgccaatctctcgtgcacaccaagtgacaggccacttcgacctgctggtgatctttaccaaggggtttcataccgccgccgccatcgagtcagtgcgccacctggtggggccgcagacttgggcgctttcggtgcagaacgggctgggcaatgccgagctcatcgcccgcgtggttccggccgagcgcatcatcgtcggcatgaccaacttgccggcagaccttgtcgcgcctggcgtggtgcacagccacggcgaagggcacatcaatatctgggcaggcaatggtaaggacagcccgaccgtgcacgaaatcgcggcgaattttagccaggccggtttgccgtgcgaggccgatccgcaggtgcaggtgtcgatctgggagaaggtggcgttcaacgcagcgctcaattcggtttgcgcggtgacccgcaggaccgtgggcgcgctcggccacgctgaagagggacggcaggtgacctcccgcatcgtcagcgaaaccgtggcggttgcacaggctgctggcattgatgctgatcagcggcgggttatcgctgctgtcgactatgcctttcgcaatcaccagcagcacaaaccgtcgatgctgcaggatgtcgaggcaggtcgcaaaaccgagatcgatttcatcaatggcgcggtggtcgagcgcggcaagcgcctgggcgtcgccacgccggtgctggagatgctgttcagcctggtgaagttgagcgaaggctag

SEQ ID NO: 271012 - DNA, 1479 bp, Klebsiella pneumoniae
gtgagtcaagtcaatcacacgccgtatcgcgatcttcacctgctgccgattgccggcgcatggcgtgaaggcagtgcgccgcaatcactgcaggtcagcgatccgtacaacggagaaaccctgctgcagatcaagcaggctacccgcgatgacctggacgaagcctatcaggccgcgcagcgcgcccaggtcgagtgggcgatgataggaccggggcagcgctctgccatcctgcaccgtgcggtgcagatcttcgatgagcgtcgcgaggagatcatcggctggatcatccgcgagtcggggagtacccgcatcaaggcgcaaatcgagtggggtgctgcgcgcagcatcaccctggagtcagcctcttttccggcgcgggtgcacgggcgcattctgccgtccaacgtcccgggcaaggaaaatcgcgtttaccgagagccgctgggtgtggtgggggtgatcagcccatggaacttcccgctccacctcactcagcgttcggtggcaccggcattggccctgggcaatgccgtggtgatcaagcccgcgagcgatacccccgtgacgggcggcctgctggccgcgcgcatcttcgaggaagccggcgttccggcaggcgtgattagcgtgctggtcggctctggtgccgagattggtgatgcgttcgtcgagcatccggtacccaaattcatctccttcacgggctcgacccctgtgggcgccaacattggccgtatcgccagcggtggcaagcacctcaagcacgtggcactggagctgggcggcaacagcccgttcgtggtgctggccgatgccgacctggagcaggcggtagcagcggcggtgatgggcaagttcctgcaccaggggcagatctgcatggcgatcaaccgcatcatcgtcgaggacgcactgtatgaccgcttcgtcgagcgctatgccgaaagggtcaaggcgttgaaggtgggcgaccccagcgagccggataccgtggtcgggcctatcattaaccgcaagcaactggacacgttgctgagcaaggtggcgcgggccagggaggagggtgcccgtccggtcgtcgaaggtgacgtgcgtgggcaactgctgccgcctcacgtgttcgccgatgtgacggcagaaatggagatcgcccgcgaggaaattttcggcccgctggtcggcattcagcgcgcgcgagatgagtcccacgcgctggcgcttgcgaacgacagcgagttcgggctatctagcgccgtgttcaccgccgacctggagcgcggcgcgcgtttcgcgcgtcgaatcaaggctggcatgacccatgtgaacgacattccggtcaacgacgaggcgcacgctccctttggcggtgagaagaactcggggctggggcgtttcaatggtgagtgggcaatcgaggaattcaccaccgatcactggatcagcgtgcagatgacaccacgcaaatacccgttctag

SEQ ID NO: 271013 - DNA, 1335 bp, Klebsiella pneumoniae
atgactcaacgacgtgccttggatgtcgcgggctccgctccgcttggaaaactccactataccctactcttctggtgttccttcatcatgctgttcgatggctatgacctggtcatctacggctctgtcgtgccgcaattgatggagcattgggcattgactccggtcattgccggctggatgggcagtgccgcgctgttcggcatgatgttcggcgctgtcgtcatcggcccgctggcagatcgcctgggacggcgcaaagttattctcagcgccatgacgctggccagtgtttgcacgctgggtaccgcatgggcctggaatgcggagagtttcgcaactctgcgtttcgtcaccggcgtcgggctgggcggggcgatccccaacatcgtcgcgttgatgaatgacctgacaccgaaagcacgtcgcagccgaatgaccactatcatgctcagcttctactcgatcggggcaattttgtcggctctggtagccctgtttatcattcctcgctttggatgggaggcaacgtttctggtgggcggcatcccgctgctgttcctgccgtggatgtaccgccaactgcccgagtcgctgaacttcctgctgaaaaaggacaaggccgcggccagtgcgctgctcaaacgcatcgatcccgccgtcgacgctgaccaggtacgtttcgatgcgcccgtacgcacttcgagcgcggcaccgttgtcgcgtctgttcaccgaaggacgtggcgtgggtacggtgttcctgtggctggggtttggcatgtgcatgctgatggtctatgggctcaatacctggctgccgaagatcatggtctccggtggcttcccgctgggttcgagcctgatgttcctggtgaccttgaacattggcgccaccttcggcgccctgggtggtggctggctcgccgatcgctggggctgcaagcccacattgatactgttcttcctgctggcggtgatctcactctgcacgctgggtatcaagcctggcccactgttgctcaacgccatgttgctgatcgccggtgccaccaccatcggcaccctggccgtcatccatgccttcgctgcacagcagtacccgagcgagatccgtgcgacgggcgtgagttggtgttcggcaattggccgtttcggggccgtggctggcccggcaatgggcggcctgatgctgagcataaacctgccactgcagctcaatttcattctctgcgcggtccccggattggtggcgattttcgccattgccatgatcaaaagaagggccgttgccagcgtgggcttgaatgcccagccggcagacacccatcactga

SEQ ID NO: 271014 - DNA, 1590 bp, Klebsiella pneumoniae
atgaaaacaattcactccgctgcatatgcgctactgcgccgccacggcatgaccaccatctttggcaaccccggctccaacgaactgccgttcctgaagagcttcccggaagactttcagtacgtactcggccttcacgaaggtgcggtggtgggcatggccgacggttatgcgctggccagcggcaagccggcgttcgtcaacctgcatgctgcggcaggcacgggtaacggtatgggcgcgctgaccaactcctggtactcgcacagccccctggtgatcaccgcgggtcagcaagtgcgaccgatgatcggggtagaggccatgctggccaacgtcgatgctacgcaactgcccaagccgctggtgaagtggagctacgagccggccaacgcccaggacgtaccgcgtgccctgagccaggcgatccactatgcgaacaccacgccgaaagcaccggtgtacctgtcgattccttacgatgactgggatcagccttcggcacccggcgtcgagcacctgatcgagcgcgacgtgcagacggccggtacgccagacgctcggcaactgcaggtgctggtccagcaagtgcaagacgctcgcaatccggtgctggtactgggccccgatgtcgatgcgacgctgtccaacgaccacgcagtggctctggctgacaagctgcgcatgcccgtctggatcgccccgtcggcgtcgcgctgcccgttccctacccgtcaccccagcttccggggcgtgctgccagcggctatcgctggcatcagcaagaccctgcaaggccatgacctgatcatcgtggtgggtgcgccggtgttccgttatcaccagtttgcccccggtgattacctgccggtcggggcgcaactgctgcacatcacctccgatccgctagaggctacacgagcccccatgggccatgcgctggtcggcgacatcagggaaaccctgcgcgtgctggccgaagaagtcgtccagcagtcccggccgtatccagaagcactcgctgcgcctgagtgtgtcaccgacgagccgcaccacctgcacccggaaacgctgttcgatgtactcgatgcagtcgccccgcacgatgccatctatgtcaaggaatcgacctcgacaaccacggcattctggcagcgcatgaacctgcgtcatccaggcagctattacttcccggcagcgggtggcctgggcttcggcctgccggccgccgttggcgtgcagctcgcccaaccgcagcgacgagtcgtcgcactgatcggtgatggctctgccaactacggcatcaccgcgctctggacggccgcgcaataccgggtccccgtggtgttcatcatcctcaagaacggcacctacggtgccctgcgctggtttgccggggtgctcaaggccgaggactcccctggcctcgacgttcccggcctggacttctgtgccattgccaaaggctatggggtcaaggccgtacacaccgatacccgggacagcttcgaagcggcactacgaactgcgctggacgccaatgaacccaccgtcattgaggtgccgaccctgaccatccagcctcactaa

SEQ ID NO: 271015 - DNA, 906 bp, Klebsiella pneumoniae
atggccggtttcgacctcaacctgatcacgactttcgtcacgctttatgaaacccagagtgtcaccgtggctgccgagcgactctgcgtaactcagccatcagtgagctatgcattggccaaactcagggaacagttcgatgacgccttattcgtacgtaaccaacaaggcatgcaacctacgcggttggctactcagctctatgagggattcaaggaagccagccgtagcatcaatgatgccgtttccgaggcacgcaaattttccccatcaacctcaaagcgacgttttcgccttgccttgtcggatttgggcgaaattgcgttgctgccaagagtgctcgaccgtctcaaccagatagcgcccagtatcgagcttgacatcgtgccgcttgagatcgaccaggtcgcaacatggctgaacgatgggcatatcgacgcggctatctgtagtcagatattgccgggggccggcattgcccaccaaaggctgatgagcgagcaatactgttgcctggtcgatgacgctcatccacgtattggcacgcagatgaacatgcagcaatttctcgccgaaccccatgcaattgtcacccgaacatccggccatggcatggtagaagacgtcctgaaaaaaatggccgtcgagcgccgagtgcggctacgcatcccacatttttcggtactgccaaagatcatccccgggaccgagatgatcactatcttgccctatcgcattgcctggagcttttgcgagtttccaggagataagccattgaaagtcgtcgctctacctttcgaggtaccatctttcgaagtgaccctgcactggcattcgcgaagtgaaaaatccacttcgctgaagtggttttgcgagcagattgaggctgcacttggtgagccttaa

SEQ ID NO: 271016 - DNA, 1116 bp, Klebsiella pneumoniae
atgacggtcaaagaccaccggctgcacgccatggcgcaccagcacatcggcgcaggccagcccggccggcccggcgccgataatcgccacccgtttaccgttcggcttaacctgcgagaggtccggacgccagccgctggccagcgcctggtcggatataaatcgctcaatattgccgatggtgaccgcgccgctttcctcgcgcagggtgcaggcgccctcacacagccggtcctgagggcagacgcggccggtgatctccggcagacagttggtctgatgggacagggcgaccgcggcggcgatatcccctgccttcaccagctcgacccactgtggaatatggttatgcagcggacaggtccattcgcagatactgtgttctccacatttcaggcagcgggaagcctgctgccgggcctgcgccggggtgaacggctgatagatctcctcaaagtggctcttgcgcgcctccgccgccagcttatccggctctccgcgcggcggcgtcatcgccatctgcctggccttttcgccggcgtcgggctgtctggcgggggccgcgccgcgctgccacggctgcgcctcctggcaggccgaccgcagacgccgctgcctggccagcgtggtcaacgtctcatcgtcggcgagggtcagcgcctgcgccggacagttttccacacaggcaggtcccgcctcgcggcccgcgcacagatcgcatttgtgcgcgctggctttcacctggcccgcggcctgcggcgtcaccaccacctgcatcaccccgaacgggcaggccaccatgcaggatttacagccaatgcatttctcctgagagacctgaacgctgtcgccagtctgggcgatggcgccgttggggcagctgcggaggcagggggcgtcttcgcagtggcggcaggtgatggcgttacgctgcccctctgctttaatcacggtgatacgtggcaaaaagcgctgcggggtcagcgcatgttgctcctcgttatgcgccattacgcaggccacttcgcaggcctggcagccgatacattttcgactatcgctcaaaataaagtggttcatggcttccttttgtcttattggttaataaccccttaa

SEQ ID NO: 271017 - DNA, 720 bp, Klebsiella pneumoniae
atggcggcgcgctgcgccttatccgggctacagatccctatatatcaaacggttactctgtttcgtaggcccgcgcaagcgcagcgccgccgggcaatctgcaccagactccgttcccgtcgttgtgccggatggcggctaatgccttatccggcctacggaaccctatatatcaaacggttactctgttttgtaggtccgcgcaagcgcagcgccgccgggcaagctgcatccggcgccgttcccggcgttgtgccggatggcggctacgccttatccggcctacgaaaggctgctgaacctgagttatcaaagcgttattcaacaccgcaggcccgcgcaagcgcagcgccgccgggcaagctgcatccggcgccggtcccggcgttgtgccggatggcggctaacgccttatccggcctacggaagactgctgaacctgagttatcaaagcatttttcaacaccgcaggcccgcgcaagcgcagcgccgccgggcaagctgtatccggcgccggtcccggcgttgtgccggatggcggctacgccttatccggcttgccttccccatcttcaacgccaacatcgcgtcagcaggcatgttcccgttgcatctcctgagacccctaatccgcacaacgatactttcggttattgcctcttcctggctgaatcgttaaagctaaaagtaatgcagatcacatattgtggtgataattaa

SEQ ID NO: 271018 - DNA, 549 bp, Klebsiella pneumoniae
atgaagggctctaaaaagcaaaacgccggcacaaggccggcgatttgttgttaccagaacgtcagatgccgattactcagcaaccacgttgatgataactttagcgaatacttcgctgtgaacctggaagtccacttcgtgctcgccaacattacgcagaacgccgttcggcaggcgaacttcgctcttagcaactttaacgcctgctgcagtaacagcgtcagcgatatcgcgagtaccgatggaaccgaacagtttaccttcgtcgccagctttagacgcgatggttacggattccagggcgttgatctgcgcagcacgagcttcagcagctgccagaacgtcagccagtttggcttccagttcagcgcgacgtgcttcgaagaattcaacgtttttcttggtagcaggaacagctttaccctgcgggaccaggaagttacgagcatagcccgctttaacgttaacctgatcacccaggctacccaggtttgctactttatcaagcagaataacttgcattaccttatcctctcaaagtcgtattaa

SEQ ID NO: 271019 - DNA, 918 bp, Klebsiella pneumoniae
gtgattgaaataagagagtttcagcaacaagatagcgaaggaatctgcgccttatttcagacggtttatggcgatcgctatgtgtatcctgatatttatatacccagcctgatcggctggcacaatgcccagggcgagtggcgcagcgcgatagccgaacagaacggccttatcatcggacatgccgcattatggcggcaccacgcggataagcagaccgccgaaatggcaatgtttgccgtacatcccgccttcagaaaccggggtgtggcgacccaattgggcgcatttttgcggctagccgcaaaccggctgggcctgggcacgctcaccatcaaaatggtgtccagccatcagcattcgcagcgcctggcgcagaggctgggcttttactcgaccgggctgttcagagattacgtcccctctccctttcaatccggccagcgtgaaagcgttatccttggcgtcttacccttgcagccgcggcccgtaccgctcaccgccgacgatagtcgcgaggatagctggatacatttactcaaggaaaaattcggcgcggcgcagatcccggccaccagggaaaaccgcgcggcacccattgaaatcgctatttgtgatgatcgtgtggacgtcacgatgaatacctcaacgccacagacggtcgacgagatttcccgactgcctgcccgaaaactgatttatatccgggcccccgtggataccgcgctgatgtcgttacgacccaaactgtggcgggcaggctttaccgatatggggctggagcctgccgccggagggggatggttttggctgctgcagcgcggctatctccccgggaagcttgacctgtcctgccctatcgccattgccctgcaaaaaacggccaacgccaacatcaatcataatgcgtgcgcctga

SEQ ID NO: 271020 - DNA, 1326 bp, Klebsiella pneumoniae
atgaccacagcaaagataacggatcaccgcgccccccacatggaggacatagccgtcaagccactgagtctcgaacagcttgtccagattgttcgtcaccgctcgcctttctatgccgagcactatcgccatctccccacccacggctggcagctaactgacctgccgctcatcaatcctgaacgttactgggaggggagccagggtctgaaaaactggcccgtactcaccgggccggtggaagagggaattgtttttaaaaccggtggcaccaccggcggcggcaagctgtccgttttttctcgccaggagtggcgggcgtttgtcaccagctttggccgcagcctctccagccagctcaagccaggcgcgcgggtggcaaatttattcttcgccggtgatttatacgcaagtttcttgtttatccacggcgccctgtcaaacatgtcgataccggtatgcgagtaccctttcaccggcacgcttgaaccacatgccctcaccgaacagctcgtccaacacgatatccgagtattggtgggggtgccggcgatgctgctgcaatatgcagcagtacttgccgaagaaaactgccagttacccggtatcgagaccattctttacggcagcgagagccttttttccgagcagctacagctgctgaaatcagcctttcccaatgcccgtattgcctccatcggctgcgcctgcgtggatgccgggcttatcggactcagcacgccggattgcctggcggacgagcatcgggtttttgaacccgaaaccatcgtggaaattattgatgaagcgacaggcgagccaatcaacgacatcaaccattccggaatgctggtagtcactagcctcacgcgcacgctgatgccgctgattcgctatccggtaggcgatatggcagcctggcgtgaaccgccgggaagccaacatcgcaagtttattttgcaggggcgcagcagcctcgggcaccgcttgcgggtgggctacgcctcgctgtttcctgatgaaatagcgggcctcattgcgaaagagatgggaaatcagcagtggcagctgatgctggagcacgacaacaacgaggatcgcttgaccctgcgtatcgccttttccgggacgccgcatcaggccgacaggctttgccgtcaattagtctccagggatcacgctctcgcagaactacaggctagtggccagctgcgcgttcaggttcactggtgcagtcaggcggaccttatccgcaatacccgaacgggtaaactgcagcgtgtgatcgataaacgcgcctacctcgcccaggaggtggggaagtga

SEQ ID NO: 271021 - DNA, 2409 bp, Klebsiella pneumoniae
atgtatctcattcaggggaaaacctatccatcgttaacgccagacgaggctctgaccctgttgactcacgggctggatagcgcactgagccaaccgccgcgcctggaaaccgtgcttgactgcgccgggcgctttatcgaacagctaaaagaccgcgcttttcttccccatctgagccccgcttatcgggaggaggccagaacgttttgccggcctgacgcattgcgccaaaagctcgaacatgagctgggcgataatcccttttccgtgcgccgcattaactaccgcgaaccgcagtttgaaggctggcgtcctctgggcgtcgttgtccatatcaccccagccaatgcggaactgctccccttcttcgcaataatcgagagcctgctggtcggcaatattaactggctgcgcccaagcgccagcgaacaaggagtgacaatcgaactgctccaggcgtttatcctttgcgatttaacgggtcagctggcgcgcttcgtcgccgtggttcccgttgatacaacccaccttggcctgctgcttgcccacgccgatggggtatcggcctggggtggcgataccgcgctcgacgcgattcgccaacagctccctggcggatgtcgatggatcccctggggacataaaatcagctttgcctggctacaacctgatgccgttaatgaaaaaaccctccttgcgctggcggatgacgtttgccgttttgaccaacaggcctgttccagcccgcaaatcgtttttgttgatagcgatgattcagcggtattgcaggatattggcaacagactggcacaggccatgcaacgccgccatccgcggtggcaaccgttaatacccgatgaaaaggcggcagcagatatcaccagcgcggtcgccttcgcgcagctggacgccgtatttgccggggctgataacacgctgctggcaggggatggctggcgcatcatccagcaaaacacctcggcgatagcgccttcaccactatttcgaaccgtcctgctgcggccgctaccgcaaaataaagtgatacaaacgctgcgcccctggcgaacccatctgcaaacctgcgggatggttgccgccgatcgggacaggatccaccttagccaactgctgctgacggccggcgtcaatcgcatcacccctgtcggtaaaatgcatgacagctatgtcggcgaaccgcatgacggtgtttacgccttaagccagctggctcgtcggatcaccgttacactggatgccgatgccctgccgcagcaggccacgctcaatgcgaacccgccaccgcctgtgctgacggcgcagcagccaattatggataaaacggccttcctacagcatggcatgcagtccagcgcccagcttttttttcgcagcggggggagcagcggcgtgcctaaactcgccgggtttacctatcgcgactatcgtcgccagatgcaagccgccgccgcaggcatgttcgccgccggactggaccccgtccacgacaaagtgctcaatctgatgtacgcgggcaatctctacggcggtctactcagtttcttcacagtactggaaatgcttgaggtgactcatcttcctatgggaggccctcatgatgatgactattacgagatcgcccggaccattgtgaaccagggcgtgaccaccctcattggtatgcccagcacgttgtatcagctctttacacgagaagaagccattctgcgcgactacggcggcattaagaaactgctgctgggtggcgaacatatgggagccagccagcgcgactatattcatggtttcggggtgaaaaccattcgatctgcgctgtatggttcggttgatgcggggcctctggggcatgcttgtgcgcattgcccggatggcgtatttcatctgatgacggatattcaatggctggagattgtcgatccgctcgatgatcgacccgtcgcgcccggcgaggctggccgcctgctgttcacttcgacggcccgcgagggccagaaggttattcgctatgacatcggcgatatgggccgttggctgccaggcgaatgtccctgtggcgcccccagtccccgctttgagcttttaggtcgccatggcagcctggtgcgtataggtacgatgtttattcagccccagcggctggcgacgcttgccgatgtgcccattcagttgattcttcaacataaaccgcacagcgggatcgaatgcatttacatccttaccgaaggcgatattgataccgtcaaacaacgagtctgtaccgatcctgaactcaaaatggcgttggacacccacttgctggagttagacgtgatcagccgcccgttcagcgagtttgaacggcatccgcaaagcggcaaaacgccgcttgtcatagataaacgtcgttga

SEQ ID NO: 271022 - DNA, 1128 bp, Klebsiella pneumoniae
atggtcactttaccctgcgtcgaggctctctgcgccatcgataagccttatgatgaaaatagcgattcacaacggctttttgatgccgccatgcatgaaatcgtcgcatttcatgttatgaattcgcctggctatcgccagtggctggcccaccaccatattcaggatgatgcggcgaatatagactcgtggtcgcagctgccgccgatttttgccaactacttcaaacaaaatttactgatcagccgctctggtcagaatgcgcttgaactgacttcctccggtaccagcgggcagaaaagtcgtatgcgctatgatgagcgcagtatcggggccgctcagggaatggtcgatcgcatattccgctattatggctgggaaacgcccgatgctccctgcaactatctgcttctgagctatgaacccgcagatatcatcacgcttggaacctcttttaccgaccagtttttgtgtaaatacgcgccggtcaaacgtgccatttacgcgctgcgtcacaccgggagcggacatgagttcgatccttttggcgtgattcgtgcgttacaggaatttgcggcagaggggttacctgtacgaatccttggtttcccggcatttatgtggttcgtactcgaacggatgcgtgaaatgcagctcccgccgctccagcttcaccctcaatcgttggcctttttcggcggcggttggaaaacgcatgccgaccgtgaaattcctaaatccgcgttttatgcccgactgacccaacagctcgggatcccggatagccagtgccgcgacggctatggttcagtggaacactgcgtgccctacattgaatgcgtacatcaccatttccatgttcccgtttattcccgcgcctggatccgcgataccgcctctctggcggtgaaagggtatgggcagagcggttttatccagtttgtatcgccttatatcacctccagtcctgcgcacagcgtggtcatgagtgatcttgctgtgctgcaccgtgccgaagagtgcggatgcgggttaacaacggattggtttgagctgctgggtcgggccagccatcacaaagcacgtagctgcgccctggctgcgtcggaacttattaagggaaattaa

SEQ ID NO: 271023 - DNA, 1260 bp, Klebsiella pneumoniae
atgtttaagtcattactgcctatctcttcgcgtcacgccttgcttttttgtttatttctttcaacgttcgagctgttaacttatgtcgccagcgatgttgtgatgccgggcatgttagccgttattgaagatttaaatgctcagccccattacgtaccgtggtcgctcaacgcttacttacttggcggggtcggtttccagtggattataggcccgatatcagaccgctttggccgtcggcccttattactcatcggctgcgcgcttttctctatttcctgtctggccactccgtggatccacaacattcaactttttaccctcctacggtttattcagggaattggcctggggtttgtggtggtggtgagctacccggctttgcaggaagcctttaacgaatcggatgccatccgtttgattgccatatttgccaatatcgcgctgctgtcgccgctgtttggccccttagtcggcagtgtactgctttcctgtctatcatggcgcacgctttttattgctatcgcggtgatggcggcacttacctggttcggtttgctacgctggatgccagagacaatcggcgtggtacgccatgatggcagtaaaattgaatgccagccgctggcgctaaaaagcctcgtgcgcgcttatggcgatttactgaagaatcaacgttgtctgtccggcagcgttgcgcttgggcttaccgggctgccgctgatggcgtggatagcgttatcccctctgctgttggtgcagaatctacaaatgaatatgctggcgtatgcgctatggcaattacctatttttggcgcgttaattgcggggaatatcgcccttaactttaccgctgaaaaatttaaggcggaacagttattattcttttcactcttccccatatttatcggcataacgctggctctggtcttgacgctactctatgaagatattgttgctttgattatcggcatggctatttatgccttcggcctgggcatctgcaatgccacactgtatcgccttacgctattttccagcgagcatggaaaaggttcggtatcggcaatgataggcatgatttccgtcgccatctttagcctgggaggtgctttaatggccgcgttcggcgccggaaatagcctcagcgcatatattatcgcagctatcattccgatgctgatagcattattaattatgattaacatattcaacagccagaagcggaataaaatccagacaccagcctcaagctattaa

SEQ ID NO: 271024 - DNA, 1137 bp, Klebsiella pneumoniae
gtggataatctttttaccattaatgcctgtaaaactttcggctgtcgcaatttaggcttgccgtctgcggccgactatcatttccccagctttcggctgggctaccccgcactctactgtgcagcctgcggcagctatccccccctgtttaacgaacgggaattccgcccctggctggccgcttatctgacggatcatgcccgacgctacggctatttttgcccggtctgttaccagcgggatatcattcgctacggccacaatccgcagggaacgcagcgcttccagtgccgccactgcgacaaagtctggacgccaaagctcccgcatcttgccgccattgaaacgccgagctgtatttgcagcgtaccgttgattgtgccgttccagggaaatgtcgccgagcagaagctctatattttattaagcttcgacgctgttcgcggcaatattcttcatcttacctctaacttcacccctttcgcggtgggcgaatcattacgctatcgctggcgcggagggcaagccgccagcgaggcgagcgacgatattgttcaacgcattacccagactgaactgggctttttacaacgcagtcagttcgatgaaatccagtacggcagcgccacgctcaagcgcaatgcccgcggcagcatattgcgacctgtcattgccgcccatggtcatttcaagctcctcagccagcggtttccagaggtgaaaacgcacatcattgcgcatgaatgttttttacgcggcgcggcaatcattgcctgggcgccgctctttcgccggcgacaaggaaacctatggtatgtggaagaaaaaataagtcgccccgccagtcaagccccctggcggctgcaggggaaaacccatcatggctggtggcaaaattcatggcagcgctggatacaggaggagaatcagaaaatgatctgccggcttgccggtactgcccaggagagcagcttactaccggatctcgccgccagtcggcgttttatcctgtggctgaaaaaaaggccagcgttcgcggacagcgccctgttttccgcaggacgcgtaacgcaaatgctggcctcactggcgcgagagtataacgcgacgcttacagcagctgcgccagacggttaa

SEQ ID NO: 271025 - DNA, 2013 bp, Klebsiella pneumoniae
atgaatattttgggttatctacaaaaggtgggtcgggcgctgatggtgcctgtcgctactttacctgccgccgccattttgatgggcattggttactggatcgaccctaatggctgggggagttccaatgcgctagcggcactctgtattcagtccggttccgccattatcgataatatgggcgttctgtttgccgtcggggtggcttacgggatgtcgaaagataaagatggcgccgccgcgctcgccggatttgtcggctttctggtgctgaccacgctctgctctcccgctgccgtcgccatgattcaccagatcccgatcgagcaggtgcctgccgcgttcgctaagatcaagaaccagttcatcggcattatggtcggcattatttcggccgagctctacaaccgctttagcagcacagagttaccaaaagcgctctcattcttcagcggtcgccggctggtgccgattctcacctcgttcgccatgattgtggtggcctttatcctgatgttcatctggccggtagtctttagcggcctggtcagctttggcgaacatattcaaaagctgggctcgctcggcgccgggatctacgccttcttcaaccgaatgttaattcccgtggggctccaccatgctctgaactcggtattctggttcgatgtcgccgggatcaacgacatccctaatttcctcggcggcgcgcaatctatcgcttccggtaaagcggtggtcggcatcactggccgctatcaggcaggcttctttccggtcatgatgtttggtttgcccggcgccgcgctggcgatgtaccactgcgcccgcccggaaaacagagcgaaagtgatgggtattatgatggccggcgcctttgccgccttctttaccgggatcaccgaaccgctggaattctccttcatgttcgtggcgccggcgctgtatgttattcacgccgtactgaccggtatcgccgttttcatcgccgccagtatgcactggattgccggattcggcttcagcgccggtctggtggatatggtgctggcctcgcgcaacccgctggccacgcactggtatctgttgatccccatgggggtggtgtactttgcgatatattatctggtctttcgcttcaccatcactcgcttcaacctgcttacgcccgggcgcgaactggccatcgccggcagtgctgccgatggagaagatctgaacttaagcgccggaaaagaacaggatatcagtgcgctggcccgccagtacattgcggccatcggcggttccgataacctgaccaatattgatgcctgcattacccgcctgcgcctcggcgtcaaggatgcaacacagattaacgaagcgctggctcgccgcctgggcgccagcggcgtaatccgtcttaacgccaccaacgtacagatcatcgtcggtttcgtggcggaaaaaatcgccacggcgatgaaaagcgtcggccatgtcgatgccgcggaagcgctaccccacgcggccgccccactgaacgccactcttcgcaaatcggcggatgcgtcacgcgtcatcgagctggtcgccccggtaagcggtgaagtgatcgccctggagcaggtgccggacgacgccttcgccagcggcgccgttggtgaaggcgtcgccatccggccaaccagcaatatcgtggtctcgcccgcggctggcaccctcgttaagatcttcaacacccatcacgccttctgcctggagactgaagacggcgcagagatagtcgtccatatggggattgataccgtcgcgctggcaggccagggttttgtacagctggtagaagaaggtgccactgtcacggctggtcagccaattctcgagatggatctcgtgtacctggaggctaacgtgcgctcaatggtcagtccggtagtatgcagcaatatcgagaatttcagcggacttgaaatcagcgcacaggatctggtgaaggccggcgaaccgctgtttcttatcaggggataa

SEQ ID NO: 271026 - DNA, 1143 bp, Klebsiella pneumoniae
atgataatccagagcgaacgcgtatggctcgctggcggtttttatccagcgcagattaccattgagaatgggctcattcacgacattacgcccgggctcagccccggcgtggataaggattacggggcgcggcggataattcccggtttgatcgacagccatgcgcacggcgcctggaattacgataccaacgaaaacgatccggaagggctccgccgctggacctcgcgcctgccggaagaaggcgttaccgccttttgccctaccaccgttaccgatgaaaacgccacgctgctggcggcgctggacaatatttcccgcgtcatggaagaaggttataccggcgcggaaattcttggtatccatctcgaaggtccgttcctgagccagcaataccgcggcgcgcagccggaaaaacagatccgcccggccgacgtcgcccagtttcaggccttcgagcaggcggcgcgccagcgcattatcgccattacgctggcgccggaagaggataatcagtttgccctgacccgctactgcgcgcaaaaagggatttcggtcaatatgggccactcggatgcttctttcgagcaggcgctggcggcggtagccaatggcgccaaaaatgtcactcacgtgtataacggcatggcgaagtacgtcaaccgcgagccggggctacttggcgccgcgctgaatctggacggtctgtacggcgaggtcattgccgacggcatcttcgtcagcctcgtctctgcgggccatctttatcgcagtaaaaatgataatgacatcatcatgatcagcgattcgatgaaggcgaaaggctgccctcctgggcgctatatgttcggcggcgagccaatggtgctgggagacgatggcgcaacccgccgggacaatggcgttctggtcggcagcacgcttcagcttaaccgcggattatataatatggtggagagagcgatggtcccctttagcgcggccttaaagtcctgcacgattaatccggcgcgactattaggtctggaacatcgcaaaggaaaattacaacgcggatacgatgccgatattgttgtactcgaagataattatcaggttaatactacttattgccacggcgccattgcctggtcaataaattaa

SEQ ID NO: 271027 - DNA, 738 bp, Klebsiella pneumoniae
atgttgaactttattattaccgacacctacgaaaaaatgagcgcattagcagcagaacgtattgccatcgcgctgaagagaaaacctgatttagtgatggcgctgcctaccgggggaacccccgttggcctgctcgccgaaatgagcagaatggccaaaaatggcgagactgatttctcctgtgcattttcatttaacattgatgaatatattccactgccaaaagacgatccacaaagctatttttactttctgcagcaccacttttatcagtacgctactattcccgtcgaaaacgtttttgtacccaatgtactggccgcagatctgcaggccgaatgcgtccgctacgaacgtctgatccaaagccatggcgatttcgacattacggttctcggtattggtcacgatggtcatatcggtttcaatgaaccgcacgccacccacagcccggtgtgtcatattattgatcttaatgaagagactatcgaggccaacgcccgcttcttcaccaacaaaaacgaggtgccgcagcgggccatcacgctgggtatgggaacgatattgcgcagcaaagaaatcgtgctgattgctaacggtaaatcaaaagccgaggtcatcaaacagctgcatcagtgtacccgcattgatccccagttcccggcctcattcttactgatgcacgccgacgtcactatcatttgcgatcgtgaggcagcatcacttatcagcgcgtaa

SEQ ID NO: 271028 - DNA, 915 bp, Klebsiella pneumoniae
atgagaactggcctgatttcccgaattcaacgctattccaccaaagatggtccaggaatacgcagcaccgtcttcatgcagcagtgtaatctgcgctgtcagtggtgcgcgaatccggaaaccatcgggccaggccacaacgttttctggtttaaagaacgttgccgccagtgcggtacctgtgtgcaggcggccaacaatcatgccatcacccttgctgaaccgggcaatggcgtgaatatcgatcgtagaaactgcaccaatttgctggatatggtcgatctctgcccctacgacggctatgaaaaagtcgccaaagaaatgacctctcaccagctggcggaattgctgctgcgtgacaaaacattttacgactcaagcgaaggcggcgtgacgttttccggtggcgaaccggccctgcaggcagagttcgtcaacgaaactgcacagctgttaaaagcacaaggcgtgcatgtttgcctggataccgcaggaaatatccgctgggaaaagctgcgtccactgattgaaaccgtcgatctggtctcttatgactttaaagccttcaatccagagacacatctcgcctgtaccggcgtggacaatcggcggatccttgataatgccaaagcgatcgccgccatgggcaaaccgatcctcgcgcgcatggtaatcgtgccgacgcgcaacgatgatcccgaggacatacgccagcgcctcgactttatccgtaaacttggcccggcagtcttgcaggttgatattctggaataccatatttatggcgtcggaaaatatcaaaagctcggcatgccttactttctcaaagatatcccggcatgccagcgcgaagtgacagaacaaattaaacaatacgctgaagatattggattaaaagccactattggtggttaa

SEQ ID NO: 271029 - DNA, 2424 bp, Klebsiella pneumoniae
atgaacggattactgagcttcaaacctaccaacgacgattgcgactttgcgcgaatcgctaagaaacaggatcaaatgttccatcgcgtggcgaccctctgcccggaacgcgcagagatcatcaccgaatcgtttaaacgctccgaaggccagtccattgtgattcgccgggcgctcgctttcgccgatattctggcgaaaatgaccatctacatcgaaccggacatgttaattgtcggtaaccaggcgagcgctaactttgccgctccggtcttcccggaatattccttcaactgggttatcgacgaactggacgaattcgataagcgctccggcgacagcttccaggtttccgaagagaccaaagcgcgtctgcgcgtgttacaggattactggcagggcaaaacccaccaggatgaagtgcttgccaacctgccgcaaattaaccgtctggcggaaaaacagggcgtgttacatcgcggcggcatcagcatgtccggcgacggccacatcatcccgaaccacgatttcgtgctggaagtcggctacggcggcatgcgcgatatcgcgaaacagcacctggaaaatgacgacagcctgaccgacgagcaaaaagatttttatcaggcggtcattatcaccatggaagcggctttgcattactgcaagcgcttctcagaactggcgaaaaccgaagcggcgcgcgaaacggatagcaaacgccgcggcgagctgctggccatgagcgagatgttcgctcacctgatggaaggtaaagcccaaagcttttatgaagccgtagaaaccgtctacctcacccatctgctgatgatgattgaaagcaacggtcactctttctccttcggccgcttcgaccagtatgtctggccatactatgaagccgacatcaaagccgggaaaatcagcaaagagaaggcgctggagatcctgactcacttcttcatcatgaccaacagcctgaacaaagtgcgtccatggggccatacccagtacagcggcggctatccgctctactccaacctgatggttggcggcatgaagcccgacggcagcgacggcaccaacgatctttcctacctgtcgctggaagcgatggcgctgaccgggttacctgaaccgaacctcagcgtgcgtttctcaaaagatacaccgcatgcgttgatgcaggattccgcgaagctcattcgcaaaggcttcggcatgccgtcgatcttctgcgatgaagtggtgattccggcaatgatgacgctgggcctgacggaagaagtcgctcgcgaatatgcttcaatgggctgcgtagaaaccgccatcccaggtcgctggggccaccgcgccaccggcatgacctacgtgaatttcggcaaaatccttgagctggtgatgaacaacggctgcgacccggcgaccggcgtgcagttggttaaaatcaacggtaaagaaggccgcgagataaactaccagtcttacgatgaagtgtgggcggcgtggaaccagttactggagttctattccgatctggcggtcgagtgcgatctggtctgcgaccgggcgctgaaatatcacgacgctgatgcctttgcttccgccactatcaactgctcgctggaacgcggcaaaacgttgaaaaacggcggcgcggagtatgacttcgtcagttcttccaacatcggtccttccgtggtcggcgacagcctcgcggcggtgaaaaagctggtcttcgacgataaggtcctgacgctgaaacagctgcgtgacgccatggacagcaactttgaaggtctggaaggcgcacgggtacgtaaactgtgccgcaatgcgccgaagttcggcaacgatatcgactatgtcgaccatatcgtcgccgatgtcttcgagtcctatctcaagctgctgccgaaatacaaaaccgatcgcttcggcaaaggcccgaaaggctgcggctataccatgtcgacctccaacatcacctcctacgtgccgaacggttttgatgtcggtgccacaccggatggccgtctggcgacgttgccgctgaacgaaggcgcctctccctgcctcggggcggacaaagaaggcccgacggcggtgattaactccgtctcgaaactgccgaaccagaaaatcgccggcggccagctgctgaatatgaagttcaccccaagcgcgctggaaggtgacgataacctggagaaatttaccgcctttatggaagccagccgcgagaaaaatatcttccataaccagttcaatatcattgattccaatattctgcgcgccgcgaaggcgaatccgcaggattatccgaacctgatggtacgcgtcgccggatactgcgcgctgttttcaacgctgatgccggaagcgcaggatgccattatcgcgcgcaccgaactgagctggtaa

SEQ ID NO: 271030 - DNA, 750 bp, Klebsiella pneumoniae
atgagcatttacgccattctgcagcaggacaaaaaagtcgttgtgaacgaactggccgagaaattcggcgtcactaaaatgaccatccgccgggatctgtcattctttgaaaaacagggcatcgtcaaaacgacctacggcggcgcctacctcaccagcggcgccagcgtcgagcccagtttccagcttaaatccgtccagatggttgacgataaacacctgattggccgcaaagcggctgaactggtggaagacggcgataccatcatcatcgactgcggaaccacgctcctggcgctggcacaatctattttcgacaagaaaatcatggtgataacgaactcagtgcctgtcgttaatctgttgaaaggacgaaaaaatatcaagctgatagtcgccccaggcgaatatgaagacgatacccagggcatgatctccttcagcactgcagagtttttcagcaccattcatgccgataaggtctttattagcacccagggaatcaacagccacggcgaactaacggtccccaaaatgaccgatgcccacgttaagcgggcgctgcttcgtgccgggcggcaaaaaatactgctcgccgataaaagtaaattcgaacaaacgttccttgccggccacggccgactggacgatttcgacgtggttatcagccagaatggcctcccggccgacatcctttccctgctcaccgcgcaaaaaaccgaacttctgttggctgacgcaacggcctga

SEQ ID NO: 271031 - DNA, 534 bp, Klebsiella pneumoniae
atgatttataaagcttttatcttatatttattattcattgcatctgtaagggctgatgtcaacttaaatgttcctcatttcatgcagaatactcctgtatggtgttgggcggctgccgctcaacagattattgcctataaaaagggaatcggaaatacaccctcccagtgtcagattgtagaggttgctacaggtttgggaccgggtgaatgttgccttaaaaataatcctctatgttaccatggggcgggattcaacattgttgcaaatgttatttcttattttgggggggcgtattctaactatgtgttgcctgctaacccatatgttattgaatcaacgttagcaaccggaaggcctattcttgcacaattggcaatgagtggaggaggaacccatgtggttgttatccgtgggataagaatgttacctgctccagctcttatcgtaaacgatccactaataattgctccaatgtttgttccatttatcaatcttgcaagtatttggatggatggcattgtaataaactaa

SEQ ID NO: 271032 - DNA, 714 bp, Klebsiella pneumoniae
atgagtcgagtaaattctcaacaaatgcaaattattgctgcatttacttttggtattatttttgtatctgttattttattcctagttttttacactccccatctggatagtaataagatgtgggttgttcatgttgttatgtccttagctgctgctggcgttgctgctgtacttccggggtttattgacctccaaggtcggctgccatggctaaacatgactgcagtgaggacaggtggggcgttggcaattttttgtttggtctttctttatcctattaacaactcccccccaccaaacccaattccgtatacgcctaaaactaattcattagataaagcgagacgctggtttgatttaatcaatattagagactttaaaagtgcatataaagaactaactatggtaaataaagagcaacatagcttagactcatttatttctgatgtcgatccaattataaaatacttgggtgattctataagtaagaataaagacgctgatcaagcctttttatccccccctgctaatgactatcctgtaggatcatatcgttattatagatttctagcaaaatacagcaatgaatcagacacggtagctctggatgttttattagtaggcgaggaagaaactaaagattggaaagtttatagtttttcgtttcaaaagataaattccagtggagttttggttccagtaataccatggtga

SEQ ID NO: 271033 - DNA, 642 bp, Klebsiella pneumoniae
atgcgcagtaactatatcgtcatcgaggggctggagggcgccgggaagaccaccgcacgtcaactggtggtggagacgctgcagtcggcaggtattcacgatatggtgtttacccgtgagccggggggcacaatccttgccgaaaaactgcgtagcctggtgctggatctccagtccacgggcgatgaagtgattaacgataaagcggaagtgctgatgttttacgcggcgcgcgtccagctggtggagacggtgattaagcctgctctggctcgcggccagtgggtgatcggcgatcgtcacgatctctccactcaggcctatcagggcggcggcaggggcattgaccgcgcgatgctggcgaccctgcgcgacgccgttctcggcgattttcgtcccgatttgacgctgtacctcgatgttacgccggaagtggggctgcagcgcgcccgcgcccgcggcgaactggaccgcattgagcaggagtcgatgaacttcttcaaccgtacccgcgcgcgctaccttgagctggccgcggcagatccttctatccgcacggtggacgcgacgcagccgctggatgccgtcgcacgcgatattcgcgccacgatcgcccagtggatggcggagcaaccggcatga

SEQ ID NO: 271034 - DNA, 516 bp, Klebsiella pneumoniae
atgagttcaccggaagatctgttaaccgcctgcgccaccagccaggaagaaaggcagcgtctcatttcctgggcaaatgaagctctgtcactctgggataactggctgcacccgtttgtcgcgatgctgactcgctacgggcaggcctgccatccccggcctcccgctgcccggaaagctgcgctggagtggctgaacagtgtaaaagtgattgatacattgctgttatggcccgaggtagacagcaatgatgccggtctgacagtcggtgccataaacctgcttgagtcagccgttgccaactggccggaagctgaaaagccttcttttgctggcctgtgtactgcactggaaaatcgcctggcacgctcaggcggtatggaggctctgatcccccagaacagcagcactcaggagcaggagcgtgaaccagcccattcagactcaccgcaactgtcagccgtgaaatctggccgcgatttgctcgccaggcaaagttactttcccgctggctga

SEQ ID NO: 271035 - DNA, 267 bp, Klebsiella pneumoniae
atggggatggcgtatctcgtgttaaccgctcctgtctccacgccaatcagtcagcaggaggaggggctccgtggattctggcgcgctgtactgccggtgttgttctggctttgctctgagaacagcgagtgggggaagacaggggaaacctgtgagaccagcccctccatgtcccatcggcgcctgcgccccatgtcagaaaagcccattggcaaatttactggaagggcaaacccactgagggggaggagaaaagtatgctgctga

SEQ ID NO: 271036 - DNA, 579 bp, Klebsiella pneumoniae
atgggatgcaataaaaaatcaaacaaattcatgctttttgtgtcatgtatgctcttgtcttttggagcgtactcacaagacagttctaatcctcagttttctgactacctggttcccgtaagtaacggtccatttgaacaaaatattcactttaataaagagcagaaaaactactcgccacactggaaaaatgcagtccaagagcaactaaaaaaacctgttaactttgcagggcactttagaatctatacagcctttggaggtcatggtaaagaatgccttcgtgataattgggtatgtggttgggttattgataaactatcaggtgaagttgtagcaacacttccatcagataataatggtagttataattatgctgatatttctgataatggtacccctgttggccttccatttgagatggatgtttataaaaatagttctatgattgcaataaccggtcaatctatctcaatcaacaagagtgatagtcctgtatgcaaaacggccttgtttaattttaataatggtggatatgtgaaactaatagaatcattagaaggatgtaatgaccaatga

SEQ ID NO: 271037 - DNA, 540 bp, Klebsiella pneumoniae
atgaaatcattaactcataacttattttatgcttttatttgtgcattcctgttttctttttcgcatttagcgtttgctgctgagtcaacaagccctgaagatattgtacatgacttttactcagaatatcttaaggatgatacagggaataatgacgcattagtcaaaaaaaacgcttctgatcaattaattaatagcgttgctgattccacaatgtgtaattatgactctgatgattcggtatcaacatcagaattagaaaaaaaatgcgcacagaaacatgagtgcaaacaatataaaggaaattacatctgtgactggggcggtgtttggattgagtctgacgttaattattttactaagtctcaggatgtatacccttcctggaagttgaatattaagaccagcactattacgaacgatggaagcaaatctgtggttgaagttgttttggggaatgattctgagcctaaaaatacactcaaagtttcccttaaaaaaatcaacactgactggaaaatcgtaggcgtaacggaataa

SEQ ID NO: 271038 - DNA, 1680 bp, Klebsiella pneumoniae
atgcgtagatcagtcattattccgcttgtcctgcacaccctggtagccattgccacattgctgtggctgctgtggtatttcattccagcaggcaatgtttttaacggactgaccactctgctgatcctccttctggcaggctggtatgtttttaaaaactgtcggcgtgaggagccagcatccgacgttaccctcccggctgctgaactgccattactcgactccgggggccccgttgtactggtgtgtggtgacatgctggatgcgttgtttcagggaagccctttgcgtaaaacagcccaggggtggtggctacgggccgatgacgtcagccggttaactgacattgtccgtcgcatacagacacagttcccacgccaggtcggtcagctttcggtgatgtaccgctgcctgccagaccatcatcaggatgtggccgttctgcgctcaacactgaaaacgctccgccagcagagcaaacagattacactcctgacgggtttcccgctgccaattgtggtaagtggcgaattctccggacctgaaacgccctggataatcgttcggggtgacaagccgattgtctgtccggttaatgaatcgccgcaggcattcattgactggcagcaggcggaagacaatatcctggcgctgccagcggtcagtcaggcattttcctttatccgtaatacgctgacagatgaactggagaaacctgaccggttaacgccgcctgtgcgcgcatttgccgttgcaatgcgcctcggtaccgtccttcctgaggcaccgtcagtctggtccgaccggttatattcccgcacctgtttgcagttttcccaaaagtcagggctggcagccccggcaagcttgttcccggatccggttctgccactgctggcaccatttgcatcgacggtacaggggggccagtgtacccgttgcctgatcctgctgatatggctgtgtgtcctgaccgcgttggggatttccgcgcttaacaatcgtgaactgatccgtcaggtaagtaccgatttacagcgctggaatgctatcccgatgaaccattaccaccctaaggcggaatcactcgccgccctgaaaaaggatgcgctcctgcttgaacggtggcagcgtcagggagagcccttacgttacagcctgggctattacccgggacaacgtctgtggctggccttgcagcaggctatcgatacctggacgcctccccccgcccctgagcctaaaccggtaccgaaaattgtgcgcctcgacagcatgtcgctgtttgattccggcaaatcggcacttatagagggctcaaccaaaatactcgtcaacgcgctggtggggatcaaagccaaaccaggctggctgatcgtggtcagtggtcacacagacaatactggcagcgttcagctaaatcagaccctgtctttgcaacgagcggaggctgtccgtaactggatgcgtgataccggagacgtaccagaaagttgttttgccgtacagggttacggtgacagccgaccgattgcatcaaacgatacgcctgatggccgtgcgcataaccggcgtgtcgagatcagtctggtaccgcaggcagatgcctgtagtctgccaggcgtaaaacacgcgtcacagggtgtacgtgacgtttcaactaaagaaatggagaagtaa

SEQ ID NO: 271039 - DNA, 216 bp, Klebsiella pneumoniae
atgggcaaaccggatggtgtaattaaaacgcgccacggccatggactcttcttcagaactaaaggcatccggtatgcttacccattcctcccggtaacgaactggacggtcagcagcgatgccttcctgttcaacattaacaaaacctggctgcatatgagggagtgcgataacgaccgttacggcatccaggccagccagcaggcccggatctaa

SEQ ID NO: 271040 - DNA, 498 bp, Klebsiella pneumoniae
atgtctgaatcatttcagaacgagatacctcgcgcacgtgtaaatataaaactggacctggtcacgggtggtgccaggaagaaagttgagctgccgctgaagctgctgactgtcggtgattacagcaatggcagggcggaagggaccctttcagaacgcgaaaaaatcaacatcaataaaaataacttcaacagcgttctcgcagatctccatcccgaagtgaatatcaccgttaaaaataccctcgcaaacgatggttctgatgaatacgtgaagctggctttccagaatatgaaggactttgagccagaagtggtggcgcgtcaaattcctcagctccgtgcgatgctcgccatgcgtaatttactgcgtgatttgaaatccaatcttctggataacgtcactttcaggaaagaactggaaactattttaaagaacccggcactcactgatgaactgcgccgcgaactgaatgcgcttgccccggttcagggataa

SEQ ID NO: 271041 - DNA, 681 bp, Klebsiella pneumoniae
ttgtggaaaccggcgctgcagaaactggcgtttctcaccggccatcagtacgcggcattcctgttctacgataaaggcaatgcgcacgtgttgaccgattcattcctgctggaggagaaggtcttcaccgcctgtcgcgacgtgtttctggccatcgagcccgccgaaaaaatattgaccgcgttaccggtcgggcaaatgtaccgggaccgcgagtatttaggcgatacgtttattgccggcagggtctattacaatgagtttcttcgccccaacgatttgaataatcccagcagcgacaagctgcgcaccctcaatggctatgccacctatctgtcactgatgacggccaatacggcggcttatccgcagccggcgcagtttgagctgttcaggcgcgtgctcccggcgctaaaaaccgcctgccagcttcacgcccgatttgaaccgctgcgggacaccataaaataccagagcgcggtgatggagcggtttaacgtcaagcccgtcgagaacgcagtggccgagctgctggtgcggggcatgacgccggatgagtgcgccttacatctgggcgtcgctatcgccatgatcggagcccatctcagcgccctgtaccggaaaaccctcacccgtaatcaggcagagctgctgctgatcatccgcgcgattcacggctga

SEQ ID NO: 271042 - DNA, 177 bp, Klebsiella pneumoniae
atgtgcaacagcaaagttgtaatgtccgctttgagcgagaagcggacttttaattttctaataataatggaaatcgaagccagtacctgcctgagcaatagcatcgaaaccacgaacaataaaaagcctggaaaatatccaggctgcactaggctcatttataaaatgctgcggtaa

SEQ ID NO: 271043 - DNA, 615 bp, Klebsiella pneumoniae
  misc_feature (581)..(590): n is a, c, g, or t
atgagtgcaatagacactttaagggaatacgccgaagtatggcatttatttggtagtatgccagatgatgcaactctaagtgctgaagtttcggctctttatcttggtgtgagtgtcaaaacccttgctcgctatcgccagaatggtaatggcccagcttatatccaataccaagcagaagacagcaaagcacggaatcaacgagtaaattatctactgggtgatttaagggcttggcgggatagtcataaggtaagcagtacaatggaggctgcacaggtccgaggattggcttttacttgtttgaatgattttactaagccagaaccgttttggtctattgataataaaatttactctcatgccctcactatttctgacgaaatattcaaggaactattaaatacagctcgtgcagaagttatctggatctctgttgaaaaagttttatctgaggactggcatagtgcgagggaacggcagatatggaatgatttttttgttatttttttaaatgagcttgtgttgacatcaaatttgctacaggaaaaacatataattaatgataaactcttagaatnnnnnnnnnntgattcaaaggggatgaaaaagtga

SEQ ID NO: 271044 - DNA, 261 bp, Klebsiella pneumoniae
atgtctaacctattgaaatacaaaattaataccgccatcgctgccgccagggcgcagaagaccgagtatctgctacgcgatggcgacgggctggcgttgttgattaagccattcggcagaaagatctggtacttcaaatacactcccccgacgctgaaaaaagggccccaaatcagcattgctcccccaccccgcctggtgccaaatgccaacgctgcaaccataatgtcaccattgcgtgatgaaacagatgacgactga

SEQ ID NO: 271045 - DNA, 318 bp, Klebsiella pneumoniae
atgccagagatgaccgatgcacgcgcgccacgagcggcttgcgccatgaagagcgccgagtggcagtcgctactcactagagtgctcgctgatgatgaccgcgaagtacgcgacagcggcgcctttctgcggcaaatcctgcaggaaaaagcccgcggctggttgaccgacgaggatctgcgactgctgctggaaggccagcgcgatatcgcccgcctgcgagccaacaaccagagcatcgcgcgccaggcgcagcttcaggccacgctgctgcgtcttttcgatatcacgctgctggcgctggctgaccggttataa

SEQ ID NO: 271046 - DNA, 408 bp, Klebsiella pneumoniae
atgcgagttccacgccctgttccgctatttatcatcgccgccgtgctgtgcgcgctgagcgcctgctcatgggtagaccgctacagcgagacggcctgtcagcaattgctcacgctcaggcaacggcatttgcagtttatcgccacggcggcaacgaacaacgagagacagctggaagaagaagatgaacagatccgcccgctgtttgctcaggcgatatcccagggcgacgcgctgcgccgggataattttaagcaacttgaagctaactatctgcgcatatatgcctgtcggcagaagatggggacgccctttacgcccactgaaacccggtttttatcacagcagacaaattatctttatcaacaagctatcgctggcgaacgccagcgaccagggagggagtaa

SEQ ID NO: 271047 - DNA, 171 bp, Klebsiella pneumoniae
atgctggtcgtatatttatgtataatattaattatcatgaactatatgtcacgtaaatgtttaggtgacgccacgtcaatggaatttcattctctaatatatctgcataaagcaattgacggactgattgtcatttataatggatatgggaataaatatgaagatgagtaa

SEQ ID NO: 271048 - DNA, 510 bp, Klebsiella pneumoniae
gtgttttttaatcgttgtgttgtgcttgttgcccgccgaccccgcgggccttttttttgcccccgcaggggacatcctttctttcagcaaagcaagcgccgcaggacagggacaaaagtgacagcggggggatgggcgcatcaggaaatgttgtgcttgttgcccgccgaccccgcgggccttttttttgcccccgcaggggcatcctttctttcagcaaggcaagcgccgcaggacagggaaaaaattcacagcggggggttgggcgcatcaggaaatgttgtgcttgttgcccgccgaccccgcgggcctttttttgcccccgcaggggacatcctttctttcagcaaagcaagcgccgcaggacaggggcaaaaattcacagcgggggggttgggcgcatcaggaaaattggcgagaacgcaggcgcgcatccaggactggccgccaggacggcggccagagggcggtcgagacagggatgtcgagtccgcccgttccgccagatga

SEQ ID NO: 271049 - DNA, 507 bp, Klebsiella pneumoniae
atgagttcagatagctatagcttgtattccttgggggtttctattattgccttattgttatctatctatacatttattaaatctagacaagatgttaaggtcgcgcaacagaatgcaaatgaggctttgaaattgcagcatggagcaattgaattacagattcggactggtataacaagtgctagaaatacaataaataatatggcaccaattttgtctccttttttagcgaaaaagaaatctggctctttgactagtgaagacgcatatgcgcttgaattattatataaagcttatgattcttgtgttgaggatcttttgaatcaatatgacgaagcttgccagaaatatttagatggcaaggttgataaattgatgtttaaagagacatactttaatgaaataaaaaatataatgacaagtcctgacctttcctcttactataatataccgacgaaaaaatataaggccactttgactgtctgtaacgaatgggggaaggaataa

SEQ ID NO: 271050 - DNA, 645 bp, Klebsiella pneumoniae
atggataatgctgttttatttaatggatgtataattaatgatgagatcatctttaatgccaatatgaatgagctacggccactgtcaggtgacggagagtgtattagtctcaatgcacccactgcccgatgtttgctattgcttttgcagaatagcggcaaagtgatttcgcgggatgagtttctgtcagctgtctgggaaaacaggggagtggtggtttcgcaaaatacgttctatcaaaatatctctttgctgcgaaaatcgttgctgaaagctgggttatctaacgatatcattattactgtcaggcaaaaaggttttagcgttgccccggataccctgattacccctctctctgatgaagaatgcgagaatatgaatcgggtaacgttagcccattatcagcataataaagtgggcgatcttattgccgacgtcaggatgaaatcaggctcccatttaagccctccactaacagataatttatcaagagaggagggggttttacctgcaaataaagcggatgcagatgccaaagtaactgaacgattacatgttaattttaaaatacctatatggctgattgcgctgatagtggtgatgattgtgattaatatagttgtgctgatggtgctgcaccgataa

SEQ ID NO: 271051 - DNA, 621 bp, Klebsiella pneumoniae
atgcgcactgaccagctaatgttatccagcattgcaactgtagcacaggtggggatctatgcaggggcatataagttaattgaacaattaatggcagtgccgagtattttatcttcagtttttcttccttatataagtaagaataaagagataaataaagatgactatttaacgaaactgtatgcatttattatttttacgacattaatcatctctgtaccagcggtattatgtgctccgtatataattcctctgttattaggtaatggctttgaagcgtccgtcccggtgtttcagatactgtgtctttcattcccattcctcgctttagcgaatatcagtggtttgtactatagccttaatatgttggagaagttcgcagtcttccgtaatgcctgtggccttggttcaagtttgctccttaactatattttcataaaagagtttggtactaacggtgcagctttttctgttatgattagctacttcttaatatcattcgtttacgaatatgcacttaagcaaacccgtaagaatgcagtaatgaaactaaaagcagtaaaatttattttcacgccgtatttctattcagagttacgctctttagttaaaccccgatag

SEQ ID NO: 271052 - DNA, 789 bp, Klebsiella pneumoniae
atgcttaaccgtattatcaaaaacaaacaaaaaaagaacgtcttctggtgggaacctaaggatggtagccataatgcaggagatcatttagggaaagttattgttcagtctatattaagcacgcgcgattttgaaattcttggaaaaaaatcttcacgtaatacactcttcagtatcggctcggttatgcattttgccaaaaatggagactgtatttgggggaccggcatcaatggcaaaattgataagtcaaaacttaaatttaacagcttagatgttcgtgcagttcgtggcccgaataccagagattttctaaagaaagagaagggtatcatagctccggaagttttcggcgatccgggattattactaccactattttatagcaaggaattattagccgatagccagttaaagagagattttattgtcataccccatatgaatgaagactttaatttgtacgctaaatataaaagtaatatttgctcgcccaaccaaggtgcgattgggtttactaaagaaattgtgaacagtaattttgttatttcaagttctctacatggcgttattttagctgaagcctacggtattcctgcagtgtttttaggtgcaaacagcggtgagtcacagttcaaatatgatgactattactttggcaccggtcgtgacacttacgcacgcgcaaagtctgttgaagaagcgttcgacttgcgcacagacgcaattacagacctgaaaaatattcaggcaggtctgctaaaagcatttccattcgacttgtggtga

SEQ ID NO: 271053 - DNA, 2433 bp, Klebsiella pneumoniae
atgaagcgacgagatttgattaagttaatcctggcagcaatttattctaatacatcttttaaagtgtttgcgtcagtaggcataactgatgaaaataacaatgtagataaaaataaaacccagaagtcagatctcgttgttgactatatcagtgacatgattaagttagacaatgtctctgacgggcagaacattatggttagaaatcactcatctggattaccatatgataaacccgccatattcacggttataaatgataataaattagttaaggaaaatgcaggaacttgttttactggtgtttcgggagtcatatttataagaaaatctagttctccgctggatgtaaactggtttggcgcaacggaaacaaatattaagataaaagatttgattagtgaaagtgacaaagagattttgagaatagtaaaatctgtcactggaaaagagtattctgatggagactattttaataatctggcattagcagctgcatttaaagcctgtggtgatggccaacaggttgtgctgggtaataataaaaaatacatgattaataaacctgtggattgttattcatgtctaaatattgacttccagaactcaactttaaaagctgatgcagatatgccggctggcagttatgttctgagcatcggaaagcaactttactctattaaaagtgaagatctttacctcgaacagggtagtactaaattatcactccctgaatcagttaaaaagggtaatttgaaaccgggcgaccttattagcttgaaatcgaccgatgtgagaaatggtgagcagtataagaatattcgtccatatcatcacggtatgcgagcggtgattacagaggtgagtgattcttatatagtttttgatagaccagcctattcatcattcaaaatatcagaaataatcgtacacaaaggttcaaactcgaccagtctgttaaatgcaaatatagatctacaggcatcacgaaaggtcatgccacctttatcgggcgttaagcttaccggtactaatatcaatatcaataatgtaaaagtacggggtaatgaattttgtggtgcagggctgcttgtacttggctgtaaatcaagagttgtgaatactttcgtttctggtttttgtaatgttcagggactgccgttgccgggacgggttggttatggcatctatgttgattgcagtgatacccgggttgaaaaaagccattttgagagtaacaaacatcacgtgacttgtgcttcccgcgactatgttatgtcgaatatcactgtcacagattgcactgcaattacctcagacaaagatatacataacgacgtaaatgccagttttgatcttcactcaaatgtcataggtaatattgagttccatcatttaaaaattactaccaaaggccctgccttcaatattagaaacggacaagctaccattaccgattgtgttatttcatcatccagatataataagaacactcctgcactaattaatgtttttgagtataaggatgtcagtaatatctcttttgagagaaacagagtctattgtggtgaaaatattcgactattccatttcggtgaaatgtccaaaattgaaaatatatctatagtaaataactctggtaatgttgctggtattttcgatgcggatattatgggaagtgatatcactaacattaatatttccggtaatcgtttcaataaaatgaagtttttgcttaattttaattctaaaaataaaaagtcaaatatcaaaaacattaaacttgtcgataatgttttcatccaatcggctaactcaaaaaacagtaacaacataatgataaatctggcatctgacaatcaagacagtttcactattggtaatttcacaataaaagactctaacttctttgtgaaaaaacatgctgtaagtattgttaatgtttcgattaacaacggtctggatattgtcaaaactaaaatgaaatcttaccagggaataggagctgtttctttgcattctagttatgttaattcatttgctattaatgacctgatttccaatagtgctttgtctgtaccgttttccgatagtgataaccgaggcgttaaaaagtttgagctatcgaactcggagatagcaaccgttgagtttgatctcaatgaagttgctcaaaagaaagcaaaaatcaatgctgcaattaatggcaacaagctgggttctgattctacttcgccaatccaatttaaagcaggccaggttcaaatattagaagagttttatgtttctaacaacgattttattactaacaggggattgccggtcttttctcctccagggataataaacaatagtccttttaaaggtaatagactttctactttagtgggtgaaaaaactgaaagacgttcgctcactagttggtcaagatga

SEQ ID NO: 271054 - DNA, 1413 bp, Klebsiella pneumoniae
atgatcgttccagtaataatggctggcggtaccggtagtcgtttatggccaatgtctcgcgagttgtatccaaaacaatttctgcgactcaatggtgaccagtccatgcttcaggataccgtatcccgtctggatggtttaaatgtctcggccccggtgttgatttgtaatgaacaacatcgttttctggcagccgaacaactgcgtcaaatcgatcgtttatcaaataatatcattcttgaacctgtaggacgtaataccgctccagctatagctctagctgccctgagtattattgctagcggtcaaaatccgctgatgttgattcttgctgccgatcatgttattgaaaataccgaggcatttcaccaggccatccatgcagcgacgccgctcgctaagcagggaaaactggttacatttggcattgttgccacaggccctgaaacgggttatggctatattcaacgaggggattcgtttggcaattcggcgtttgatgtaagacgttttgttgaaaaacctgatttggcaacggcggaagagtacctcgccagcggggagtattactggaatagtggcatgttcctgtttagtgctgagcgttatctgcaagaacttgctgccttcagacctgacatactggaggcttgtcagaaggcaatgtctggcgttaaagttgattccgtgcaggactttattcgggttgatctggaggcattttctaactgcccggatgagtctgttgattatgccgtaatggaaaatacctctgatgcagtcgtcattccattagatgccggatggaatgatgttggttcatggtcagctttatgggaagttaacgaacaagatagtgatggtaatgccttgaccggagacatctttgtccacaagacggcaaactgctacataaatacagatgatactctggttgctgctatcggtgttgagaatttggtgattgttaataccaaagatgcagtcctggtgattgataaatctcaggttcaggatgtgaagaaagtggtggagttccttaaaactaataaccgccgcgaatatcgtcttcaccgcgaatcatatcgcccttggggacgtcaagacaaagtcgttgatactcagcgctaccagataaacagagtcacggtgaagcccggaggaaaattctcgctgcaaaaacatttgcaccgtgctgaacattgggtcgttctggcaggtacagctgaagttaccctggaagataagacttatctgttaactgaaaatcagtcaacatttatcccgattggttctgtccatatgctcgtaaaccctggtaaaatccccttggaacttctggaaatttcatcaggatcatatttaggcgaagacgatattattcgattaaaagatcactacggtcattgttaa

SEQ ID NO: 271055 - DNA, 1377 bp, Klebsiella pneumoniae
atgtctgagacattaaagtgctttaaagcttacgatattcgcgggaaattaggcgaagaattaaatgaagaaattgcatatcgtattggacgtgcttatggtgaatatttaaaacctaaacaaatggtgttaggcggcgacgtccgtctaaccagtgaagggcttaaactcgcactcgcaaaaggtttgcaggatgcaggaactgatgttttagatattgggcttgcaggtactgaagagatctactttgctacatcgtatttgaatgttgacggggggatcgaagttaccgccagtcataatccattagactataatggtatgaaattagtccgtgagcaatctaaaccaattagtggtgatactggtctccgagatatacaaaagttagcagaggccaatgattttgctgctgtaaatgaagagcagcgtggctcatataagcaagtatccgttcttgatgcctatatcgaaaagctattaagttatgtcgatttgaagaacttcaaccgtccgttaaaattagtaatgaactcagggaatggtgcagcaggccatgtcattgatgccatcgagtctcgtttcaaggatgctggcgtgaatgtggagttcatcaaggtacaccatgttgccgatggtaattttcctaacggtattcctaatccgctactgcctgaatgccgtcaggatacaacagacgcggttattgcacataaggcagatatggggattgcctttgatggtgacttcgatcgctgcttccttttcgataatgaagggaatttcatcgaaggttactatattgtcggcttgctggctgccgctttcctggagaagaatcagggagctagaatcattcacgacccgcgcctgagctggaatacagttgatattgttgaacaagcgggtggtattccagtaatgtccaagacgggtcatgctttcattaaagagcgcatgcgtcaggaagatgcggtctatggcggtgagatgagcgctcatcactatttccgtgatttcgcttactgtgatagtggcatgattccgtggttgcttgtcgctgaattgttgtgtgttaaaaacaaaacattaagccaactggtcggcgaccgtatggcagcatatcccgcttctggtgaaatcaacagctctctggctgaccctgcgaaagccattgccagggttcttagccaatatgaagaaagcgcactcagtgttgattatactgacggtattagccttgagttcgctgactggcgcttcaacttgcgtagttcgaatactgaaccggttgttcgtctgaatgttgagtcaagagcgaatgagcttttaatgagtgagaaaacaaaagaaattttagagatccttcgctcgtaa

SEQ ID NO: 271056 - DNA, 282 bp, Klebsiella pneumoniae
atgacattaaaagatagatttgacttcgatgatatggatccgaaacttgaggcattggatttattaaccagttattcatgtactatgcaattccttgaacactttcaagatgcaattttcaataaagaaaaacaaatgttatctattaaggacgtttatattgaatatcttttttcacttggattgatcaatactgtagatgatttacccgaaatactaactggcaggagagataaccctaatgagctacaagccataaggaatataaagtatcctaggtga

SEQ ID NO: 271057 - DNA, 1083 bp, Klebsiella pneumoniae
ttgttctcaatacaaatgctacctgcacgtgaaggcgatgcaattttggtgcgctggggagaggaacactctccttatcaaatgcttgtcgatatggggggcgaggaaacagggaaagagtttaatgataaaattagcggcctgcccgatacgcagcgaacctttgaagcagttgtagttacacatatcgacgcagaccatattggaggatttttgagttgttttgttgactgcgatgagccgtgcgccatagtgaaagatttttggtttaatggttacatgcatctggatggtcgcagaagcagttcttctttagaagggctaggtgcagttcaagccgaaaggctcactacatggttgagcacacagccctggaatgattgttatgacggaggctcagtctgtcgaagcgagggagaaccgcttaaagttattgaactcgcaggaggcatgaaggtaactgtccttgggcctacgatgcaaagacttgaaaagcttaaacctgaatgggataaagaaataaataacgctttacgaaaaaaacaaaaaaaactctcagtacctaacctggaatccatgggagcaagtttaccattggagattccagacgctcagtcccttaaatttttagctaagcaaaggcccttgcgagacactaaagctgcaaatgggagcagtattgtcttactactagaatatgatggtaaaaaagttctactcgccggcgatgcgttcgctgaagacttggttgatgctattttagttttatcaagtgaatttcccctaaagctcgaagctttcaaagtcccccaccactgtagtcgtggaaatatctcaaagcaactaattgaagctgttgactgcacaaattggcttatatcgacagatggcagcagacataagcaccccgacgatgaagggatagcgtctatcctgcttcacaggacaaccgattttgtaaatttggttttcaatgtaactagcgattacaattcaaaatggtcgaacaccgagtggaaacaatgcttcagatattcagcaaactatggctctaaagaagatggttatttactgaatctttga

SEQ ID NO: 271058 - DNA, 1041 bp, Klebsiella pneumoniae
atgaatgaggtcacacctaaaaacataaaccttagtattagagtgaagtctaaattcaatttcggcggacgagacacgaaaatcgacatccgagatagtgaactcattcttgttgagaagctcactacaagcagagagttcagtctgctccccggactgtatgaagttagcacatttctgggcgatggaaagagagcatcgcagattgttgaagtattcgaatcacaattaactgagataagtttagagccagacattgattatcagcctgcgcctccaaaagatgacagtcagtataagaaaatcgaggagttgaatcaggataatcgatttggtttgactattcttgatgaagatactgactttactatttatccggctggaagctattggatcgtgcaacacaaagacgcaatgcaaaagatgcctataataacactcaaaaaaaatgggtcgtatattcaagctagcctccctattagccaaggccaccgttattccgttacttgtcatgtgaaacaggtcttaaattcgaagtatggccacgtagaaataaacatctcacaatctagagctatggcttttggcttggagtgtatgctcaaaagtgggcaaattatgaatgcagccgaggtggcttctaatgcactagaagccttgatagaaaaatacacggaccctacaggagcaacacttgcagcactgattctttacaagacatgccgacttgatgagtcgagcaaaagacatttaatcaatttggtaaaccatcatgattggttacctgatgcaaaaataatattagctttatacttagcacgcactggcaacctggacgaatcaatgcaacttgcgtgtgaagctagcaaaaaacgtattcttttaactgagagcttttcattattattggatcttcttcgttattggccagaaacagaacacgatgagaaaagaagcgaagctcttgcacgtttagcgcaaatcgcgccattcgtaatttggaagtctatgtatcttaccaccagtatgaccggagattaa

SEQ ID NO: 271059 - DNA, 1170 bp, Klebsiella pneumoniae
atgactgcagttatagatgatagctcaaactcacccggaacccatgcgcttatcattggtgtaagcgcgtatgaccatctgatgggctctagtgaaggggaatgcagtgagcaaggctcagattctggtctcggacagctaagtgcggccgcaagatctgcttcccagtttgcgacgtggttaatgaaagattatcgacgcaaggactttccgcttcggagtttgcgggtacttttatcgccagcgactgaagacgaagtgggtgaaaacctcaagggttatcttaaagaagattcaatcccaacgagggaaaatgtatcaaccgcatttagaaaatttaaacaggcagccgcaagaaatccggataatatcgcaatcgtttatgtggcaggacatggagttcaatttactaatactggagcagtactcctattaaaggattttgcccatcctgatcatgaggaagaacgatataagggagctgtagatattagagccatgcatgaaagcatgacgtatacaaacggggcgcggcgtcagttttggtttgtggatatatgcaggcaaagagctccggatgctaaagagttcgaggaattagctggtgtattaaaattcaacaaagttatcaatacaggtagttctggagcgaccatatgctccccgctatttctggcggcatcatcgggcgagcaagcgtttgccaaacctggaaagctaactcttttctgcgaggccttgatgtcagcccttgttgaaggtcatgctgcttcctccgatggggagcgcagttcaccatggctagtatcaactagtggattacagatgtatcttagagacactgtagaattgttagctgcctgtaatgatgaaaaacaattaatcgaatgctcagggatttttagcaatgaagtctttcatgaatgcgaaaaagctccgaatgtagatttaacaatacagatcaaagacggcttgcctggggcccactacagtgcaaaattgtctcatctcggcagagttctttatgataatcatacaacatggccgcttcgcgacagcatacctgcagggatctataagatagaagttacaactctaaccactaatgagaaagactcagataatctcaaactttcgcctccaagtaggataaaggaacttccactatga

SEQ ID NO: 271060 - DNA, 255 bp, Klebsiella pneumoniae
atgaaaatagtgaaatttactgttattgctggagctatattactcttatcggggtgtgaggatgttaaatctgctgattggtggcaggaacatcatgcagaggctgaaaaaaaagtcgcagagtgtaaagcttccggcagtgatagtgataattgtagaaatgctaaagagggattgtttagatataaacagttacatgccgttgaaccttcctttaaagatgcgtttaaggggattgttaaggataaaaaatag

SEQ ID NO: 271061 - DNA, 1056 bp, Klebsiella pneumoniae
atggctaattctgacttctttgaatcagcccgtgatgtgattattgatgttcttgaccagtcgttggctggtcagcttgattctttctcttcaatagcatatcaattgggtaaatatgggatttctatctatatattatggtatgcatataccacaatagttgggaagcaaaagtcggcagttcaggatttcatatggaacttgtgtagattctggctgattctcgtttttgttagaaatatgggagggtggttagatagtgcaactcaggcaatagacggtctaaaggaaacatttgcaggtggtgatccgtggaaatggttagaccaactatgggcaaaaataatacaggttgcaaagttccttatgtcaaaagacacatcaacttatgtgaaaactgatggtgctattgctgccttattaacttatgcaggtggtatattagcgatgttggtcacttcgattgtgtatcttgcagcagaggtgacgttaaaaatacttactgttacagcaccattgtttattattagcttgtcttttggttttctccggcaaatgtttaatagctggcttcagctaatatttagctcatgcttcatattcctatttggtgggttggctatcaaagcggggatgacattcctgaatggtgttctatctgtttcactatcaaacattgatatcgtgaatttgatatcagcaggtgctcaagccggagtcgcaggagtattcatggcctggattatttggcaagccaaaacctatgcttcccagctcgcaggggtaggtgttgagggcgcgatgcagggggcagccgcaatggggattggtgctggcgtgttcggcgcttcccgtatggggcgcaatatgcttggtatgggtaaaaatgcaggtattggcgcatggaaaggcgttcgccgtcaggataatggttttagccagtcgccaggtgttgctggcaagctggggaatttgaccgggcagggcgttaatattggcgccaagagacttcgccaggctgcgatagatgcggcgaaaaagaaatatggaggttaa

SEQ ID NO: 271062 - DNA, 408 bp, Klebsiella pneumoniae
ttgagtctgacattaccattaatgtatttcaagacaggtgcagatctcagcaaaatcacacattatgaagtgcactatcaggacggctttgttcagcaggcatggttgcaaccagaaatacaactatttgttgtgtgtatcgccaagaaaaaaggctcccgtcgcgagattaaaggtggaatagccgttcttaccagtatttcggccagcgatggcgcggaactggcaaaagcgctggataacgttatgcgccagtctgatgagttgcggccactggcagggaaagacgaaaacgtctttatcccggccagaattggaatttctggcgaagcaccgccaacagagcaagaacttctaagtgtcttttaccagcaatgcctgaaacatggctcatggggcagtgcctga

SEQ ID NO: 271063 - DNA, 261 bp, Klebsiella pneumoniae
atggggcattacacaatcagaacgaatgacgacgaagatcaggccattaaaaaggcgcaggaagcgaccggacaggcatcagccagcaaaacctttatgacggctatccttgagcttcagcgtaacagagacgagatagcgcagctcaggcgcgcactggcacaggaacaagccaaaaataaagagctggttggatcagtgcagcaattcaggaacagcattaatgttatgtttgaactggctggcaacaataaaagttaa

SEQ ID NO: 271064 - DNA, 312 bp, Klebsiella pneumoniae
atgttcatatttagatatataaaaaatatatttaatttttacttattatacatccaaccgatacttggtctgtaccttgttagtattggtttgtggatgttttttgtcgcagatgaacaaacttgtacaaaaaccagcattgagttatgcgctgtatcagctattgatattctgaaacctgccattttggtatttttaggtattatcaccgttgccggatggtactttaccgaacttcagccaaagctaaggggggagggcaagtatataaaggtaaaaacaggtgtaaaaccggaagatttcgttaagtaa

SEQ ID NO: 271065 - DNA, 285 bp, Klebsiella pneumoniae
atgaataaatcatggcttgaacatcaggtgctaactgaaaaaataaaaaaagtacaggaagagaaaaaagatggcaccatcccaaaagaactgtacagagtacgtataaaagacaaatacaggtgggatttgtgggaaaatgattacagaattgttattgcttattcgaaagatgatgcagagctaaaatttacgggaatgacaggttttgatgaccattactatatagaaagcattgaaaaaataacgctttcagatatagaaaaaattttactggaaaactaa

SEQ ID NO: 271066 - DNA, 264 bp, Klebsiella pneumoniae
atgataacaatcccattacctatgttcgtagcaacattcatcgttctgttgattgggtatagtttcaaatttaataaatatatacgaatggtatcccttgtcctgtttataggattttggttttcattcgaagcgagtggcattccatcattcaatatagccagtattgacaatactatatggtatgcaattgggaaagccattatctccattttcgcagtaggcttaggaatgctttgcttaaaaaagatatggtcaaaatag

SEQ ID NO: 271067 - DNA, 3639 bp, Klebsiella pneumoniae
atgaatacgtcaaatattaaaaaatacgccccggtggcacgtaaacagttccgcgatgcggtcatgcaaaaactgaccacgctgggtattgaggccgataaaaagggaaacctgcaaattgcgcaagcaaccgatcttggcaacagcgtgcgttatggtcagttctcgttggataaagcactggcgtcacgccgtgagcgtctggtcaagcgagcagataagcagggctacgacgtgctggtggaacacattgcttacacctggtttaaccgcttctgcgctattcgctatatggagctgcatggctatcttgatcacggtttccgtatgctgtctcacccgacgctggaagggggttttgaggttctggatcatgtgccggaagtggctgacgctctagggcaggacaaagcgcgactggtggagatgaagctggcaggcgatcgcgatgaagagctatatcgtgaactgttgcttgcccagtgccatgcgctacacggggcaatgcctttcctgttcgaagcagtcaatgatgaaattgagctagtactgccggataacctgactcgcaccgactccattctgcgcgggctggtggacattattcctgaagaagactgggagcaggtcgaagtgatcggctggctgtatcagttctacatctccgataagaaagacgaagtgatcggcaaggtggtaaagagcgaagatattcccgccgccactcagctgtttaccccgaactggattgtgcagtacctggtacagaactcggtgggccgccagtggctgcaaacctacccggactcgagcctgaaaggcaaaatgccgtactacattgagccagcggaacaaacgccggaagtgcgggcacagttggcagctatcaccccatccagcattgagcctgaaagcattaaagtgctggatccggcctgcggctccgggcatatcctgactgaagcctataacgtactgaaggccatttacgaagagcgcggctatcgtacccgtgatattccgcagctgattctggaaaacaatatcttcggcctcgatatcgacgaccgtgccgcacagctgtctggttttgcaatgctgatgctggcccgccaggatgaccgtcgtattctggggcgtggcgttcgtctaaatattgtttccctgcaggaaagtaagctggacatcgcagaactgtggaccaagctgaacttccaccagcaggtgcagcgtggcagcatgggagatatgtttgcagaggggacggcactgaccaataccgacagcgcggaatataagctgctgatgcgtacgttggcattgttcaccagtgcgaaaacgctgggatcgctgattcaggtttcacatgaagatgaagcggggttaaaggcgtttctggataggttgtatcgtctgactattgagggtgatattcagcagaaagaagcggcgacagagctgatcccgtatatccagcaggcgtggatactggcgcagcgctatgatgctgtggtggcaaatccgccatatatgggtgggaaaggaatgaacggcgagctgaaagagtttgctaaaaaactattcccggacagcaagtcggatctgtttgcgatattcatgcagcatgcgttttctttacttaaagaaaacggctttaacgcgcaagtgaatatgcagtcgtggatgttcctgtcgagctatgaagcgctacgtaactggttgttggataataaaacatttataaccatggcgcatttaggtgcgcgggcatttgggcaaatctcgggagaggtagttcagactactgcatgggtgattagaaaacatcacgcgaagtactaccgacctacgttctttcgtttagttgaggggaatgaagaacaaaaacagcaatcattatttaagaaaactaactattttgataatgttgtggctgatgatttcaaaaaaatccctggctccccgattatttatgatattgataaatctatttattcctcatttgaaaaattaccttcactgattgagacgcatcatgcttgttcgggattgcaaacaggaaataatgatgttcacctgaaacaatggtatgaggtcaattatcatgggattttttcacaatatagcgacattaataatagagggagttttaaatggtttttccatcgtaaaggcggtgagtttagaaagtggtatgggaatattgactacattctgaattgggaaaacgatgggaaagatatccggaattctaaatctgctcgccctcaaaacttagataagtggtttttaaacggtgccacatggtcacacacatcgtcaacctcatttagtgcaagattattacgaaatatagacacaataaacgttgaaggaccatctgcgtttgcaaaagaacctgaacaactattgggatatttgtcgtcaaaattagcattttattttatgagtattttgagtccaactttacatttccttgttgggacggtatctcagttaccttataaaagtggtgtcggtgatgttaacgttattcgtcgtttgatcgaaatatctaaaagagactgggattcttacgagacatcatgggatttttcatctaaccccttagttcagttcggatttcaacagactgtgttatctcattgctaccattcaattaaacaaaattggcaagatagtatgtttgaaatgcaacatttagaggaaaaaaataacaaaattttcattgaagcatatggtttagagggagtgctagctccctacgtaaatttaaacgaagtaactttaaataataacccgcactttcgatatggtagtaaaaacaacgaagctgaactcaaaatcattcaacaaagcgatactatcgcagagcttatttcatatactatcggctgtcagatgggtcgctactccctcgatcgagaaggtcttgtctatgctcacgaaggcaacaaaggtttcgcggagctagtcgccgaaggtgcctataaaactttccctgccgatgaagatggcattctgccattaatgaattcagactggttcgatgacgctgttacagcgcgcgttaaagagtttgtctgcgtcgtgtggggtgcggaacatctgcaggaaaacctcgactttatcgccgaaagtctctgtttgtacgcagtcaaaccgaaaaaaggtgagtcttctctggaaaccgttcgccgctatctttccactcagttctggaaagatcatatgaagatgtacaaaaaacgcccgatttactggctgttcagctctggtaaagagaaagcatttgagtgcctggtgtatctgcaccgttataatgaaggcacattgtcgcgtatgcgtaccgaatacgtagttccgctgctggcgcgctaccagggcaatatcgacctagtaaacgatcagcttaagagtgctgaatcgggagctgctaccacgcgtctgaaaaaagaactggatgggctgaccaaaaaattcaacgagctgcgtagcttcgatgaccgcttgcgtcactatgctgatagacgtatcactattgatctggatgacggcgttaaggttaactacggcaagtttggcgatctgctggccgatgtcaaggccatcactggcagtgctccacaggaggaataa

SEQ ID NO: 271068 - DNA, 1122 bp, Klebsiella pneumoniae
atggatcaacatcccctgattattaaaggctacaagagtatcgcggagctttcccttgtggaaagcccaccgtttatcacttttgccggggccaacggtgcgggcaaaagtaacattaccgatgcattggctttttttggtgcagtagttaaaacaggcgccactcaggcaattcgcgatttcggtggttttcagcagatccattgctacaaattgcgtaaagagaagcggaccacggcgtcaattcatcttgcgattacgctgaacaagaaacaattcgtctacgatctggcgattaaaaacatggatgcaaaaccagccatctcagaacgactggagattgatggtgagctgttcatcgagcgtaaacaagcggacaaactctccgttcgcttgggggagaatgaaaaatcatcaaccacttctcttcctggctactctcaggacatgaccgcgttgatgttgcttggcaaaagtgaactctatcattttttaacgaatatcagcgtattccgtatcgacccgttacaggcgaaaaaatcagatagtgccacgacggatgccacctttctggatagatacggtacgaatatcgcctctgtacttgctgaactggagtccaatagcaacttcacagaccagattctggaatggatggagttgattgttcctggtatggaagggatagcaactgaaaaacaaaagctggatggctcaacgatacttactttcaaagagcatggaactaaagcgcgctttccagcacatcttatctcggatggcacgatttattccttgtgcattatgactgcaattctgagtcgagcgaagcatactggaatgaccatcattgaagagccagagcgaggcatccaccctaaagccatcggtgagctggtgcagttgatgcgtgaaaacgcctcgctggatcatcccattatcattaccacacatagcgagtcggtaatcagaaatctagagccgaaagagctgtggtttgtcagcaagcaagaggggaaaacccaactaaaacacgcctcagatgcagggattgataaaaaggaaatcccactggataccgcgtggttgatgaatatgtttgatggtggtttgccatggtga

SEQ ID NO: 271069 - DNA, 123 bp, Klebsiella pneumoniae
atgaaatatcaggaaaatgacagctttgtcattttcctgtcacgtcctgaacagaggccgctacgtaaagtagccgccatggataaatcgccgaaaaaccgtctgccgccatgcgcccaataa

SEQ ID NO: 271070 - DNA, 753 bp, Klebsiella pneumoniae
atgcaggcgggaaacaatctgaccgtgacggcctcttccgtctctgcaggagaaaacgccctgctctctgcgggaaatgatctcagtctgaatgcggctgcaacgcatcagacacagagtgaccggacccgtgaaacacaccccaccggcgctgtcgtttccacggtggccgccggggataatctcacactgtactccggacgggatattctcagtcaggcggcgaagatcgcggttgaaaacaatataaccctgcaggcggggcgtgatgtgaacctgctggcagaggccagcaccgaagacaacagcaatatctcaaaaaataaaaaggagattaacgagtccatccgccagcagggcactgagattgccagcggcggtcaaagcactatcgtcgccggacgcgatgtgacggcacagggctcatcggtgacggcgaagggaaatatcggggtggcggcaggccgcgacgtcagtctcaataccgcaaccgaaagcgattattactacaaagatcagactaaaaccaagaaaggtttccatagcaagaaaaccacctacaccatcgaggaggacagcgcgacgcgtgagaaaggctcgctgctgtgcggcgacaacgtgtcggtgtcgacgggtaacaatctgctggcagaaaggttctgcggtcgctggcgacggcgatgtggccctttttgcaggcgacaatgtgaacatcctggcggcgaccaataccgacaccatctggctatttaa

SEQ ID NO: 271071 - DNA, 441 bp, Klebsiella pneumoniae
atgaataaatctgtcggccttcaggccctcgaaaaactactggcttcgttaccgcataccctacataatctcgtttttgaacgtctccaaaatctgactcactacgaacccgtcattggcattatgggcaaaacaggtgcaggtaaatcatcactctgcaatgctctgttccagggcgaagtcactccgatcagcaatatgggggcctgcacgcgtgaggcgctacactttagacttcgtaatggtaatcacagcctaatggttgttgatttacctagtgtgggtgaaaacgagcaacgcgacgaggaatattcaacactgtatcgtcacatcctgccagaactggatttagtcctgtgggttacccgcaccaccggagccgccccccccacaccaaggctgccaccgctactgctgtttttactgttgtctgctgcgtga

SEQ ID NO: 271072 - DNA, 1953 bp, Klebsiella pneumoniae
atggcagcagaaaatcgttcaaaattgcttcgtatgaccattcgtaacattggatgtatagggaatgaaggcatcgatattgcacttgataacattgtttgccttgtaggtaaaaacaacgctggtaaatcaacagttttacgagcatatgagttagctaaggggccaacagcatttgatgccagcagcgatcgacatcagcatgcctcagaggatgaacattcagagattttgctcgaagttcatatccctgacggtattggtaatgtagatgcaaaatggaaacaagaaagagacggttttctcgtcgttaaaagccgttggcaatggaaagcacctgattttttgaaagtccgcacaacttgggatcctaccgctggagaacatggcgaaggggactgggcagaggatactaaagcaggcggcgctgattcagttttcaactcacgtctgccaagacctttgcgtataggatctctggatgacgcaggtaaaacagaagatgtgcttttaagttttgctctcgcccctttacaaaaagagcttgagaacgcgcggcttaatcccgaatcgccattagcaaaagcgattgaaagtgtttccggaagtatcaacttgcttagtgaacagcatcaagaacattttaatggtattgcgggccgagtttccgaaggatttaaaggtatttttccggggctggatgttagtctgagcatcggtgccgctcctctggctcctaaagttgcggatctcatcaagaatggctccagtttaaaaatcactgacgggaaggctaatacctctcttagccagcagggcacaggcgctcgccgcgcactattctggtcaatgttgcaagttcacaatgaacttaatcgcgacaaagaagtacgtgctgaattccgcaagcggcttgagaaagaagttactgaacttgagaaaaaactaaaaaagccgcctaaaaacgctgatttgaattccctccatgatgagcttgctcaggttagagctcaactggatgctcatgatagtggtgctccgatccctgatagtcctgatgatccagcttttccaggctatttactgttaattgatgaacccgaaaatgcccttcatccgatggctgctcgtgcagcacagagacacctgtatcagttggctaagaacccagactggcaggtgattatgactactcactctccgtgctttatcaatccatttgaagatcatacaaccattgtaaggcttgaacgcgataatccggaagaaaattcagcagttacaccaagaacttaccgctctgaccatatagcttttgagggggatgaaaagcagcgcttgcaggcattgcaacatatcgaccctagcttttcagaggtattcttcggttcgcatcccattctcgttgaaggcgataccgaacatgctgcatttatggcctcgatcatcgagcgtgataatgcattgatggatcagattgcggtcatacgagccagaggaaaggccatattggtaccgctaatcaaagtactgactcacttcaaaatccacttcagtcttgtccatgattcggattcacctaaccgctccgatggagttaaaaatggaatgtggactgaaaaccgaaaaatccatgaagcattatgtcaagccagaaacgcgggactaacagtccgccatcgagtcagtgtgcctgatttcgaacgcttcctgggtcaccgagaagcatacaaagataagccattgaatgcttacctgcagatcaagttggatgatgagttagcgaaacgggttcagtggctcatggattcccttctgaactctgatgagcattgctcgtttgggaatgaaatcgatcacgatcgttatatggaaaagctactgggagttgtttctaggtgggctgaggataatggatatgcggaggatctgcgctttaagagccaaagataa

SEQ ID NO: 271073 - DNA, 1890 bp, Klebsiella pneumoniae
atgaagctttcaaagggagttgttagtgatgaacttcctaagattgagcggcttgtgagtaaagggctagccgatgtataccttctattcactaattgttcagtttccgcagaaacagctgccataatggaagaggatatgcggaaggctggtgcaaagttcgcaaagatttacggggctgaatggataaaccacagcatatccttacacccaagtcttaggcgtatggttccccgaatatacggccttggtgacctttcccagataattactaatcaggcatttcggcaagcgaaaagtgttctcgattcaattgctcccgatcttgcatgcttcgttccaactgaggcataccgccgttgcgcacatgctctcaaggatcacggatttgtgatgctaataggtgaacctgcaagcggtaagacaatgatagctaatttgttagcgctctctgcggctgatgagtggggactgcaaacgttgattttaagttcaccggaagatttggataggcaatggaacccagatgatcctggtcaatttttttgggttgacgatgcttttggatctaatcattgcgactttaaccgagtccaggaatggaatcaaaggctccctaagttgaaagctgctatacacaagggggcacgagtgattttcacttcgcgcagctatatcttccgtgcagctcagaatcgcttaaatactaataaattcgagttatttagagatagtcgagtcacaattgaagttgagaaactctccgatcctgaaaaagccatgatcctgtacaaccacttgaagcttgggaaacagactaaggcttttcgaagggcaataaagagttttctaccgtcagtagtatcagtacccaaatttcttccagaaattgcccgaagattcgccaatccgcaattcacgaataagcttgtgcctagcaaagcttcagtcgttgattttttttcaaatcctacggggatcatggcagacattattggtggacttgcacccgctgaaagagcggcattagcccttatattttcaaatggaggggagctaccaatcccacttcggtttgaaaaccctcagacaaccaatatcatcacggccatgcaatcaaatcttggcgacgtaaaagcagcattgtcagcattggatgattcacttattagaataagtaaaacatatgacgaacattactggaaattccgtcacccaaccattcgcgatgctttcgcaactgatgtttcgggtaatccagaactcatcgatatctacctttcaggagtaacaaaggaaagattaatcgaggaaatcagttgtggggatatggggatcgaggggataaaactggttgtgccgcacagtatgttcaacagtgtgctgaacatcatcgatcccagaggtaacagagccctcatcagtaggccaatactcacttttttggcaagcagatgctcaactgaattcttggggctttatttcaatagcgacgaagcaaagacttatttgcttgatttaatcagctctgcgagaacatacgataatagcctgacaatactgggtaggctaaatgtaaatggtctactcggggatgacctcagaagaaaagtactggacaaactgagcgcccttgccgcaataaaccattcagattgtttcattgacgccgactttgtcggagttttactctcaaaggaagagaatgaagctaggctttctgtccaaaaagtcgagttttactctaacatgaatgaaataatccaagatatagaggactcttgggctacagacgatgatgtagatgaagcattttacgatgtcacacgccttttggagcgatttcgtgacgagaataatgatttatactgtgaggatttttatgattaa

SEQ ID NO: 271074 - DNA, 1227 bp, Klebsiella pneumoniae
atgaaaatattagtctatggtattaattacgagccggaacttactgggataggtaaatatagcggagaaatgagccggtggtttgctgataacaataatgaagttaccgttgttacggcgccaccgtattatcccgaatggaaactgactaaaccctataagaacagatatagtaaagatattatcaataatatatctgtattccgctcgccactttatataccggcaaggccagggtttgtaaaacgagttcttcatctgtcctcattcgctttaacctccagcgtaaatttattgaggctggtgaagctcaagcctgacgtggtaatatatgttgtaccaacgcttttctgtgcgttaccagtattgatttacaccaagatcacaggcgctaaatctgttattcatatacaagattatgagcttgatgcaatgtttggtctgggaagcggtaacggaaaaggaagcaagttatcgtcatttctttattatttggaacgtaagattcttaaaaagtttgacagagtatctactatctccaaaaatatgctgaacaaagcaagagcaaagggtgtagaagataaaaaccttgttctgtttcctaactggtcagaaaccgataggtttagaaatgttgttgtgcctgtggatttttactcggaactcggcataagtcgaacaagtaaaattgttttatactcaggcaatatcggtaaaaaacaaggcttagaaaatttgatacctatagccaaaaaatttgaagacgaggatatcgtctttctaattgtaggtgacggtgtaggtaaaaaagatttgtacgatgcatcggttaatgcaggttcgaaaaatatcctttttaaacctttgttaccgtatgaacagttaccaatgctgttagctattgctcattgtcatctggtaatacagaagaaaggtgttgctgatgcggttctaccctcaaaactaactaatatacttgctgccggtggacagtctgtaattacagctgaagctgacacagaattaggtatggtttgcagggataacgaggggctggctgtccttgtggaacctgaaaatgaactggctcttgaggaaggtatcaggaaatgcttgcagttgcctaagtttaatcctgttgctcaactttatgctgagaataatctagcaaaggaaaatgtaatggcgagtttccttgctgagcttcagagattgtcaaaaatataa

SEQ ID NO: 271075 - DNA, 966 bp, Klebsiella pneumoniae
atgattaaaagcaaggtctatgttgctggtcataaagggatggtcggttcggccatcgtcaggaacttatctgtcagggatgatgttgaaattatcactgctgacagaaatgaacttgatttacttgataccaatggagttaacgaatttttccgtaaaaacaaaatagaccaggtttatcttgcagcagcaaaagttgggggtattattgcgaataatacttatcctgctgatttcatttatcagaatttaatgattcaaaataatgttatcaatgctgcgcataataacggtgtccaaaagttaatgttcttaggctcatcctgtatttatcctaaactagcaactcagcctattaccgaggggcagttgttacaagggactcttgagccaaccaatgagccttatgccatagctaagattgcgggtatcaaattatgcgagtcttataatcgccagtataatcgtgattacagatccgtgatgcccaccaatttgtatggtgagaacgataacttccatccgagtaactcgcatgtcatcccagcgttgatgcgtagattccatgaagccaaacaggaaaacgcttctgaggttgtcgtatggggcagcggtaatccgatgagggggtttctccatgttgatgacatggctgcggcttctatctatgtgatggagttagattctgagactcttaaccagaatgttcagcctatgctgtctcatattaatgttggcacaggtattgactgtacaatccgggaacttgcagaaacaatcgcacgagttgtgggctttgaaggcaaaattacttttgatgctgaaaaacctgatggcaccccccgcaaattgctggatgtaagtcgtcttcagaatttgggttggaagtatagtattgatctggaagaagggctcacaagaacatatcagtggtttttagctaaccagggtaaattccgtgactaa

SEQ ID NO: 271076 - DNA, 540 bp, Klebsiella pneumoniae
atggatgaaataaccaagtctagcttctctctgcagaacaaaatttatcgagtggtttgggcagtatttaatctccttttttttaggttttcccccagaccattttttaaatggagagtccttatacttaaactgttcggagctaaaatctgttttagctgtcgagtttacggatcaagtaaaatttggagccctaaaaatcttatcatggaggagcagaccaccatcggcccccatgcgaatatttataatcagggaacgatcaaactgtgtaaattaagcacagtcagccagaatgcttcactttgtgccagctcgcatcgatatcaaagtagaaagcatgagttaatcctgtgtcctattaccattaacgaaaaggcgtggatctgcgctgaagcgtttgtagggccaaatgttaatgtcggtgagggcgctgtacttggtgcccgcgctgtcgcgaaaaaagaccttgaaccctggactgtttatgacggtaatccctgcgtaaaggttaaagacagaataatgaatgacagctaa

SEQ ID NO: 271077 - DNA, 1167 bp, Klebsiella pneumoniae
atgaaaattcttcgtgtaattccatcaatggatcctaaaaaaggtgggccatctgaaggaatcagacaaattcaaaatgaaattcaaaaacagcaattgaatatagaatgcgatattgtctgcatggatgacgagaataatataagccctgcaaatgctaatttaaaagttttcaatgttggtgagggaaagggcggctattcttactcaaaaaacctcaaaaaatggctgatagaaaatgtaaaaaaatatgacttggttataatccacggcatatggcaatatcacagtctcgtaaccagttcggtttgcctaaatgaaaaagtaccttatcttttatattcacatggcatgttagatccatggttcaaaaaagcctacccactcaagcatgtcaagaagatgatctattggatgctttttgaaaaaagagtggtcaataaggcacgctcggtggtcttcacatgtgaagaagagaaacttttagccagggaatctttccctttttacaccccaaatgagagtgtaactgcctatggtacagcaggaagcacttttgaaagaagttcctcggtggaagccttttatgctagccatcctgagctaagagataaaaaattaatactctttgtaggtagaattcacgagaaaaaaggctgtgatattctattgaaggcatttgctaaaattaaagagcgtgcgcaaggttatcatgtattctttgccggccctgatgatagcgaatatgcaaaatccttgaaggaagaaacaaagcagcttggattacaagatgttgttacttggggagggatgctacagggtgagaaaaaatggggggcttactttgtgagtaaagtatttgcattaccatctcatcaggaaaattttggcatcgtagtcgctgaagctctctctgcttcattaccggtattgatatcgaataaagtaaatatatggcgcgagatagaagctgaaaattccgggttaattgctgacgataacgttgaatcattcagtaaaaaattgttagagtttatcgaactcagtgatgaacaacaggaaataatgggaattaatgcgaagaagtgcttcgatgataaattcgagatttccaaagttgcaaaatcatttgaaaaaatcataaacgagagagtcataaatggatga

SEQ ID NO: 271078 - DNA, 555 bp, Klebsiella pneumoniae
gtgtatattcctcatccactttatgaactgaagtctttttcgccagtaagtgttattgaagatgaaaagtattttgtatgcttcgggcgtattgaaaaatacaagaaactggatgaattaattaaaaaatggccattagaccacaagctgatcatagccggtagttctgatgataaagattattgtcttcatttgaagaagttagcaacagggaaaaaaattgagatcattgataaatttatcagtgatgaagaggcgtatactctggtgagtagagccgaatattcaattttgccatctgacagcaaaagcatgattgtcagtggcagcttcttcttctctatttcagccggaacaccggtcatcgcggtgaaaagtgatttttacaactcacttagtgtctataatggagagctgatcttggttaatggtataggtgacatcggctctgcgttacaaagcttgccaaataaacaaaaaataatgagcacagagtttactaaccaatttagtgatgacactatcattaactctctcagggtaataattaaataa

SEQ ID NO: 271079 - DNA, 171 bp, Klebsiella pneumoniae
atgcaactaaaaatttgcataaaacgttctcttgctcacattttgtgctcttacgcgaaaaaacggtgtaatttcaaacaacggagtgcaaataatcgccagcaaaccggcccgtcagacgcggtttcggtcagccacgtttacccggaacgtatgctgaccgtaaactga

SEQ ID NO: 271080 - DNA, 783 bp, Klebsiella pneumoniae
atgtgtttaaatttaggagtcgccaaagaaatagtagctgataaacttcctaataaaaattcaactaaaataaaatctgattggtttgttgatgagtttgacattattttagatgaagggaacaaaaacccatcagtatacaggattataacacgccttcgaaattctattagttatcataattttaagttaagaataccgtattctaaacttaatgaaacgaatctaaaagataaagttgaagtttctttttatgatactgatggaaagtctggaaatgatttctatgcgagagcatcatttaagactctcgaaaaaataattaaaaaaatacatcgtacagaatatatattccataattgccctgttttcagttacgataatttaaactctaaaaatattgttaagtacgttgaaagttgttttattcattttagccgaccttatagtaaacagtgtattgaatttaaaggggttaaaatgcttgatccattaaaagcatatcaattaaaatcagcatcaggttctttcgaagcttcacattctgatgtagtaatgtataaagtgtgcttttctctaaatggaaaaccctgtaatgatctgtatatagacattccatattttagtgaggataatccaaaatccttaacaattgaagatgaaatatgctcattgggcgaatatactatggaatggattttgaatgatatacgatccccactatgtcgattagataaaaagattagagatatgattaaatgtattattcatgaacgcatctga

SEQ ID NO: 271081 - DNA, 201 bp, Klebsiella pneumoniae
gtggcggctgcgccttacccggcctacagcctgcatctggccggcgatacctgtcgcgaggatctgacgtggaacatcgtggccgccaaagaggggctggtggcgaaaggcctggatggcgagaagcagctgcgggcctttgtggtgagcgaagacaaaatgaaagacgcctttgccctgctcaaacagctggtgagttga

SEQ ID NO: 271082 - DNA, 201 bp, Klebsiella pneumoniae
gtggcggctgcgccttacccggcctacagcctgcatctggccggcgatacctgtcgcgaggatctgacgtggaacatcgtggccgccaaagaggggctggtggcgaaaggtgtggatgccgaaaaccagctgcgggcctttgtggtcagcgaagacaagatgaaagacgcctttgccctgctcaaacagctggtgagttga

SEQ ID NO: 271083 - DNA, 201 bp, Klebsiella pneumoniae
gtggcggctgcaccttacccggcctacagcctgcatctggccggcgatacctgtcgcgaggatctgacgtggaacatcgtggccgccaaagaggggctggtggcgaaaggcctggatggcgagaagcagctgcgggcctttgtggtgagcgaagacaaaatgaaagacgcctttgccctgctcaaacagctggtgagttga

SEQ ID NO: 271084 - DNA, 201 bp, Klebsiella pneumoniae
gtggcggctgcgccttacccggcctacagcctgcatctggccggcgatacctgtcgcgaggatctgacgtggaacatcgtggccgccaaagaggggctggtggcgaaaggcgtggatgccgaaaaccagctgcgcgcctttgtggtgagcgaagacaagatgaaagacgcctttgccctgctcaaacagctggtgagttga

SEQ ID NO: 271085 - DNA, 201 bp, Klebsiella pneumoniae; identical to SEQ ID NO: 271081

SEQ ID NO: 271086 - DNA, 594 bp, Klebsiella pneumoniae
atgaaagaacgtggaatgatttttaacgctgagatggtgcgggccatcctcgacggccagaagacgcagacccggcggattgttaaagggactgacggcgccgtgaagttctgcaaggaatgggacatcaacggagaagaaattttcgttgttctcggcgaaaaagaccgcacaggaatgaatcctgttttgggtgctatctcgtgcccgttcggcgccgtcggcgaccgtatctgggtaagagagacgtgggcgcgctacaacatcgaccagaacagccacgacatagcgtaccgcgccacaactccagaagactggccagaagacggccgctggcgtcccagcattcacatgccgcgctgggccagccgcattcttctggaaatcaccaacgtgcgggttgaacgactgaagagcatcagtgacggcgatgcgatacgcgaagggtgcagtaccgccgacatgaagagtggcgactgtgtagctgatgtgttcgcgcgcctgtgggcgtcaatctacggcgacgaatcctggaattccaatccgtgggtttgggttatcgagttcaagcgcgttgaaggtggtgcagcatga

SEQ ID NO: 271087 - DNA, 354 bp, Klebsiella pneumoniae
atggttaacgaaagcgataaaacatcaatgctgagatggttacaagagaatataacccccacatctttgggtcattttttttcagaccgcggaatatctccaattgagtgccccatttgccataaaactgagtttaccattctatcagtaaccaacaaaaccgaagaaaaaactattattcaggttttattctctaaaattaccaacagtgatgacggattggaaagcgacagtagtgatgcgacttatcaatataccctcacttgtaagcattgtggattccagcatttcttctctgtaacgcctgttcaatcctggtttcgtgactgtccaatttttgatgatgagaaatga

SEQ ID NO: 271088 - DNA, 744 bp, Klebsiella pneumoniae
atgaccaaatcaaccataaccagagagcagctggaagaatgggttgcacaacttgatgaagatggcggctgtgatgccactgacaggcaattagaggctctcattcgtcaatcgctggccgcaatgaacggcgagccggtggcagaagtggtttcaatttatggcgaccccgaagcctttggggagcgagagattagaccgcttgtcggcattcagcaaatgccatacgggacgaagctatatcgccacgtgcagcagccggtagttgagagcgagccggtggcgcttcaacctgagctggcaaaagttatctatcacttccgtgactggaatgaagggtttccggttgagcggttcaaggccgactacgtcattagttggatgctggcaaattatccgccagcgcaaccagcaaaggaccgagagcaggtacgccgcgagcacgcagagtggtcacaggcaacattcggtaatgtcggtccggttggcccgctgaagcacctcagcaaagaagcactggaagccgctgaacagcctggcgacctgtcggagtgggctgatatgcagttcctgctgtgggatgcgcaacgccgtgccggtattactgatgcgcagattacccaagcgatgatcgataagctggcggtaaacaagcagcgcgaatggccggagccgaaagacggggaaccgcggttgcatatcaaatcgcagccagcaacgcaggaggtacatgatgaaaaatga

SEQ ID NO: 271089 - DNA, 912 bp, Klebsiella pneumoniae
atgagtattagcccaagagggattattgtccctaacactgatttcaaaggcggtagagttagtggcactgagcttttatcctcacaaaaactgaggtactacctactctattgggacaaagtcatatcggtaactaatccaattatcggaatgagatatgatgaagaagatattaccagcctaataaagataggttttatagaggaaagaggtgagtctttatcagattatgcagcaaggaatggtggggtaataaattttggaggtgatggcactgatgctattttagcagaaacattcaatatcacatcaagtcaaataaatgcacaatacccaggtgattttgcaacccatcaatttgaaagaaatgatttcgccctaccgagttccgaggggcaaagtcgctctctagaaatagaactttactcttgttttccttgccccccaccaaatattcctctgggtgatatttggtgcttcaggcaaaggagggccgatgaattaatgtgtttaagagagtcaattgatgatctatatctgtcaatgatgcggtcaggagatttagtcagagagagaacaatggcccttaatcaattacgtagtgccatttcagacttgaatagagtttatgacgagtcttggaaggctaaatacttaattgacagaaagttcgtttttgaaagcccagcattaagtccaagttatcttttagctagtcttggcgtaggagcaagcatttatagtatgactagctcaacaattccatcactggtgactgctgggctttcttatatgttaaatggttcgttaaaaataagaaaatcaaacaggaaggttaaaacaatattgggtagggaaataaatatggattatattactaatgtaaatggtagatttgtaaatagagtttga

SEQ ID NO: 271090 - DNA, 147 bp, Klebsiella pneumoniae
atgtccttcatgatgggggcggaagagcgctatatcatttccacctacgacagttacataactcacagaaagttaagcagggacgatcgttactggtctaaagaaaccattatggaagttgtaagggaaatggcttctaaaaattga

SEQ ID NO: 271091 - DNA, 177 bp, Klebsiella pneumoniae
atgctggaaaaagaactgctaaaaaggcttcggaatcatctcgaggattgcagtctgattgttcgtcgtgctggttcggatgggttaagcgtttatgctggagcaaacgagtcgaagaagacggttgaagggctccttcaggaaacctgggaaagtgcagacgactggttctattaa

SEQ ID NO: 271092 - DNA, 1086 bp, Klebsiella pneumoniae
atgacaaaagctgaaatcccattgaagactgagcgactacacacagtagccccgtatattgggaaaatgcggccagaaattgcaggttgggctatcgagaccgtttctaagcctggcgatttagtgtacgacccattctgtggttcgggtactgtccttcttgaggcatggttgaaaggaagagacgctgtagggactgatctcaatccctatgcatgcttgatttcacgggcaaaactgaatccctatatgcctcatgatgtggataatgttaatgagaaattagattattacgctactttagtagcgaaaataaaacccaaagtaacgcttgatgaaattcctgaatgggtaagggaattttacaacccagaaacgttagttgacttattaacgtgggtgaaagttttgaaatcaagtaacgatgatttcggactcgcttgtttactttctcttgctcatcaccaacgcccaggatttctctcatatccttcaagtcatactgtgccttatcttcgaacaaagaagtttccgccatctgagtttcccgaactttatgagtacaggccagtactgcctcggctcaaaaagaaaatactccgggtatataactcattaccatcgcttgacttttctttgagccgaaacatttatcaacagagcgcatcatcaattgaaacagagcgcaaggttgatgctatcattactagcccaccatatatggggcaacttgactatgctcgcgataatagattaagactttatcttatgggtgtggaaaactggtcagaattgaataaagaaatatcacctagtgctacgaggtttgtagaggatttcagtttatgcttaaactcatggcgtaaaaacctacgtcatggcggcaagcttgctatttttgtaggcacgaccacaaacaccacaaaaaaaagacttgatgatattgttattgacttaataaataatgaatggcccgattacgagctaaccgacactatatctagtgagatcccagaatctcgccgagcaagaaaaaactgcaaaggaagtgttgctgagtctctattaatctttgaatataaataa

SEQ ID NO: 271093 - DNA, 1044 bp, Klebsiella pneumoniae
gtgaaatcagtagcgatgttcaacaacaaaggaggcgtaggtaaaacaactttaacctgtaacctcgcctcttttatagcaatgaattttaataaaaaggtattggtggtcgattgcgatccacaatgcaactccacacaactgataatgggtgttgaaaattcagcagagctgtatctagactcaaaacctactataagcaccattaaagatgttttacaaccaatagaagatggtgattcaacaataaatactgaattaaccttcctcaaatccagcgacaatcgctttggagttgacttattaccgggacatccttattttgcaataattgaagatagattaggtgttgcttgggggcaactcagagggagagacagacaaggttttagacaaacaaactggaataccttgctatgtaattatttagaagataaatatgatttagttatgtttgacttaggtccaagcttaggttcgataaatagatccgtactcatgggatgtcaacatttcctcactcccctaggctccgatgtatttagcattattggcgtaaaaaatatctcttcatggttgaacaactggattgatgactacaatcactcttggtcggcattaactccagacgagagaagcgttcttcaagagcgattctctgttcttcccgaacctcgcatcaaaaagggctttattggctatacagtccaattatatataactaagtcttatggacaagaacgtcgtgcgactaaagcctatgaagctattattggtgatgttgataacgaaatcagaaattcattaattgatttttactctgatagcttaattgcctctcctcaaaattctaagttgggtgatattcagcacttatatagtttggttcctctcgcacaaaagcaatctgttcctattcatgcactaacgagcacggatggccttgtaggttcacagttttcagcagttcgagaattctcaaaaaaaatacgccccattgctgaaaatttacttaaaaaccttggcatgtccgttcaggagtaa

SEQ ID NO: 271094 - DNA, 870 bp, Klebsiella pneumoniae
atgataaattggccagactctttaatcgatgaattagcctctcgcagatgtgttattttcattggatcaggggcatctgcttctgctaaaaagcgaaatggtgaaaatgacgtatcacctcccacttgggcaggcttacttaaattattattagaacggtcccctgaggatgcaattggatcaaaagaaaatgctgaatcacttcttgaaaaacaaaattatctcgattgtgctgaaattttaagaacaacttgcctgcctagggcagagtataatcgctgcattactcaaacattttcgggatatgaacctaccggggtacataaagcagttgaaattttagaccaaaaagttgtaattactaccaattttgatactttatatgaaagtttatgtcgtcaaggtcaaggtagagatggatactccgttatacgatattatgacgatggtctagtcgcaagaatgcgctctccaacaagattaattatcaaagcgcatggatgtataagcgaacccgagaaaacaattttaacaaagtctgatttctttaatgctcggagtaaatacttcggtttctttgaagcattagaaagtatttttctaacacatacaattttatttattgggtatagcgttaatgaccctgaaatacaattaatcctagaaaataatattattacctacccaagcgctaacccgcactacgccacaatgtccagtggctctcacccatcaatattggctgccttcaaaaacaccaataatatagatatcttagagtacaacccagaaaataatcacgaagaacttttagatagcttaaataacttaggtgttttagtagaagaaagaagagcgatacatacataa

SEQ ID NO: 271095 - DNA, 918 bp, Klebsiella pneumoniae
atgtcacattttgaacctattcaattctcggagtatagggaatttgaacgatatgtccttgattatttttctattttatataatacgacattttcaacatatggaacaccaggtcaggaacaatatgggatagatggacttcactttgggccattaagcgatggtaaaagacatgtaatacaatgtaagaatttgaattacagcgatttaacaatagagattattcaaaaagatattaataaactcaaagagcttaaagtagagtttaatgtttatcattttgttacttcagcaaaaaagaaaacaaagattcaaaatgacatatcaaacaatatggatgttcttactagtaataataagtatgaatttgagattcacttctatagtgattttttccatgattcattacaatataaaaaaataaaagatctgtattttaaacctatctataatgatgtttccaaggggtgccatgaaaaagatattgaaagtttagaatctttggcaatgtgtattgattcctcttttataaatctaccgtattatatatcccaagtaaaaatagcaaggacgagtgcgtataatacattggtattaattagggagttttctgagtcagtgcctggtggggttttttatgatataaaaattaatgaatacatggatatgtttgttgattatatagatagaatttatagtttctcaagttattacgaattcatatttaggaatcaggagaataatgatgtttatttaaattacattggcagtaaagaggagtatgggaatgtaaacggccatatggatgggttggcggagaacttcgcgtatacatttaagaagtttatttcttatcttaaagataattatccttcatttgatttgcgtaaaaattattatataaatccattaccatga

SEQ ID NO: 271096 - DNA, 2013 bp, Klebsiella pneumoniae
ttgaccccttttttaaatggcttttatgttacctggggaaggaaacgtagagaatacaatactgacttattcatttacttcctttcacctgaggagcattttaaagaatcatatggcttggacaatgaaatactattagtctatgctccttatacaagaatggaacctcggacaatacaagctattgagcagataatgtcaacatctcccgccaaaggaagagtggaaacactaagctattttctcatcaccgactgtgacgaaatggatgaatggcttgatggatatttatcatcaaggcaagagtctagaataatagttccatttttaaagtcagatttatttgaagctaaaagaaatgcagatgactggtttgtaagaaataaactcaatagccaatattttggtcgtgacctttttaactatactttaccgctaattgatgatgcttacttctttggtcgtcaatcaatcatgatggaatactacgactctgtaaaaagaagagaaaataaagctgtatttgggttgcgtaaaactgggaaaacatcttttttatacaaactaaagcgattgtgcgaaaatgaaggaactgctgaggttttttattacgactgcaaggttccacatattagaaagtcacggtggtttgaatttttagaagacatagctaaagagatttcggaaagattcggtattagtttcaaagagcaatatacggaaagaactgcctctaaacattttgaaaagcttattaagtttttggacgcacaaaataaaagaatgttatttattcttgatgaaatagaatatatctcatttgtatctccaaaagatatccattgggaagatgattatatagaattttggcagactatgtggtcatgtcaaagtcgatataaaatattatctttcattctggcaggcgtgaatcctagcgtagttgaaaaagatcttgtaaaaggtgtgcagaaccctttatttggcatcgtttctcataaatatttaactggattaaatcttgatgaagttcaaacaatgttaaaaaagttgggtaaacgtatgggtataaaattccaatacgatgcctgtaatgaaattttcaaatggtacggcggccatccattattaactaggcaagcttgtagctgtattaatacttttctttctagcacctgcgataaacctatcgaagttacttttaaagagttcaatgaaaataaagagcatattgatagagaattggttttttacagtgatcatgctgtctctgaaataagacagttctatcctgacgaatattatttatttgaacttttatccattgatcataaacttgattttaaagagttatctcgcgactctgccgagatcaaacacttgatcggttatcaattaatacgagatgaaaatggtaagtatgagattaatatccctgtcatagctaaaagagttgcattagaatcaaaaagactaaacgggagggatatagtatatccaatagttgcaaaagagaatagacagttatggttagcgcgaagattgaatgaaatttgcacagagattaggcatcttgaaagattcattaagaatagtaaacaagatttattatttggccctaactccttccccgaggctgatcaaattaaattgatcaatgtcgcttctgatgaaagcactttttcctttttcatcaatgtaatcaataggtgctttgtagagtcaattgatgtttatggtaaaagcttgaatgtaaatgactactattggaacaatataaaaaatagctaccctgaactttggagcgttttagacagggtaaaagtatatagaaatgagcgagatcacctgcatttaaacaaaacaaatatagataaacttgactcatatttgaaagaggatttagaaggcaaagctttttcacaacttaaagagccttactttttgttacaacaaagattattggaccgtatgttactggccatattaaatgaaattgataggtataattaa

SEQ ID NO: 271097 - DNA, 138 bp, Klebsiella pneumoniae
atggatattgaaatatctgttaaaatggccagtcttagctgccacttcaagtggtggaaactagtcgataataagggaaaatacaatctaatctataacttagtgttaaatgattgtattgtttttgacttttattga

SEQ ID NO: 271098 - DNA, 291 bp, Klebsiella pneumoniae
atgcttcaacaaccacagttttatgaagtaaccggcataagccagcatgcaacattcgttgatacacaacgtggcgttgccgtagtggagcgctcatcatcaccattagcatcagcggttttacttatctcatattgcggcgttcagcaattcgccagatttcttggcggcacactcattacggaagacggcgacgctattgaaggggatatgctagcggatgttgagctgataggagtggtaactcacattatcagtaaagccggttttgatgacagctcggtgatgtaa

SEQ ID NO: 271099 - DNA, 1449 bp, Klebsiella pneumoniae
atggaaaatccagccagcctgttacgccgtcttaatccctgctgtgcccgcgcaatggagggggcggcctccctgtgccagacccgggcgcatgccgagatcctgcccgagcactggctgcttaagctgctggaacagggggaaggcgatctgacggtgctggcgcggcgctatgaatgggatatggatgcgctgtggcaggatctgctgaactggctggataaacagccgcgctcggtacgtcatcgtccccagctctctgaccataccctgaggctgatgcaggaggcctggctgattgcctcgctcagcggcgaagcgcagatccgcagtgttcacctgctgatggcgctggttgaaaaacagaatctgatccagtgcgatggcctgtggccgctgttaacgctgggccagcgtcagctggaacgcctgcgccccttgcttgatgcccagtccgacgaacgtccgccagcgcagcaggaagcggcgctggcgcagccccatggcggggacgtggaatttgtggggcgtcctgcgggcagcgaactgaatgcggatgggctcaatccggcgctgcagaacgcgctggacaaattcactctcgacgtcaccgccaaagccagagacggcctgattgacccggtgttcggacgcgacacggaaatccgccagatggtggatattctctcccgtcggcgaaaaaacaacccaatcctcgtcggtgagccgggcgtgggcaagaccgctctggtggaaggcctggcgctgcgcattgccgaaggcaacgtccccgacgcgctgaagccagtgtcggtgcgcacccttgacctcggtctgctgcaggccggcgccggggtcaaaggcgagttcgagcagcggctgaaaaatatcattgaggcggtacagcagtcgccttcgccggtgctgctgtttatcgacgaggcgcacacgatcatcggcgcgggtaatcaggcgggcggcgcggatgccgccaacctgttgaagccggcgctggcccggggcgaactgcggactatcgccgccaccacctggagtgaatacaagcagtacttcgagcgcgacgccgcgctggagcgccgctttcagatggtcaaggtggatgagccggacgacgacaccgcctgcctgatgctgcgcggcctgaagtcccgctatgccgaccaccacggcgtgcatatcacggatgatgcggtgcgcgccgccgtgacgctgtcacgacgctatcttaccggtcgccagctgccggacaaggcagtggatttactcgacaccgcttccgcccgcctgcgtatgagtttggataccgtgcctgagccgctgacccgcatgaaggcgcagctcaccgcgctggcaatggagaagcaggcgctgctggaagatattgcgctgggcaacagcgcccgcggcgatcggctggcggccatttag

SEQ ID NO: 271100 - DNA, 303 bp, Klebsiella pneumoniae; identical to SEQ ID NO: 239334

SEQ ID NO: 271101 - DNA, 1374 bp, Klebsiella pneumoniae
gtgagatcgatagcaggcggtcgaaaaacaaaggcgccggggattcttacgctggcaaaagtccctggcgttgatgcagaggggaacccgctaaccagcaataaggatgcggcctggtatcagatccgtcctgaaggtggctggttacccgccgacagcgttaagaaagtgtcgcagtatgcgcttggtgagctcgggtttgtcacgctgaataaggctccggagagttttgacctgattgatgggataaaacaaccgaataacgtggtgaaggggattctggaacagttgtataaagcggcaaaggatgaaacgcgcaccactcacgcgctgaacaagtataactataaacggctgctggaattgatagacagtaaccaggacgggtattaccaggagcaggagtatcttcaggcggtacataatatctcttaccgcgaccgcctgtaccgtgtaattgcaaaacacgccagtgaatggtactacggcaaggatgccccgctctggaagacatacctcgatacgttaaccagggatgcgccattgtggaagacgtatctggaaacgtttcttgataagatgacgtggatgaagacggtatccgaaaagggcgttgcgctggggtcggagccgtggcatatgcatcctatagtatttttaaattctataaaaaaagggaaatccaaaattacacgagagatgctcaggagaatttggtctgacccaggaaatgtttctgactctgttcttgatgttgttgcagaagaattttcgaataaatttgaagtttgtaatattaatactaaaaatagactgtatcacttttttgctcaaatatatcaagaagtaggccccactttcaatttgaatgaggggtttaattataggccacaagtacttataaataagtttgcatattatcgtaatcatcctcaagatgctcaaacggatggatatattccgggaagacaagtagcaaataaacagaatattgcgaacagagcatatggtggtcgagaggggaatgataatattgcaagtggagatggatggcgatatcgtggaagaggaatgaaacagttaacatttaagaataactatagatcttttacaaattatcacgaaagagtttggggagaacgtgttgattttgaatccaccccagatctcctagttgaaacggtttatgcggcaagatctgctttgtacttttgggatcagaataatttatttagtagcgctgctaatggcattagtagagctgtatcagactcaataacgcgaattgttaatctctatgataatcactatgaagatagacataataatttaataagatttctacaagagggtatttttgatgaaatattctaa

SEQ ID NO: 271102 - DNA, 630 bp, Klebsiella pneumoniae
atgggcggccgcagaaacccgggagatattgcgcagcagcgccacatcctgcgggctggcgtcgaactcataggccgagatcaccgagccgatcggctcgccgccgggagtgtcatactccgcggtataggtgtgccagtacaggccgctctggataagctccggcgcgtcctcaaagtcctggcgcagatcgtctttggcgacgtcgaggatctccgttttgacgttctgccgatagtcggtgttgtccaccagctgtttgaggccgcgccacagggattcgacctgctgaaactcctgatggtgcatcaccgcgtccagctgacggcttatctggaaatccagctcggcgatatggtggtcgatcagcgttttgtcgagcttttccacccgctggccggactgacggatgcgttccataaacacctgcatcgccgcggtgagacgctccgccgccggcgtctcggagagcgcggcatcgtccagaaagtcgttgatatccccgaggcaagacgccggggtgagattaattttttcaaacagcgaggcgtaaacgccctcgcccgccctgttttcctgcagcgtggtttgcccctgaacaggggcgttttctgtggtaacagacattag

SEQ ID NO: 271103 - DNA, 447 bp, Klebsiella pneumoniae
gtggctgagctgcaggaagttgacgcctggttagatgcgctcttggcgggtctggagcctgccgcacgtaagcgcatgatgcgggagctggcgcagcagctgcgccgcagccagcagaaaaatatcaggatgcagcgcaaccccgacgggacggcttacgagccgcgtcgtgtgacggccagaacgaaacagggccgcatccgtcggcagatgtttgcaaaactccgcaccacaaaatacctgaaagccattgccagccaggacgcggcaagcgtcgagtttgagagccgtgtgcagcgcatagcccgcgtgcatcactatggcttgcgtgatcgggtcagccgtaaggggttagtaatacgttatgctgagcggcagttattaggcattaatagcgaagttaaagctttaatcatggatgtattgcaagagtggttaagtaagtga

SEQ ID NO: 271104 - DNA, 1755 bp, Klebsiella pneumoniae
atgagatttcgaacattggctaagtgggatgatcctgacacttgtaaagcattagtgtttttcgcacagttattagatgaaatgctttttgactatacgctggacacttacaaaccatcagtgatgaacactcctatattaggagtagaagcactcaatacaatcaaggacgtagaagcgggaattattcaacccaaaaatatcgaccatttgatagatgagctaactcataatctgtcgagcgacaaggttgcacattctcttcttggagaggcttacaccgcttttctcaacaaactcaaaaacaaagcaataagtgcaaaagagagaaagtcaattcttgaaatgcttgtaatccagctcccaccaaacttgtataaagataaaagcgaagagttgattacgagtgaattacaatcactcgactgggaacgcagctcgatcaggaaattagcccgaaattatatcagcttattgctttacattggcttcagtcaaaacaatcttaaaaacttaacacaaaaattcttttattatggagaaaacagaataacttgcaacgcagacatcaaagatttcttcgactcaatcaaactagaaaagaaaaaacacaaagtttacttcactgttgaacctgtattcttaggagcagaaccaacatttgaaaggctttcattatcaaaagaagataccttaccagcagaattggaaaacaatccttttttcagaaacttacagagaaagcaaataatctcagtatcaaacattgatgcattggacccatatacagcgcgggaaatagcagaaaactatttaaaactagcttcttctttcttaaatatttatcatcacaaagataaacccacatggtcgaatgaagctttagttatcacagaatcaaatgtcctgaaagtctctgagagacttaatcccatgaagaaatgtaaagacttaaaacatgaaaaagcacacagacgcttacaatcactaatgtcagaattctcattagagaatagttctttttctaaatttctaagaagtatccagttgcattccatggctttgaaaagtgagagcgtagaaaaccaattattgaacctttggatagccctggagtcactggttccctctgagacaaaatcaaatgatcaagcaaccatagagcatattactgatagcattattccattccttaatatcacctatattgattcattaattgaaaaccttacaagagatttattgctatgggacaggcatattttaaatgcacaccttagaggtatacctggcacaaagtcgaagcataaacttgccaatattatgatactcccggaatatgaagagatcagaaactccttatcatcaaggtttcgtgattacagcctactatccgatcgtttcgaatatataaaaaaaattatatcaacgcctgaatcaataaaaagcacattagataaccacaaattaagactagagtggcaattccgacgtatttatagaacgagaaataacatagtacattctggaaaaggccaacaaattactccattgttagttgaacacattcataactatctagataaaatatttgaaatacttgtactacttgcatccaaaccaagaaaaatacgctctgtaacacaaggatttagatacatcaaattaatatacggacagagatatgaaaccattacaaaaaatggatttgtttttaatatagaaaatataaaaaccaatctgctatgggactaa

SEQ ID NO: 271105 - DNA, 294 bp, Klebsiella pneumoniae
atgttaccaaatacgatggctaattttgtaaagcagttaatttctgagacacaggatggcattgttagctgggattattattcagatgaagataaggttgtgactgaataccaaggaatgaagataacattggactatgcttttgattttaaccaagaaattggtgttcagcgttttaatattgtacagagtgatgggcgacattttttctttgcggtaggtcaatatgattctggctatacgttattaaaacagctttataatgaggcacaagcttcggattttaaatattaa

SEQ ID NO: 271106 - DNA, 774 bp, Klebsiella pneumoniae
gtgaacagtttttccagaaaaaactttttactctcaaaaattatcagaccgctcagtgccagctgcggacgtaacgcacaatggtatgttaatagttgttttgctaatcgacatgaaaacttgaataaggcaaaagaaagacgcataatgctgaatatactatttttcaatgagaaaactttaatgagggaaaaaattaaagataattggatcaggatagtatatgcaattatttgcatccttattatcgcattaggttatacataccaagttgatatagttagcccccctacaagtatgaatttattttcatattatgcttccgtagcgacaattgttgcactattaatatcaataatggaaatattatatgctgttagcatcacaaagagtattaaagtacgctctatgtttaatcttacgagattcaaacatgcaacgggaataagctacgcccatgagtgcgcttcattttacgatcaatgcttaagcgatttggctacaaaaaaatacccactccttgtagccaatttcactatagcaaaaaaattacacataagcctcgccaattatttcatgactaaagaagataaaaatgaatttgacacaaaaatgggaacattaaacgatctggaaaagaaaataatcgcaacccgtcatatcactccttctaaccctctaggtaatgctcagattaaagaaatccaagaggctttgctcgttgtaaaacaagagtttcaaacaaaatatacattcagaaattcagaggattaa

SEQ ID NO: 271107 - DNA, 1809 bp, Klebsiella pneumoniae
atggataattgttttaactttaagcctaatttgacaaatttaaggggttgtcagaaagaggcttatttagctgttagagactactttgaaaactcagccaatatcgaaaagcatattttagtgcagttgcctacaggaacagggaaatcagctgtaattgctatctcaccatatgaagtcgctaaaggtaaagttctggttctaacaccaaacttgacgcttgcaaatcaaattgagcaagatattgatatattcgaaaatcctaatggtaatatatataaaaaactagggcttttctctgagcagttttacgctgagaatgtagcttatcctctacgactaagcgatagcgttagctcgaatgatatagacgagcatcagataatcatagctaactaccaacagttaaatgatgttgagaagtggtttaaaggtaaagaagagcaggtggatttaattatcatagatgaagcccaccatcagaaagctaaaacttatcaggaagtaattaatttttttccgcaagccaaaatcttaagccttactgctactccttttcgttctgatggtaagccacttgatggcaaggttatttatacctatcatttttcagatgcaataaaaaatggatacattagaaatattaaggtttgtgatatagctccagaatctatttcactggtgggtatgtttaatgataaagatggtaaagaatattcgttggaagatattcttaagttaaaggaggaagcgtggtttagacgagggatcgccttgtcgcaagattgttgcgatagtatagcaagtaaatcttttgagaagcttttggaactaagagattcatatccaaatgatactcaccaaattattgcggcagcaatatctaaacgacatgccagagagtttgttaagccagcatttgaacgtcttggtttgaaggttggcttggttagcactgaagagaaaaataatgatgttactctaaggaatttaaagcaaggtaaaatcgatgtgatagttaatattggtatgcttggtgaaggatttgaccataagcctctaggggtggctgccattttcagaccttttgcttccttgaatccgtacatccaatttttaggaagggttataagagaaaatggtagcacaaaaaattgttgggttgtttctcatttgggtttgaatcaaatatcaagattcaaagaatttaagttatttgactccgatgataaggaaattcttgaaaggcttttgtctggaaataataatgaaggggttggaggagaatcatctttcattgatacgcaagaaagaagttctattgaagtccaaatttcagaaattggtaataaccttgtggaattcaacgaggattacgtagatctatcaaaagtagataaaattgaaaaagcgatcgagagacttaatgagagcgaagctagagaattattagctaggcttgggtttgatgctaattcaataaatgctgtcacgactcttaaaaaaagggttaaacctattaataagaaaagggctgctcaatccagattaaatgaagcatctaaaagtatagctgtagatatactatctgtattaggtttaggtatgtatgctagagatttcaacccattgaataaaaattttgtttgggttaaaaccaaagttgatagagaaataaataagaaactagggattaaacaagctgaaaggaaaaaagtgacaaatgctcagtatgatgagtttgctgagcgtggtgagctaaatcttataaaagaaagttgcttggcgtattttaaaggtaagctttaa

SEQ ID NO: 271108 - DNA, 1173 bp, Klebsiella pneumoniae
atggcgcaagactatcaccacggcgtgcgtgttgttgaagttaacgacggcacccgctctatcacgacggtgagcacggcgattgtgggcatggtatgcaccggcgatgatgccgatgcctctgtgttcccgctcaataagccggttctgcttaccgatgtactgaccgccagcggcaaagcaggcgagtccggcacgctggcccgctcactggacgccatcgccgaccaggcaaaacccgtcaccgttgtggtgcgtgttgcccagggcgaaaccgaagcggaaaccacctccaatattatcggcggtgtaaccgctgacggtaagaaaacgggcatcaaagcgctgctttcggcgcagtcgcagctgggtgtgaagcctcgcattcttggtgtgcctggtcatgacacgcaggctgtttccactgaactgttaagtgtggcgcagagcctgcgcggctttgcgtacctgtctgcctacggttgtaaaaccgtggaagaagcgattgcctaccgcgaaaatttcagtcagcgagaagggatgctgatctggcctgatttcatcaactttgacacggtgctgcaggcggatgcgactgcttacgccactgcccgcgcgatgggtctacgtgccaaaatcgacgagcagaccggctggcacaaaaccctgtctaacgtgggcgtcaacggcgtaaccggcttgtctgcggatgtgttctgggatctgcaggacccggcaaccgatgccggactgctgaaccagaacgacgtcaccaccttgatccgcaaggatggtttccgcttctggggttcccgctgcctcagcgatgacccgttattccagtttgaaaactacacccgtaccgcgcaggtgctggcagacaccatggcggaggcgcatatgtgggccgtggacatgccgcttaacccttcgctggctcgcgacattatcgaaggtatccgcgccaaaatgcgcagcctggtaaatcagggctacctcatcggcggtgattgctggattgatgacagtgtgaatgacaaagacacgctgaaagccgggaaactctggatcgactacgactatacgccagtgccgccactggaaaacctgatgctgcgccagcgcatcactgaccgttacctggtggatttcaccacccgcgtaagcgcataa

SEQ ID NO: 271109 - DNA, 516 bp, Klebsiella pneumoniae
atggccttaccacgtaagttaaaacacctgaatatttttaacgccggtaacaactggatgggcattgctgaatccgtcaccctgccgaaattcacccgcaagctggaaaactaccgcggcggcggcatgcccggttcagtcggtattgatctggggctggatgatggcgcgctggatacggaaatgaccattggcggtacggaggcgcttctgtttaaacagatgggcaaagccacggtggacggcgtgcagctgcgctttgccgggtctattcagcgcgacgacaccggcgaagtgcaggccgttgagctggtcgtacgtgggcgccacaaagaggtggattccggagagtggaaaaccggcgagagcaattccaccaaagtcagcagcgttaactgttacgcgaagctgaccattaacggtgaagtgctctatgaggtcgatgcgatcaacatgattgaagttgttgatggtgttgacctgatggaagaacaccgtaacgccatcggtctgtaa

SEQ ID NO: 271110 - DNA, 300 bp, Klebsiella pneumoniae
atgagtgagaaaacagaagcaacggtgaaactggatagcccgattaagcgcggtgataccacgattacggaaattgtgctgcgtaagccgcaatccggcgcgctgcgcggtacgcgactgcaggcggtgatggagatggacgtggcctctatgatgaccgtgatcccacgcatctccacaccaacgctgaccccgcaggaaatggcggacctcgacccggcagacctggccgcgatgtctgtcgaggtagtcctttttttgttgccgaagtcggcacttgccgatttgccgacagcctga

SEQ ID NO: 271111 - DNA, 336 bp, Klebsiella pneumoniae
gtgtttgtgcgccggtaccgtgacttcgtggtcgtgctctccggcgtcatcggtcacacccagctctttcgggttaaagagctgccgcacatcgccaccaatctcccaggggtcatccttaccggccacgccaccatgattgtgaacaccgccccgcgtggtcgtcagcttctgctctcgctgctcgctggtttcgccgctcacgtcaatctgaacggcgggcaggttggcctgctgaagtgtgacgttatcgctgccgccgctctgcccgacgttcgaaccgtcagcctttccgacgcggatcgttttgttttcgccggtgtacacccattctga

SEQ ID NO: 271112 - DNA, 153 bp, Klebsiella pneumoniae
atggaatggattgccgatccgtcaatctgggcaggtctcgtcacgctggtggttatcgaactggtgttgggtatcgataacctggtctttatcgctatcctcgccgagaaactccctcccgcccagcgcgaccggcgcggatcactggcctga

SEQ ID NO: 271113 - DNA, 465 bp, Klebsiella pneumoniae
atgaataacgctacaaatctgcaaaccctttcagacaccgaaaataccaacaccctcaccgccacattgttgcccgatgaacagcgcatcggcttctggccgcaatacttcggcaacatcccacagtggataaccctggaaccacatatcttcgcctggatggaccgtctgtgcgcggattacagcggaggtatctggtgtttttatacgctcagtaacgatggcgcgtttatggctccggagcctggcagtggcgatgatgaaaaatggacgctgttcaacccgatgaatggtaacggcgcggaggtgagcgcagaggccgcgggcatagcggccagcctgatggcttacagccaccacgccatgcgcaccgaatgcgacgccatgacagagcactattaccgcctgcgggactacgcgctcaaccacgcggaatgcaacaccattatgcgcattattgactga

SEQ ID NO: 271114 - DNA, 819 bp, Klebsiella pneumoniae
atgcgattagccagccgctttggccgtactaaccagatacgccgcgaccgtccactgacccgcgatgaaatgatgcaggttgttcccagcgtgttcagtgaagacaggcatgagtcccgcagtgagaaatatgcatacatcccgactatcacgctgctggagaatctgcagcgggaagggtttgaaccgttcttcgcctgccagtcccgcgtccgtgaccccggcaaacgtgaacataccaaacacctgctccggttgagacgcgccgggcaaatcaccggcatgcaggtcccggagattattcttttaaattcacatgatggatcaagtagttaccagatgctaccagggtacttcagaagcgtctgtactaattcactcgtctgcggagagtcgtttggtgaaatcagagttccgcacaggggcaacgtggttgagaaggttatcgaaggtgcttacaaggtgctcggggtctttgaccgggtggaagagaagcgcgatgccatgcagtcattgttgctaccaccgccggcacagcatgcgctggcaaaagccgcactgacgtaccgctttggtgaagaacatcaacccgtcaccgagtcgcaaatcctctcaccgcgccgctggcaggacgaaagcaatgacctgtggacggtttaccaaaggctccaggaaaatttgattaaaggaggattatccgggcgttcagcgcagggcaaacgcagccgcacccgcgctgtcaacggtatcgacggtgaccttaaactgaaccgggccttgtgggtgatggcagaagaactgcagctggcgctgagctga

SEQ ID NO: 271115 - DNA, 219 bp, Klebsiella pneumoniae
atgactaatacaataacccacagcctgctcagtgataagatggtcgatatggcattcattactgaatatacagggtgcagtgataaatggttctataaattaatacaggatggtttattcccaaaaccgattaagctggggcgcagttcacgctggcttaagagtgaggtggagaactgggttaaattacgtattgccacctcacgtaatcaggaatga

SEQ ID NO: 271116 - DNA, 1593 bp, Klebsiella pneumoniae
atgaatttatcccccgaattgtataatgccagccaggtaaatcttccgacactgcagtacagtcctgtgaaaaaagcctcagaaccctatccggtccagcaattcccccctgttctccggaatgtcatccaggcattacataacaatacccagatcccggtagagctaattggcaatgtggtactggcagcaacgtcattaacttgccagtcattgattgaggttattcagccccatacgaatatgccagagccctgttcactttacctgatgactatcgccgaatcgggcgaaggaaaaacaaccattaacaagcaggtcatgaaaccctgttacgcatttgcaacagagattattcagcaatacgaacagcaggtcatcgactataagaaaaaattaagactctggaaaatccgtcaacaggctcttgaaagcaatttaagacaggcgataaaaaagaactattcaggagaaaatgaagaggcagaaataagcaaacatgctcaaaatgaaccacagcgtcctgcccggcctaatttcatttatgaagatacctcactcaaagcactagttgaaggtctgaatgaacatcctgaagcaggatttatctctgatgaagctattaccttttttaaaagttatctgaaaaacaatacgggactgctgaacaaagcctgggatggtgagatgtttgattttcgtcgggcagatggagaaatttatcaaatcaccccgcgtttgacattttcattaatgtctcaacccggggtgtttaggaactacataaataaaaatggtgtatcagcacgagatagcggtttcctgtcccgttttcttttttcatgggtagaaagttcaattggctctcgtcaggtaactcacgaaaaaatagatgcagaccatgatttaaatattttccaccagagactggacgagcttctcaagcttaacaggtgcttaattaacaatcccacagcgagtaagaaacagctaactctggaaaatgaagcgctgacatactggaaaaacaaccgtacagaaattgaaaaaaagatagcatcacagggcgaatgggaacatatccgtgatatagcatcaaaagcaagcgccaacatcctcagaatagccgcacttatccagtttttttacgacgacacccccgaaataatttctctcgaggcaactcaatgtgcaattaacttaatggaatggcatctgaaccaagcctgcatgattttttatacgatgtcagaacgtttccagtttgaacaggatgttcgcgaactggattcatggattatggacagaatcaggcaaaataacaactgtgctattttaaaaaacgacctggaaaaatatggaccgcatcgcctcagacgcactgagaaactgacgccagttctaaatcagttaatcagtcagggctactttgttatcattcagatgaattcacatcgcgcactttacgtcagcccccactataaaaatggcgacgttctattccccagaggattttggtggcactctggcttcaatattatccagtcatataataatacaacaggaagaccctatgatgttgcaatcagttga

SEQ ID NO: 271117 - DNA, 393 bp, Klebsiella pneumoniae
gtgcaggggattaataaggccagggcaaaatggcatacctcagataagaaccctcagctcacttttggccatcagaaggaaagtgaactgctgacaaatcagcttgcgctcggtaccaacggccgctacaaatcaccgatgatcagtatgcgttttttcacgacgacctacgactatgatctgccggatagtaagcctgtatgggaggccgctgaagcctttattcgccagatccccgagttacaccaactgcatactgatgtactgacctatcttaagtcgctgatgtgcgaagcaagcaaggatgccctgacgctcttcttcagtaatatccccgacagtcttaaaactcgctacgtcagcgtatttcgggtaatactaccaacttgctga

SEQ ID NO: 271118 - DNA, 339 bp, Klebsiella pneumoniae
atgtacattgataaatttttaactgaatatgatgagtcgctgaccggcgagatgaatatcgaccctttgggccaactggttatctggtcatcctggggactggacctctttcacggacgcatcacttctattgccaatgatgtcaggcagtatacgctcaacctgctgcaccacagcgtcatccgaaaaataatgctggatgatgctgtgcaaaccgctggcgcgatgaaaatacgctatcccaaaaagcagctcagagagtttatcgcggcaagccttatccaactggagaatatttattcgatgctgggggcggaacgcaggtgtgcaggggattaa

SEQ ID NO: 271119 - DNA, 267 bp, Klebsiella pneumoniae
atgcgagagcatgcggaaaccgtggtcaaggtaaccctggatctccatatagcgaatggcgcacaggcggttgaaccaggtgtaggcacagtgctcaaccagcacgtcaaagccctgctcgcgggcgcgtttgaccagacgatcgcggcggacgagggtggatttggggtagtcgaactgaccatagcgcacggtttcaccgacgctctcggcatcagcaatctgcaaagtgccttttttatcgacggaaatccccagcgtggttag

SEQ ID NO: 271120 - DNA, 318 bp, Klebsiella pneumoniae
atgagggcggaattgatcaaagcaatcaaagaacatttgattagtgcaagttggcatagtacaaacaaagttgtagggcgttataaagctacatttgacattaatgtacaaaaagagtggccaatagacgagatcgaaatagcaacacaaaagcgtaatcatttagttcatcgtggcgggaaagataaagaaggcaatccggtagtgattactgaacaagatttagatatgttgctggatcacgctcaaattcttggagaaaaattatttgatagtcttggggtagcattacagaaaaaagatgagagcgaattttga

SEQ ID NO: 271121 - DNA, 735 bp, Klebsiella pneumoniae
atgtacagagaaataaccgaagcattaaaaaaagatgggatatatgaggtagatggttttttaagcgaggatgatgtaatgaaaatagcattagaggttgagtcaaaacaaggtagatcaagtaacctctctgggtattgtgatataagacatatcggtaatgatgtaaaaaatgcagagtcttttaaaataattaagataaaagaattgtttgatgtaatgcgcaggatatcagaggaagataacctatataaggttatggaaagtgataatttaatggtcacaaggctattaattggccgtgatggcaataaagaatcaaattcattccattatgattcattttatttgactgcgttgataggaataaaaactccaagcaatgagagtgctagtggtggtttgattgttgttaataagcttagagggaacgctattggaccaaggatgagttttttacaaaaagtgattattcagaatagaatatcaaaaaaaataatatccttgctcgtgagaaataagctaataaaatcccgaacaattatcctttcacctgggaaaatgcttgttttttttggggctagaacactccacgcaagtgatatataccctgatggaaataggataaccctgttacttcacactggattgccaaataataaatacaaaaaaatgagcggtagtggttttaaattaaaattaaaaaataaaatagcatcctaccagaataaatga

SEQ ID NO: 271122 - DNA, 828 bp, Klebsiella pneumoniae
ttgcgtaacgccgcactcgaactttttaacgacagactacctcgcaagccgtacttctcggacgatctgcgcttcggtgtgcgtatcgcggggaaagagcaggccatcctggccaagtacatccagttcaaccagcctcacgccatgttctggctgggattcgacgtcgatcgcgccggtgctgccatcgactggagcgatcggaacgcgcctgcgcccacactgaccatcaccaacccggaaaacggacacgcgcacctgctgtacgcgctggaaacttcgatacgcaccgcaccagacggaaaaatgaaaccgttacgctacgcagctgctgtagagaacgcgctacgtaaaaaactggatgctgatgtggggtattcggggttaagttgcaagaatccgaaccacagtcattggaaaatttccgtatggcagcctgaactctatacactggactggttagccgactcactcgatctgaacgccgcgaacgacaaagaaattgtcgctgattatggtttaggccgtaactgcgctctgttcgataaaacccgaaaatgggcataccgcgccatccgtcagggctggcctaagtatgagcaatggctgaaggcctgctatgaacgcgccagcgcctacaatctccaattttcttcgccgcttgatgaaaatgaggttattggagtggctaaaagtattgctaaatggactaatggtaactttacgaaagaatcatttgatgactatataataaaaactcacacaaaagatgttcagtctattagggggggagaagtcgaggtggtggaaggccgaaaggttctatag

SEQ ID NO: 271123 - DNA, 2445 bp, Klebsiella pneumoniae
atgattgaggctgaaacagggttacccattggtcacatgggagttcaatgcaaatttgttaagcaaagttcaatgcttagctggctgttggaagactcggtttacagcttctataaacagaactgtaaacattgtaatcaacgggttccggtgggatttcccaatattttagagtttgtaggcccaagagaaaaatctgccgaagaacgaaatttggctcgcaaagaagaagaaaggcagagaaagcagaagcagctcattagacaacaagaacgagcagtattacgtctttcacttactctagaagaaacgtttgtgcttgatttgcttgatgaactcgatcaagaggatatagagaacaacgatccccgtttggaacaacttgctaatctggcacctgagacatttacaagtaaaataattgaacacttgctgcctgcagtgttacatgagaaattgccatattcaatgccagcagcaaaagctttaataagaactgaattatcacaagcggaaaaactggcaatttcagtatatttaataaacaacttcgaatattgtccacctgctatagaagcaatcctcttggaagcagagaatctatctgaagatgatttcttaaaagtcctttaccactttgttagaatggctgttgaatctcctcctggaatgatgattggcacatttgagcgaaaagtacttaataaaggccccattcagtcactttttaaaaaaagacaagctgatatctgtgatgttgttgatgaatacataaaagagactcaccggggaaaatttcaatttgctattgagataattattgcatcggatgatgatgagctgcttctaagacatattagaagtatatttgctaagctgatgcgtcgacggactctactcccggaggagcggagagatagcagcattcttttctttcttcgggaggctgctacgaaatgcttagatagatttcccgatgaaagcgataaagttattcaatcctatcttgctgacaaagatgatattgggagacatgaggccaatagagcttacagatctgtactgcgaaataactatagaaaaaaaagtaaaacaggaaagacacaaaaaatagcttttaggcgtttgctctgggctgcagtggaaaatccagaggatagcatggatgatgcaggacaattctttagacactcttgggacgaatttgctgagcttgcagttgataattttgacgatttgatcggagcggctgcaacgctaagcgagaaatttgaggcgttgaataaagaaaaaatcatagaaataaatgagagttttctagatcatttagataaaagtaataagcgtaatgctattgatggcttacagggtgcattgattgaatgggctgcgattggagctaaatctagagggagcgaaggaatcgatgattttcttcagctctatagaagcttaccagaagaacaaactcaaatgcgtgggaacatgattgcccatgtttctaagttattaactggtattgacagcctaacactagtgctctctgattggtatcgtgctcttatggatgagagcacattgattcgagcacgtgccgtacaagcgtgggaaaatgttccctacgatttagtgaagaatttcccagatttattcttcgaagcatattcagttttgctattagatcaatatgttatggtgcatcagtatgctgttcgcgctttgagccgtagatcttttcctgaggagaaacggggacttgtgagatcccagctgtggaaactaatttgctattatgcccaacaagataaaaaagataatttcattgtagaatgcattgacgttttttcttctctttgcttatcagatgaagagagaaagggaaaaattggattgcttctttctaatatattattaatcttagaaggaagtgcactttatgatgctatcaatcgattgcgcttccattttgatgatattcccggttttgtcaaagtcgcactcaaagcaattcaggataagtatactcgcagtatttctattgatgactgcatctcagtgatattaagagcaccacatgatgagcttcgaaattgtaaagacgatctccaaaaagcatttaatgctctgaaaccatttaaacctcaacaatttattgaagcattagtgtacgtggctgcgttaagcaagtgtggtgataacgtaactgcaaatgtttgtttaaaggaactactggaagaaattccaaatgatgaaagaaatacagaatggaaacttaaggctgctttagttacagaagcagctagtattgaacatgccataagtgtttgcgaaccctataatgacttaattgaaaaatggaatggcctttcggctgagttggagaaagaatatgaagaacgagccaaatttcgagattttccgccaagctttttctccgagagttga

SEQ ID NO: 271124 - DNA, 723 bp, Klebsiella pneumoniae
gtgaaaagaaaagttgaaataaccaagaacagcttttttgagcttttttctgatgcaataactctttatgaattatcagctgcaacaaaaaaatcacacatcaaaaaaatacttgccaaatcaagtgtactttcaattaactacgctattgaggctgcagctaactcatttttatcttctatagaaataacgcaaaagttaaaagatcaaattgacaggttctcttcacttgataaatttgactatactcttcaatggcataaagacatatctttacctcgtggaaccactcaaacacaaataataaaagaattaatagcacaacgaaatgcattggtgcatcctaaggttaaaattttcactgatacaatagaaactaaaccgggtgaaggaaaaattgcttatcaacaccagtctaatattaatttcgagcaagctaaaagtaatatatcaggtatatccctcgatcctgaaacatatactgaaaaagatgcttttattgcgattaaggctcttgttgattttttaaattgctatgttaacgattggtggggtattgatttggaaacatctgctttactgcttttgccttcatggaacggctcaatacaagcacaatcaataatttatgagcagaactcacttgagactgttctaaggcatgatcctgcactaaaaataaaatttattgggttgcatggtatatttgagcaatttcaataa

SEQ ID NO: 271125 - DNA, 663 bp, Klebsiella pneumoniae
atgctcatcctgaagaacaatttccggatcgttagttgcctctgtatccatgctgtccatcgacaatcgctttgcgccaacttcgaaaccagccgtcttcagataatccttgtcaagctgcgccagaataaatccgccaacatcctcccattgcacgaatggggtaacagaagggtcattactgataaggctggaaatatactgcagcagtgcgtcaatcgcctgttgcgatggcattttacgcccggtaggctgcagcgttccggcgttatttatgacctcgatagcgagagcgctatcatccgggctacggtaatacgtggtcgaccccaccggaatattcgcgatatccgcctgcgccgcagccagcgtcgcatactggcggctgagaggaatcagattctgtcgtgtctcctctgtaagggcttcattcttcgccatcattccgcgccaggtatccagatcatcgccagcgcgatctggttcagtcagcgcagacccattgaccagcttatccaggcgctcggcgttatcgagcaacacagcgggagacgtgctccccagttccgggttaaaggccatgttttttgctccaaaaaagaggcttcgcccaaacgagggtttgagcgaaagataaagttgaaaggttttttttggtattaa

SEQ ID NO: 271126 - DNA, 249 bp, Klebsiella pneumoniae
atgaacgctgttgagttcgccattgagtctgttggtgggcaagcatctgctgcaaaaatctgtggaatatcggcagttgctgttcatcgctgggtgagaaatggctcacttccaagaactgagtacacgaaaaaaactaactatgccgaaaagttagcagccaaatcttccggtaaatttacctccatatggctgctagaaaacgctaacccagatcaacaacctaaagttaatgattatgtggcttaa

SEQ ID NO: 271127 - DNA, 324 bp, Klebsiella pneumoniae
atgagcgaagataatgactataaaccaatggtttataacaagttcgaaaaggataagcttcttgagtattttactaatcatacaaataaaaaagaatgccctgagtgcggatatgctgatttcgacattgtttgtataggggggaccaatgaaaatgaagttgtagtagatggagtaactttacgcagtctccctgatggccatggttttattatgtttaataaaatgtatatgcagttaatctgtagtaattgcggttatattaaattatacgatctaacagtaattcacaataaaatcaatgaattatacaatggaaaataa

SEQ ID NO: 271128 - DNA, 438 bp, Klebsiella pneumoniae
atggctgtcaatatcaaatctcctaagctagtatgtgataatacactaaaacatatcgcttttgatgaagagttttcttcgaaaggtggtgggagtggagggggcagcgatatgactgatcgtattgagcgactggaaaaaaaggttgagtcgattgacttagctttgtcgcgtctaaacgaaaccatgttgaagattgatgcaaagtttgaccgagttcatgacagatttgataacatcgaacaaagatttgatgatgtcaataagcgctttgatacgtcatctaaaggtgtaactgacaagatagataacgccacgaagcttgtcgaagccaataccaaaacagctatagctgatgctaagctcgctataattcttgccattcccgcaatcataggtgctgcgtatacagcttacaaattactcagcaaacaatag

SEQ ID NO: 271129 - DNA, 846 bp, Klebsiella pneumoniae
atgggtgatgtaaagtataatgttgatatggctgactacttgttaactcgcaatgaatatcgaggggcgttaagttttttaataatagcagttgctgcatcatcaactaaactatttcctccagggacagactcaattgataatcctcctaaaaaaccaggaagacataacgaaatgccagatggcgaaaagtttaagaggtttttagggccaagaatattaaacattgtttttaattcttcaataaaagaggatggaatgcattcttatttgccgaaaataatttctgaagcaaattcaccagaagagattatttataaagaatgcaggtgtcctttgattcacaatggagtcttgccggattcagttatttttgttgtggattctgaattaagtactgctggaatttcatttgagtattcagatggtgtatttaaattcaactcgggttttctaagtcttttgagagaggctgtggttggctcacacgtaaatgcaaatgaattcaatgtccatcatttcgaaccaagaacaaaagataatgggaatatatatgatttttattcatctgttggagaagatatagggctcacgcctggaagagttaaagtggtctcatatattttatgtgatatatataatgataatcctaatattactattcctgatttgattgaacggtgtaatttgaatatatcttctatggcaggtcatgctactttttcacaaaattcatggggggagggtgagcctctttgtacctatgaaggtaatgtaacagatacagcaaagaagtgtattgaaaaggtcattgctggactagattttgttgatattgggcggtaa

SEQ ID NO: 271130 - DNA, 357 bp, Klebsiella pneumoniae
gtgctgtcggcaggtggcggaaacggtaacgccagtgctgccattgctaatgccattacaaacaatgtcccgtttgcgtttgcagccaccctggactactcgaccctgacggcgacaaaagtcacgatcaaggacctgaaaaaagcggtcacgcagagcgctacggcatcattctctgctgctggttctggctctgccgggttgatgattgggtctgagctggagaataccgtatatggcgatacccgagtgctggagatgtccgtttggaaccgggtactgactgacgatgagatcgcagcgcagtacgcgcagacccagcgctactaccagtctattcacgggatcgtaatctga

SEQ ID NO: 271131 - DNA, 1161 bp, Klebsiella pneumoniae
atgaagggtatgcggaagattcgcaggggtaagaactttgctggtgtggtccaatacgcattgaaaccgggagcacatcataaatgcgatccagtcgtaatcgggggcaatatgctgggtgacaccgcccatgaaatgattgcagagttcgatagcaccaagcatcttcgccaggatgtcgcaaaaccagtttggcacaactcgcttcgcttacctgatggtgaatcattatcgaatgaccaatgggcaaggatagctgacgactacatgaagagaatgggattcagtgatactcatgttcgttgctatgtgcttcatgacgatccggctggtcagcacatacacattatcgcaagtcgcatagacctcaatggagggaagctctacttgggtaggaatgaaaaccttatcagcacacggatcattagtgaactcgaaatcgctcacggtctgacagtgaccaagccagccccttccattacaccaaagcaacagaagcgaagaaaagtttcccgtaatgaacagatgcttgcagaacggactggccttccctcccctaaagaagctctacaacagatacttgataaaagtttggcagatacacctgatcttttaacttttataaaacgactggaagaagctgaagtcggctggacggctaacattgcttctaccggtaagatgaacggcttctcattcgaataccgcgatatcgctttcaaggcatccaaacttggaaaggcatactcttgggtaaatcttcaaaagcagcttaactacaacccagatcacttagaagctctgcgaacaacaaagggagttatccctgctcctgctcctgctcctgctcctgctcctgctcctgctcctgcaatagttttgaaaaccgctgagagaaaggaaagtatcggtaaaaaaattgcagaactggaactacggctcagagaagacaaacggaacgaaatcgtagaaaagatccttcaaaagaatgcagccaaacagcaaaagcatctcaggctcaccggctggattccctttttacaacggctcatagagcttctcagaaaatatggaaagagcatcctccacaaggttcctacaaacttctcagaagtctattcaacacatcatctgaaacctacaagaaaaattcgtttatag

SEQ ID NO: 271132 - DNA, 555 bp, Klebsiella pneumoniae
atgagagcggttcgccgcaggtacaagcagaggtacgaggctgctgctgtggaagttgtgaacgaatttgatgaacttaagaaaatgtcgtggagcttggatcttgcatctttagatgacgtagaggaagcgaaaaagtggataggcacggttgatcctaacggagtaacaaggtaccccccgcacggcggctgggattggatgaagctctacaatggctatctcaaaagccctaacgcctttgtatacgccattaaagcaggtagcgacctatgcgccttatttggtggcggagtctctgacaataaagtcgttacaaaactacattatctcgaatcagcgccttacaagacgccgctttcaggatatgcgttggatatagcggttacgtacgttgttacggttgctgacgcgatggggagtgcatttacggccatctatgagccaaacaagaaggtaagagaaattgcgaaggaagactatggtttttctgaggataatttgtttggaaccagcaaaaactttgctctatacctgccaatgagccggatttaa

SEQ ID NO: 271133 - DNA, 321 bp, Klebsiella pneumoniae
atgcataatcagcatgatgtttttattgaggcaatacattctaaaaagaaactaagaattcggttctattctgaagaagatggcagctatatagaacgtatttgcgcaccaatggattacgctgcgggcactcgcatcaaagatgggatccctcgttactgggtttgggattttgagagtgataaagccaatcacactctgccattaagagctgaacgtattgaatggatgcgcgatgttggagacgtttttgatcctgctaccttcgttgtatggcgaccaaattgggtaatcgccagagactggggccaatatagttag

SEQ ID NO: 271134 - DNA, 225 bp, Klebsiella pneumoniae
atgctaaagtttccaaaaactacgaatgatgatgacaccccgataatcttacaggattatttcgggcctgatttcgaaatgagatctgcccctcccgttaaaatcgacaacgccaccctcgagctggcaagggcgattctcgaaggtcataaccagccagaatcgcaaattcaagagcgtccatggtgggagctaaacacccctataaaaatgatggacttttaa

SEQ ID NO: 271135 - DNA, 504 bp, Klebsiella pneumoniae
atgaagatgggcgaatttccacacagcaccggcgcccggcaaggtgggcggattcccacacggcaccggcgcccggcaaggtgggcggattcccacacagcaccggcgcccggcaaggtgggcggattcccacacggcaccggcgcccggcaaggtgggcggattcccacacagcaccggcgcccggcaaggtgggcggattcccacacggcaccggcgcccggtaagggtgggcggatttccacacgacagcggcgcccggcaagatgggcggattcccatatcgacatgtatgtagcttgtgttatccgtggattgtgcagctcagcgggtcgctggtcgtatggcgtagtgtcccccgtaaccggccgcgtgcggccgctaactcgcagtacggcgccgcgacccgaaggcgggccgccgttcccgcgcgcaggcgcgcggcgcccactgcgcacccccgtgggggacatacggcagctgtgtggcggtgagcgggattag

SEQ ID NO: 271136 - DNA, 624 bp, Klebsiella pneumoniae; identical to SEQ ID NO: 86487

SEQ ID NO: 271137 - DNA, 300 bp, Klebsiella pneumoniae
atgcggatgacggtggtcgatggtttcaaaaccaagtccgttgctgattgggcaaaacggcatattgccagtggtagcgcggtgatatccgatggattggcctgtttcaaagcggtcaaggaggccaattgtgagcacctgggtgttgtcaccaggggcaacctggactggctggatcatccggcattcaactgggtaaacacgatgataggaaatgtgaaaaactcgctgcggggcagttgtcataagctcggagcgaagcatttaccaagggaaggtgcgaacaagttcctgatatga

SEQ ID NO: 271138 - DNA, 615 bp, Klebsiella pneumoniae
atgaatgcgataatcattgacgatcatccattggcacgtatcgccattcgcaaccttctcgacagcaacggtattaccgtcgcggcagagctcgacagcggcgctcatgccgtgcagaccgcggaaagcatgcagcctgacctgctcatcgtcgacgtcgatattccggagctcagcggtatcgaggtgctggagcagctgcgcaaacgccgctaccagagaacaatcatcatcatttccgctaagaatgaactgttctacggcaaacgcagcgccgactgcggagcaaatggttttgtgagtaaaaaagagggaatgaataatatcctcgccgccatcgacgcagccaataatggctacagctatttccccttttcactggaacgcttctgcacccacggcatcaccgatcaggaccggctggatacgctgtcaacgcaggagatgaaggtgttccgctatattctcagcggcgtcgactacaccaccatcggcagcaaaatgaatatcagcaataaaacggtaagtacctataaggtccgtctgatggataaattaggctgcagcaccctgcttgagctatatgactttgcgcaacgcaataaaatagggtga

SEQ ID NO: 271139 - DNA, 789 bp, Klebsiella pneumoniae
atgctggccggagaggataacgccacatcagccgacatcgacacgctggaagacccgcgcaagcgtgcctccctgattggcttctcgctgatacgtctgcctgaccaggagaaatggagcggagacggtgccgggctcaaggccatcaccggcggcgatgcggtctccgttgacccgaaataccagaatccgtactcgacgcatattccggcggtgattctggcggtcaacaataacccgatgcgcttcaccgaccgcagcggcggcgtgtcacgtcgccgggtgattatccacttcccggagcagatagccccggaggagcgcgacccgcagctcagggataaaatcgcccgcgagctggccgtcatcgtgcgccagttgatgcagcagttcagcgacccgatgagcgcccgcgcactgctccagtcgcagcagaactccgacgaggcgctcagcatcaagcgtgatgctgacccgacgtttgatttttgcggctatctggaggcgctaccggagccggacggaatgtatatggggaacgccaacattatcccgcgccagccgcgcctgtatctgtatcacgcctatctggtatacatggaggcccacggctacaggaacgcgctcagcctgaccatgttcggcaaggggctctcagccatgctgaaagagtacggtctgaattatgagaagcgccgcacaaatcagggcatgcagaccaatctcgcgctcagggaggaaagcaacgccgactggctgccgaagtgcgacgaacctaccgcaacataa

SEQ ID NO: 271140 - DNA, 792 bp, Klebsiella pneumoniae
atgaacgtaacggacaccgtaaaacaggcgtgcggccactggccgcgcattcttccggcgctgggaatgaaagtgataaaaaaccggcctcaggcgtgcccgatttgtggcggtgatgcccgtagcgaccgctttcgctttgatgaccaggaagggcgcggcacatggtactgcaaccggtgcggcgccggtgacggcctgaaactggttgagaaggtgttcggcatatcggcacctgaggccgcccggaaggtgaacgccgtcaccggccacctgccgccggtagccccggaggtgattgcagccgcagacgccggaacggaggccgaccgtaaagcagcggccgcgctggccgtcagactgctggagaaaacgcgcccggccaccggcaacgcctacctgacccgcaagggctttgccggtcgtgagtgtctgacgctgaccacgtcgcacaaaaccggcggcgtggcctaccgcgccggtgatgtggtggtgccgctgtatgacgggactggcgcgctggttaacctccagcttattaatgctgaggggctcaagcgcaccctgaagggaggacaggtcaaaggagcatgtcaccttatcgacgggcagaaacaggccggtaaacgcctgtggatagcagagggttatgcaacggcccttagcgtgcatcacctgaccggggaaaccgtcatggtggcgctgtcgtccgtgaaccttctttctctggcgagcctggcccgcagcaacacccggcctgtcagattatcctcgccgccgaccgtgacctga

SEQ ID NO: 271141 - DNA, 597 bp, Klebsiella pneumoniae
atgaataacacgcttcttcctccctctgccagcgcgtggatgcgttgcgccgaagctgccacggcgaagctgtccggaatcacggtagccattcgcacgctgtggacgccgacggcatgcccggttgatttattgccgtatctggcgtgggcgctgtcggttgaccgatgggataagagctggccggcagagaaaaaaatagcgtcaatccagcgttcctactggcttcatcgccggaaggggacgtccggtgcagtacggcgcgtcattgaggatatgggtttttcggcgactttagccgagtggtttgagatcggtaacgagccggggacgttccagatcgaagtgaatgttaatgaggttggtttaacgagtcgcactcttgatgagttgaaccgccttattaatgacgcaaaaccagtcagccgccatatttcgcagatgagcattgctacacatgtcacgggatttatctacactggggcagcgctatatggtggcgacataatcagtatttacccggaagaatacgagccggatgacagtcttttttataacggcatggttttccatgatggaaataacagctacaggtga

SEQ ID NO: 271142 - DNA, 345 bp, Klebsiella pneumoniae
atgacccagatcgactacgatcgagaaatggcgttcgttgccgtcaggaccagcgcagagaagagcgagatcctcggcgtgacgcgggcgatctccgatcccgataatattgacgccgagtttgccgttctggtccgttcagatttaaaagggttaggcctggggcgaaggttgctggaaaagctgatcgcctatacgcaaagccatggcctgcggcgccttaatggtattacgatgccaaataaccgaggcatgataggcctcgccagaaagctgggattcaccgtcgatattcagctggaagatgggattgtcagcctgtcgctgcccctgaatccgggataa

SEQ ID NO: 271143 - DNA, 201 bp, Klebsiella pneumoniae
atggtgtggcttctcttaaagctaagaaaccatttacattcgaaaaatggcgagaagaaccagatgaaattaatgaacaatggcatcatcaatttcagtttagagaggacgatccagagcgcaattctcctggtcttagaaaaccccaactgggtgcacttcatgcaattgcaggctatttcgctactgatttacaggtag

SEQ ID NO: 271144 - DNA, 354 bp, Klebsiella pneumoniae
atgcatcatctgaaataccgtatccactctggccataaagccctgtgcatccgtggcgccctgcaggatcgggtacgctgccagcgtgtttacgttcaccagaaacgtagtcggtgtggccaccgggatattggggaaaaaggtctgcatcacgtcaggaggcgccggcagagactccggaaacgcgtcatcaccctgtccgtcaatggtgtaagagaacacggagaagccatactatccggccagctgcttcagcaccgggtcaaatttatgacagtagggacagtgtccctgcatgaacagcaccactttccagtcgcgcaggtccacctgctttccgttgctgagtcgtaa

SEQ ID NO: 271145 - DNA, 1629 bp, Klebsiella pneumoniae
atgggaggcggtatctggtactgccattcaatgatcaatgatgataattacgtggacgataacggctgccagattattaataattttggacaagtattacggcgaaaagatttgcgtgttatttgttctgatatgttcggcctgatgaatggcggcgattatattgaatgtcttagaaatatgtataaagcatcccggacattctgcatagaagaagtgcttattgcaaaactaccttttgggcagtctgttattgccgacactctttcagatggtagtaatgggtttgttgctgatgtttctgatggcatgaattttaccattcgtgggctaggtgtcgggactaacggtccccgcatccagcacaaaggcaatggcgtgatgatgcgcattaagcgcaaccataccagttcaaaggatttctgggttacgtgcgggttcgaatgcctgcgcgtggcggggagaaatgacactctcgacggcaataatacctataccggcgcaacacctttccaggtatcggacatgtggggctcgctgtttaaagatttatatatcagcggctatgacaataatactggcggcagcgcaatttctctttataacgatacagcatggacagagaaaccccgctttgacaatgtcatgatacgcggctctgtggtggggctgcgtctgcatcgcaatacagctgacggcgcaggggcgacagactcatttttttccgtaaccggcgagattgatatgaatgccggggtacctaatccctgttcttatgtccgggtgggcgatggaaccgagaaaggtaagtgctctatgtacagtgcgcagtttaccatccggggttggatgagccgatcctcatggcatactggcattgatattatggactacagctgcgtcacggggaaaatgaccttcatctgggacggttacgggctatcgtcaaatgccacaagtgaagtgctacatatcatacgtactcgaggcgtcaacgctcgctttgactgcgaggtgaccaatctctcgggccagttgttacaggcgcagcttaaactcctacagctaatctggaattcctgtctatacacccaggaaactaccgctaatgatgcctccctgaaacgagcctatccggtcatacgtgccaaagggatgaggataaattttgaaggaacattcactgcggccgagcgtatttccggcaagacctataccctgagttcgttattgccgggccagcgtttgcgagtgcgtctgcacagctttaatggcgataaataccagccgcaaatctctgaatgggatgttgaggtaagaggaacggatttcccctgtattgttaaaccactttcagggcaatcggcaaccatctccactaaagcaggcagtgcactggtgaatacttctggcgctaccgggagtttcctgactgaagtcacgataagcgacaatccgtttttgcagcatgccacacttggtaccacgacactgattctgacaaacggtcaggcaaataatagcgtctcatatgctgttaactctggtcgaaaaatacagattgttctacccgcaaatccggccgccacggaagatatgccctatgtagcagaaattgaggtgttgtaa

SEQ ID NO: 271146 - DNA, 228 bp, Klebsiella pneumoniae; identical to SEQ ID NO: 193597

SEQ ID NO: 271147 - DNA, 276 bp, Klebsiella pneumoniae; identical to SEQ ID NO: 193598

SEQ ID NO: 271148 - DNA, 165 bp, Klebsiella pneumoniae; identical to SEQ ID NO: 199685

SEQ ID NO: 271149 - DNA, 174 bp, Klebsiella pneumoniae
atggaaaatctcaaccaggcgagtgtgcagattgccgctttccagtcccgtgttcaggtccagcaggacgccttgctcgtggtggacagacaaatgagttacatgcgccagcaggtttctgcccgcatgatgacccgctaccagaataactatcattttggggggaatcagtaa

SEQ ID NO: 271150 - DNA, 273 bp, Klebsiella pneumoniae
atgagcctccgcatagaaataggtgacaaatgggttattaccagcgaccagtatcaattcatccttaatgaaaaaaaagtcgttaagtctggtaaaaaagctggcgaggaatggctcgacactatcggctattacccaaaaattaatcagcttatttccgggctgattcatcaccatattcaaaactcagaaattcaatcgctcaaaggtatggctgatgaaattgagcgtatcggagaaatgtgcgcctcatctatcaaggcggcggcatga

SEQ ID NO: 271151 - DNA, 585 bp, Klebsiella pneumoniae
gtgaaaacaaaagaaatgacaatcagccaacgagcaaggtattggcttgaggaaggttttttattcattgatacagaaactacaggtttgggcgaggatgcggaaatagtagaaatatgcattattgatagtcatggatctatcatgctcaatacgcttattaagcctacaaagcctattcctgatgaggcaatagctattcatggcattaccaatgaaatggttgcctttgcccctgcgtggacagatatatgcaggactctggaagagctatttatgcggtttgggtttgttatctataacgctgattatgacatacggctaattaaacagacttacgcattgcatggacagtcttctgtagctgcgccatatatgctcgcatataactctgtttgcgcaatgatgttatatgcagaatatcgcggtgagccggggaaatataaggggtataaatggcataagttggttgatgccgctgaacgtgaaggagtaaagcttgaggggcaagcgcaccgagctttagctgactgcaaaatgacattagggcttgtcagggcgttagctctggggggtgttgcatga

SEQ ID NO: 271152 - DNA, 573 bp, Klebsiella pneumoniae
  misc_feature (511)..(520): n is a, c, g, or t
atgcatcgtcttcatccctaccctgatgtgcaggtgatgtttcgccgcctgctgatcgccaccctgattggccttctcgccgccctggcggtggcgctgtttcgccacgctatggtggtgctggaaacgctgttgctcagtaataacagcgggagcctggtcaacgccgcacagtcgctgccggcgtggcgtcggctggttacccccgcgctgggcggcctgacggcgggaaccttactctggctctggcaacgacgcagcgtcgcgcgtccacatgccgccaccgattatatggaagccctggagaccggcgacggctgtttcgatacgccggcaagcctggtgaaatcgctggcgtcattgctggtcgtggtgaccggcagcgcgattggccgggaaggcgccatgatcctgctggccgcgctggcggcctcgctgtttgcccgtcgcttcacgccgcagagtgaatggaagctatgggtcgcctgcggcgcggctgccgggatggccnnnnnnnnnngggatggccagcgcctatcatgccccgctggccggcagcctgtttattgctga

SEQ ID NO: 271153 - DNA, 1269 bp, Klebsiella pneumoniae
atgactaattatgaagttaacgaagtatttggcttatcaagggatttgcctcttaattatatagagcgaactgctgttgatgataagctgaaacaagaattacaagctaaaaaacacattgtaatatatggtggttccaaacaggggaaaacatgtgtgagaaagcactgtattaactctaaggactatattcttgttcaatgttctaatcgttcagatgtttcagaactgaatgcaagtattctcaagcgagcaggttttgaaattacacaatcaagtaagaaaggtatcacagggaaaaataagatactggcttcgttaaaaacttctatttttggtttcggtgctagtgctggcggcgaagtcgaagatacaacatcacaggaaacgactacagcacctttagaaatagatgttgatgatgttaacgatgtaattgcggcattgaagtctataaattttaatagaattattgtgttggaagatttccattatatgccatttgagacacagcgagacttctctattgcattgaaggcatttcatgaaacatctgatattatatttgtgattgttggtgtttggttggaagataataggttgatagtatataatggggatttgactgggcgtattatctctgtcaatgcagataaatgggaggaagcggagctagagacggcagttgataaaggttgtgcgcttttaaatatcacttttgataagcagtttaagtcggatattgttaaacattgtttaaatagtatttatcttgtgcaagaggcttgtagaagggcatgcattaagtctggtgtatcaggaacgcagcaactcagcaaagaaatcgggaaagggatggatggcaaggctattatcgctgatatagttaacgaccaaaccgcccgttataattcgtttctaattagtttttctgatggatttcaggatacagagttacagatgcacaaatggatactttaccctgttctttcgtccacgattgaacaattggaattggggctgaaattcaaagatataagggcaactttgcaagatgtacaccctaggggggaaaagctgaatctaggaaacgtaactcaatcattgcaatcaactgcatctctgcaaatcaaaaaaaacattatgcctataattttagattatgatcagacaaacagaaagttgaatgttgttgacaaagggtttcttatttggctacagcatcagattatttctgaattgaaagaagatctagatttaccaaaataa

SEQ ID NO: 271154 - DNA, 135 bp, Klebsiella pneumoniae; identical to SEQ ID NO: 239987

SEQ ID NO: 271155 - DNA, 153 bp, Klebsiella pneumoniae
atgaggatagtgtattttgtcaatgcagcgtggtacttcgaactgcattggttggaccggtcagaagcggcaattagcaaagggtatgaagttcatcttgtaagtaattttgctgatgacgccatcaaaaataacctggaaaaaaaggtataa

SEQ ID NO: 271156 - DNA, 300 bp, Klebsiella pneumoniae; identical to SEQ ID NO: 271137

SEQ ID NO: 271157 - DNA, 1341 bp, Klebsiella pneumoniae; identical to SEQ ID NO: 217866

SEQ ID NO: 271158 - DNA, 219 bp, Klebsiella pneumoniae; identical to SEQ ID NO: 249344

SEQ ID NO: 271159 - DNA, 192 bp, Klebsiella pneumoniae
atgaaacttgcaccacaaagccgcgatatcctgcgacagtacaaagccctgattaatgcccgccgccgcgatgccggtcagcgggaactgaccaccgcgcaggtgatggatgaaatctgtgaatacatgacttgtcagtgtgccgtctatattggcggccatttcatccttcaggggggaaaggaacgataa

SEQ ID NO: 271160 - DNA, 1512 bp, Klebsiella pneumoniae
gtgcttaccggaaccatgctgttatgcataatgattgtgtttcagagagacagcattgaagaaagcacggttcagaataacatcgcatacgctcgtaagctggccgatactacagatcggtacctgacaattgcgcaaagtgagctgagatggagttctgggcagatccacgatctttcagcttccgacgaactagtacgtgaggcggatcgtttgaggctacagtctggcttttttaattcagttgtcattgttaacagcgagagggttgtaagagcaacctcgcctgaaagtctgggtttagttggaaagatactgacttcagatgccagtatcagagctgtaaaaaatcaggtagcttccatttctgagccgtttatttcggcttccggaaattatgttgtttttctttcacaacctattttttctgaacatggggtttatcttgggtatatgggcgggacaatttatttaaaaaaacatagtatgttaagtgatattttaagtcagcatttttatcccccagagactgacataaaaatagttgatggcaatggtatggtggtgtttagtcatgatcctgatacagtgggtactgttgaaaatatttcccctgaaattcattatcaacttaactcctcgcaaagtggtaagctcagtttagctaataataatagggattatgtcgctgggtttgcacgactaagacaaactgactggagtatctggatttccggaagtgaaaaggaggtcgatgcgttagtcaaccattcggtaaaaaagatcgttggattcattaccctcgtcgtattttttgtcgctattttaatgatatatcttggtacactagtcgctacccccctggagcggctggcaaatgctgtaaaggctggtagtagccagcgtagcgatccttctgtactacaaaatatcaagggttggtactatgaagctcaggaactcaaagaggcggtaaaacaaaattcaatatctacacagacgaaactcaaagccttcagcgagcaggcgataaaagatccacttacagggctctacaacagacgcggttttgagaaaatgtatgagtccatttcctcaggaaagcaagtaaacattattgcaattgatatagatcactttaaacaagtaaatgaccgattcgggcatgatgctggagataaggtgctgcaagagcttgcgactcttttgaaggaaatatgccgggaaaacgactttatctgtcgatttggcggtgaagagtttgtaatcgttatacctgaaaaaaaatctgatgaagtaattgatattgcagagtgtatccgaaagcaaactgaaaccactatttttccctttgtgggacatttgacattatcagcaggagtggcgtcttcccaatatttcggtgaagatattaatgcgttactcagacgcgcagatgaatttctctacgtagcaaagcggtcaggccgcaatgcagtagtctctgtacaaaacaagtatcaatttaactga

SEQ ID NO: 271161 - DNA, 297 bp, Klebsiella pneumoniae
atgaaacaggtcaggatttatacactcaaagatacacagtcagcagaaatttattttcacagacactggccccggcacatggtctcccttcccgcttttaatatatatgtaaatcatgtctatctggggaatgaatgtcaggttattgcaacagtgacttatcagaaagacgctgatatacaggctataaatcagaagtacatgaacagcgatgcgttcatgtctgacatggaaggtttcgacatgtcttctatcctccgggtggatgaaatcagcattaaagaagcacttttctga

SEQ ID NO: 271162 - DNA, 231 bp, Klebsiella pneumoniae
atgaacgcgagtttaaggcatgttctgcgatatacaggagtcccggttgacgccgctgagcctgtgcgccggaagttcggtagccgcctgatattgatcgtgacggttgctcttcttcctttgctgattgttgatatatctcagtgtatatttgtgctttcacagcttatgtggggtatcggtatgtatgttggtatttctgtggcaagtgacaaacctgagcgtcggtaa

SEQ ID NO: 271163 - DNA, 903 bp, Klebsiella pneumoniae
ttgattaatgtatttggtcaccttaatcctgacagcgacgctgtctgcaccgctaccgtgacggcgggctggctcaaccggtgtaaccgtcctgcccgagcctggcggcctggtgaagtgaaccctgagacacactatatttttgaagctgccacgctaaccctaccgcccttgcttgatatctcactgaaagatgaacctgtatggctggtcgattttaccgaaccggctcaggggcctgctgacctttttcagagcaatatcatcggaattatcgatcatcaccggctgggcggtctgatcacccaattgccgccagaggtctggataaaaccggcaggcagcagcgcgacagtactctggctactgatggatacagaaatgcgccgtactatgcccccggcccacgctatcctgcttcttggcgcgttgctcagcgacaccgttaatctgtgctcacccaccacaacacaagacgatatacgttccgccactgaactctgcgtcctttcaggggtaaaacgcacggcttttgcccgagggctcctgacagctaaaaccgatatcaccggaatgtctgcagagcagcttctgcataaagaccttaaagccttttcgctcgccggtatgaatgtacgtatagcgcaactggaggtcagttcacctgaccaggtaacccctctgctggatgaactgcaaagtgcgatggtgcagttggcagtcatgacggaagccgggcttatcgtactgatggtcactgatattcatacatgctgttcttcactctattttgccgggccggagggtatcagcgcggctccatgtttcgtaacgggtatggtaagccggaagaaacagcttctgccctggctcgaacaccatctcagtcaaagccggagatag

SEQ ID NO: 271164 - DNA, 426 bp, Klebsiella pneumoniae
atgaaaatctacacacatgcacttgttcttgttcaggggaaagaggatggcgtccctcttctcgcactggcgacaacactgtccagtatgctgcaaatgaaaatcaccattgctcatatctgtaacgactaccgggagatgaactacatatcggacagtctgatgaacgatgccgtatcgaaggaggttgtcctggcgaaggcgctgctcagcgagctgacatcgtctgtagctgagcaggttaatgcgagagaactggtcaccatgcggcgattcgaagatgtacagaaatgtatcaacgataccggcgcggacctggtgatagctggccaccgcaaccgttttatgggagcactgacgtcccgttcggctgaatacgttaaccacctgaacgtagacgttttgattaaacatattcatgactga

SEQ ID NO: 271165 - DNA, 1290 bp, Klebsiella pneumoniae
atgaattttctacttgaaaaagtcaccgcccgcgaaattcttgactcccgcggtaatcccactgttgaggtggatgcttttacttctgacgggcagatggcgcgagcgtcggtaccgtccggtgccagtactggttcaagagaggcaacggagcgccgcgatggggatacaggtcgcttcagcgggaaaggggtccgtgatgccgttaaggccgtggagacagaaatctacgacgcagtcaggggaaccgatgtgcgggagcagcggcgcctggataatctgatgcgggaactggacggcacggagaataaaagccggctcggtgctaatgctattctgggtgtttcgctggcggtggccagactggcttctcaggtcacccgtcagccactttaccgctatctcggcggactcaatgccagtcttttgccggttccgtgcatgaatattattaatggtggagttcatgcccgtggtcagggagccgattttcaggaatttatgatagcgccgcacggtgcatcatcgctgacagaggccattcgtcagggcagtgaggtctatcaggctttgcgccagatccttctgtcccggaacctctccgctgcggtgggtgatgaagggggatttgccccggccgtatcttcgaaccgggatcctctggaattcattgttcaggccattgagaaagccggctaccgtccaggggaagatatcagcatctgtatggaccccgcatccagcgaattttaccgcgacgggaaatatcaccttcgtaccgaaaacagcgccctgagctcagaagagatgacggattattatggtgaactgatgagccagttcccgattgtcctgcttgaagacggtcttgccgaggatgactggaccgggtggaaatatctgcataatacacttggcggacgagcggagctggtcggtgacgaccttttcgtcacgaatgtgaagtatatccaacgaggtattgaagaaaaccttgccagtgcagcgcttatcaaactcaatcagattggtacgctgagcgagacatttgatgcggtttcactgtgtcatgaaaacggatggggtgcctttatttcgcaccgcagcggtgaaaccatagatacatttatcgctgatatgacagtggcgttgcgtgcagggcatctgaaaaccggcgcaccttgtcgtggtgaacgcattgaaaaatacaatcagcttatgcgcattgagcaggaactgggtagtgacgcgcgttatgcaggtattaaggcatttgttcgccgtggatga

SEQ ID NO: 271166 - DNA, 525 bp, Klebsiella pneumoniae
atgggaccacggtcccaactttaccgtcagccccggaatgctgcctgggaccatggtcccaacttcccggtcagcgccggaatgctgcctctgggaccacggtcccacctttaccgtcagcgccggaatgctgcctgggaccacggtcccacctttaccgtcagtatcggaatgctgcctgggaccacggtcccacctttaccgtcagcgccggaatgctgcctgggaccacggtcccacctttaccgtcagtaccggaatgctgcctgggaccatggtcccaacttcccggtcagcgccagaatgctgcctctgggaccacggtcccacctttaccgtcagcgccggaatgctgcctgggaccacggtcccatctttaccgtcagcgccggaatgctgcctgggaccacggtcccatctgcaccgtcagtaccgtcagtaccggagctatacccaagaccttcttactcacacatcctgttgttttggagaaaattaatgctgagcacatctattaatcattga

SEQ ID NO: 271167 - DNA, 165 bp, Klebsiella pneumoniae
atgattactcaaaaacaaaaaaataccggagaactgattaatatatttttcggccaattactcaccgaaatggcggtgcttgtaataccagatatcctcaagatcctgacaggatttgggtgtgagtttaacattttccaccggcagaccttgtgccagctttaa

SEQ ID NO: 271168 - DNA, 1506 bp, Klebsiella pneumoniae
atgaaaaatttatcgatggtagattcttttggaggcactgatgccgataatgatgatattttactaaaagcctttgaagatcatgaagcatatcaagatatattgaaatttaagcgttttttggtcgtaggtaaaaagggaagtggaaaaacagctatttttaaaaaaataatagctaccagaacacatgatactttttcatttggccacacattttctgattacccatggcattttcaccaacagcaggcaaaagctggaattccaaatgatgataagtttacacatagttggaaatatttaattcttatttcattggccaagataatactaaatcaggataattctttaccttgcaatgatttatcccgtgtttctatacaaaagcttgaagcttttattgttgatgcatatggaagtcgtgaccctgatttaactcagatatttaacccgcaaaaagagataaaattaaaacctcattttgagttaaatttcaaagttattaaagtaggttcaagtgctgaaacaatatctatcgttgacttgccaactgttatccaggaggttaatgctcagctaatgaaattagttatgaattcacttaatcctgagcataaatattttattgcatttgatcaactcgatcttggatttgatagcaagtcagacgattacattagccgattgatcggtttattattagctagtcgtgacattaatattgctgcaaaacatgccaatgtaaatttcctagttgctatctttttacgtgacgacatatataacattttacgttttgaagataaaaataaaattaccgaaaatttcatgtccttaattgaatgggatacacctcggacacgtaagacattaaagttgttaatggaaaaaagatttgctattgttgcaagtgaaattggggaaggggataatattaaatggagtgatatattcaacgaatcgagggagatgcctggacatcaaagtaagtatgatcatattaaagaccgtacttatctgagaccgcgagatatgattaaatttactaatagtgctttggctaaatataaagaaagactgcagaacacttcaactggcattcctgatgataaagaaaaaatagataatgtcgatgttcataatgccagatatgattatagcgaatattttctgcgagaaattgatgatgaagttcataaacatttccctgaatatgaaagatatcttgacgttttaagggccatcggaacttggcaatttgataaatcatcctttgaaagtattttatcgcaagtttatccacgaagtgataaaacagcatccgaagcacttgaggaattatatgattattcattcatcggtttttataaagctggaggaagtggctatgggggatccgaatacatattcaaatacagggatacacgtacgtcattttcacatgcttctaacagattccggatccatccgggattaattgaagtattaggccttaaaaaggtatag

SEQ ID NO: 271169 - DNA, 3210 bp, Klebsiella pneumoniae
atgcttaaaaaaatcctagacagcattagctaccagacagataagttcatccgtgaaaacattcatgtaaatcaatcttacatggcactgaaatggaacagctttgaaaaaatactggtctcaggttcaaagcattacgtaaaggcaatgcttatattgatatcattgtttgcggccattttcattgtaatgatctcaggtaaaagttatataaaaccatttatagctgagtggtttcctcattggtataccctgtttgacgcccagataaacctcctggggggacagcttaccattataggtattgtgtatcccatggtcgttggccttgtcagtgttatatttcagagaaaatcagcccggaaaattgtacacgcagcttatcagacctattccggattcatgctggcaggtctgagcgggttatgcctttccggcttcatgctctgcggattactgctgaggacattcgttgaaaactataactacgcgataatttgtggaataagtattatatggatgatgcttaacattgcgctttctgtctggttctttgtgcaaagcctcagtgtgcttgacgatgaaaaacgcgaaagaatggtgttacgttatctcactgccgacatcttatcaacgcatgtgagaagtcaactgcataacatttttttaaacaagccggttgaaagccaaattatcaaaaataataaatacagcaacctgacctttgaggattattctttcgaaaaagattactcagttatcagtagtgaatcttcaaagcaggaagtcattaaagatatctatgtgcggccattgaagattattctatggcatataaatatgtatggtcacttaaagaaaaaacaaatagaaattgcgttgttttcgaagctggatagccgggatgagttcgatactctaccactgtttaaaattaaaaatatcgagtcagaccatgttctggtaaatttattaacacgttgtttccgcacaggcattactgcaaaacgtgatatcgcaacagacagaataattaaaggagttttaggtgataccatagatgcgttagccagtgctgatatcaatgcttttgacgaggctattgatggattctgtcgtgacataacaacttttacggacggatttaatttcaggcaagggcagcaggcggataatcttttgttattagcagatgacattttttgggatcgaagttttactgataaattatatacagagctttatcagcttttccggcaggcagttatacgcattgatgtatctgagcggttttatacaaagtgtatgaatgttccaggaatgctgtgttctaaaagagaaagcatttccttcaaagaaatacagcttgctttgaggtataccttttattcctgggacatcctcgtgcgctggggccatgccaacacggggaggcttgatttaacccagcgtcagagctacgaggcccttttgagggattttgtcgaaatctgggaagggtggactgatgatctgaaatacatatccaaaaaaaccggtggtcagcagctataccatgacactctgaaagagcacctgttcaccttacccgacatagtcgcatgtgcagtgctgtccggtgagtcagactctgtcgactgggctgtggacttaatgaaccgctggcttcatactgcccgtgggtctgctgatggtcataatactgcactgttcagctggcaggagtttgtcgttacacaggcagctctggatggcgaaattgttttcagtcaagaaaatacgccattaagaaaaccggttgcactttcgcaactccaggactcattctataagaatacactgaccgatcttcgactcttgacagttgcttttatcattagcaaacccgatgcctttcaaaacacacaatgtcagtttgctgtccgtactttgcttgacgggagtcttgtcgaaaataccggttgttttgaccgtgtatctgaaaaattaaccagaagttcagacatcatcgacgtttttatccgattgcttatctggaataaagctgaccgcgatgaggcattaaattcacccggaaaaattataaggaaattatcatcagcacatggtaaaagcctggtaagcgggcgcacctatctgggaaggcgcctcgggggaattgaggatctcattcctcagatagcggagttgtctgtattgcgttgcggtgatacaaattctgtttcacctaaaatgaaagcaattgttgcttctaatctattaccatatcaatttctgcagaaaatcgtaagtaatcttgcatcactgcataacgccatcaataaactgaccggtgcagcttttgttgctgacgatgcttttaccgaaaaacaacagaaagtgtctgacttgatacaagagtatcttgacctttttaccaatcatattcagcaagaaataatacactctccagtcagcagtacagttcttgataactttggaagtactatctcggacattttctctaaaaatttaagcaggaatttattgttttctctgtttgcaaatattacttctgccccagtagagaacagtaatataatgagacgcatctttttccccatagataagcaggatgtgactgacagattttctcaaaaaacacacggatttgaagaaagtcttgcatccacattgatcaacaagcacgtacttgatttgttacatttgctgagtcgccaacccgctcaacggtatattgatgtggcgtcgttcaccgaacttctgagtgtggtccatgattacgatggcctccatgaagatgactatctcattgtgggcgatgaaagattatggaatcaatttattgagtacagagcgaatactatagatagtatcgagggtaaagaagatattttgttttatgacgaagaccgaaaggtacagatccgtgggaaagaaaaaagctgttcgctctatatcaggcctcattttgatgctattgatgccctgcttgtgaataaaaactattttgaagagtacaaaatcaaaagtgagggagacagcattttcgctttcagtgcaaaggaggtggaaggagaaccactacaagtgacgttgcattctcaatatgaaggagaagccgttttcagtggtcagattaagatccgctttacactccgtaatgactctgtcagttcacaggccttgcctggtgaagacgcatcatga

SEQ ID NO: 271170 - DNA, 1167 bp, Klebsiella pneumoniae
atgacttttggggaaaaagaaaacaatactgctataaagagattgagaacagagctggccaatattagacacgatggtaaccttgtctctctactgtcccttctgactgaagaactcattaagaacactcccgttataggtaaaccctgggaggtaagcagtaaagtgcttaaaagactcgatgatattgaaaagaatgagcaggcagagcgtattaatcattatattctgggcctcagtaagtttagtcgtgagcaaatggacggagatctgggttctgcagacctactggctatcctccgtaggctactggaggacgatgaggccgggaaaacgcgtttttatgtccggctaacggtcagtttggctgaaagtaaactggatgcggatcaacggatacatttcgtgagactggtcagtgcattgactcttcatcagatcgattatgcccgtgagctgtatatccgtaagacaattccgctgcaagggtatgacactgaggaaatgaccgaaagagcgctgaccgggcggacggatggcatgtcgcgtcaggctctgaatacattgctgaactggggattgctgacggagagggaaaacaaactaacttgggagaagaaagagtcttctagctacagactgaatgaggatttcaggctgctcgtggcgtttttgtttgatgaaaaggatcgacagccggtgaatattaatgagcaggccaaagagatatacgatgttatcctcgtccgtaatcttccttctgtcaataacttgtacgagtcgtacataaaggaaaagctccaagagcagggtatacaaactggaattgtagaacggacgggaatggtagaagggcaggtcattgttggcgcgcacatgctcaacacgtgggcaccatactaccttcatactaaaatcctgaaggtaagtagtaaccaattgaatgataaggaatatattcaaattattattacccgaaatgggcgtgaaccactaccgaataatgatcttaacgtacgcgcattcaggatagacaaacacatttttgggggcacaggtaaaaacgaagctaaggccgcttccaaactacagtccgaactggacagcatcatcaaatttattttgcagcttcccaaaaggcctgattatggctcagcccctgactga

SEQ ID NO: 271171 - DNA, 177 bp, Klebsiella pneumoniae
atgaacagaacccgtaacgaagtccggtcacgctggctggcaagtcgggagccatctcagcgtaccggcgatgaagctctgaaattcttcgatgaatgctgggcggatggtcttcgtctagcgaacagacagttaagccagcagttcccgaactcaattctcatctggcagagctga

SEQ ID NO: 271172 - DNA, 138 bp, Klebsiella pneumoniae
atgaagcaaattaaagagctgcagcgcctgctgggaaagaaaaccatggaaaacgagctgctgaaagaagccgttgaatatggccgacaaaaaaagtggatagcgcacgtgcccttgttgccggaggatggcgaataa

SEQ ID NO: 271173 - DNA, 993 bp, Klebsiella pneumoniae
atggctgagaatataactgacattgctaataatggattgagctcattttcactgacacatatccgatctaagaatattgctgaacatgttgtcaatattcctggttggtcactacattataaccagtttactcagggaaaattcgatggtcagttgaccgttctggagttagaaggcgtccaactgattcgcgagcgcacaacccaagcactgttaaaggaaggtcaggctgttaaaaatcagctatttacctttccactatatacgccatcagatgccttttactgtgcaggccatcatattcatcgtgaaagcctgctggttgcacagtcaaactccttgcctgaattacgagcgccggaagctgtcgatttactcttaatcagcgtagagagggcctgttttccaactatttttgacgactttgatgagcgaacgctacgcgcacctcgcctctttccgctggttaatcatgataatctcctccgttggcgtatactcagcgacagtcttgaagtcaatgaaagcaataacagcaacccttcattactgacattcgcagcggtgcgtcaggcgattaaagacaccattcttatctatatatctgaaatgattgaacctgattctgctatcgcccttacctataacgccaaaaaacgcattgttgatcgtgctcgtgaatacatgatagcgcactgtgatagccccccttctattctggatgtttgtaaatatgcaggggcgagccgccgtaaacttcagtactgcttccaggaaaccctgggaattaatcccatcagctatctacgcgtattacgtctcaatggtgcacatcatgacctattagagggagcaataactgtgcaagacactgcgtgtcgctgggggttctggcatctcagccgcttcgcgaacgactatcgccagctttttggggaaaatccatcaacaacattaaatcgcgccggcaacaattttgctaaatctggataa

SEQ ID NO: 271174 - DNA, 930 bp, Klebsiella pneumoniae
atgaattatcaccggaatatcactgcaattaccttcttttcttcattttttcttgccatgaccgtaaactcggccatggcaacagaaaatggaactccttctactgccgcaggaacctatgactttggtgctggctttttacctcatacaaccgacctgggaacgtttggctcccgcgtggcgtactacagtgcacatgccaatctcgataacgctggcaacaaaaaaaatgcaccgttctctctgcaagtactctctatgagcctggcctggcttaaaatgacaaataaaacgctattaggagggcgttacggttttggtgtaattcagccgtttttcaaaatggacacggacatggtcgcacaaacgccaattggtccattatcactcagcagtgatgtattccgtcaggcagaccttcaggtcatacctcttatccttggctgggtaccctctcaaaacttctctatcaacacccaaattcaggttcaggcaccgactggcgattatgataaaaatcgtttagtaaaccctggactcaaccattgggttttttctcctatgctaaatgccacctatatcacaaacagcggttttgagttttcatcgagttttcaggttgatttcaatacaaaaaaccaagagacacattatcgaaacggcacggaatatcgttatgaatatgccgcaggccagcacattggtaactggacagtaggtattggaggctactactacaaccaattcagcgatgaccagagcaactcgctaacaacaggcaaccggtctcgaacatttgcctacggccctgcggtgagttacttctccccaaacagtccctctttctgggttcatgcttacaaagaagatgacagtcgtaaccgtacccagggttacaccatcgctttacgtattgcacaaagtttctga

SEQ ID NO: 271175 - DNA, 1212 bp, Klebsiella pneumoniae
atgtcgataaccacatcaatacatcgcccccgcgcgagcaaagaaggggtgattcttatcctgggtagcagcctgtccattatgggctcggtcatgattgctacggtgatgccgaaaatagccgctgaattcggcatcacaacgcctggcgcgaatatcttaatcccattaaccatcacagggccggcgctagccatggcagtgtgttcgccaatggttggttggttggccgaccgatgtggtcgcaaaaatctgcttattcttgccacgctactgtatgccgttaccggcatgttgcctgcattgctgagtagtcttaacggcattgtattcagccgactggtatttggtgtctgcgaagccgctatcatgacctgctgctcaaccctgattgccgattattggcatggccatgagcgaagccgtttcgttaatttacaggttgtctcgattggttttgtcggcgcaatatttttcatcgtcggcggtgcgctgggcgaacattcctggagaatgcccttctacctttatctgctaccactgctgttagtcccatttatgattaagatactttgggaaccgataactcaacatattcctcagcctcattcgcaatcagaatcccagcagataaatttggcagcgctgctggccaattatctactgatctttggcggtatggtactggcattcgttgttcctgtacaaacccctgcgctattagtgcagacgggtgttacatcgagcacccttattggcctctctgcaggtgtgggattactggcttcactggtgggctcgttactgtggccactattgcgtgggcagtttggcattatgagcgttaatgtcttactactgtcgctggcaggaattgggctgtggttattggttcacgcaacgggttatccacacattctggttgcagtgtttatccatggtgtcggtatcggcatgctggtccctaacactatgcttcccgtaatgaacgcattgtctgaaaaacatcgagggaaaggcatgggcgtgtttacaggctgcttgtatatcggccagtttgttagcccattgattgtggcgacattggcgggattgactcaagggctcgtgggcgcaattcaaattttatctattgccagcttcggtggtgccttgttgtggttggtctgtgacctaataaaacgcgtccaccgagtgattatcaaccgctaa

SEQ ID NO: 271176 - DNA, 1449 bp, Klebsiella pneumoniae
gtgaaaccaatccaacacattctggatactgaagatggactggggcttgcccactatgtcaaaagtggagacgttacgccaggtgaactacttgaaggcgttattgaacgtttgggaaaagtgacccctcatattaatgccgtcgctgaaacactattcgaaagcgcacgagaagccgcaagaaaacctcaattaccgacgggaacatttgccggggttccaacactggttaaagacttgtttacctccgtgaaagaggctcgaatggctaacgggtcactcgccttgggtgatgcacatcctggattagatgatgagttagtatcacgttatcgtaaagccggtattatcattgcggggacgtcaacatcacctgaatttggttcgtcctatacgacggaatcaacacgcttcggcgcgacacgcaacccatggaatttggcgcatagcgccggaggctccagtggcggtgctgcagcgcttgttgcggccagagtcgttccttttgcgcatggtaatgacggcggcggctccattcgcgttcccgcctcctgctgtggagtatttggtttgaaaccaacacgcggacgtatgcctaacgggccattggtcggagaaggctgggcaggaatgggcgtatcgcacgccattaccctatcggtacgcgacagcgcggcgttactggatatttctgcaggttctgatctgggagccccctatgctgccccctatcagtcctcccccttccttgatggtttgtcgcgaccgcccggaaagttgcgcatcgcgatgatcgaacatttatcaccgtggaccaccagtaaacaggcactggagagcgttcgcgctaccgcagccttgtgtgaacaattgggacaccacgtggaagtagtctcgctacctgttgatgccgaacagttctacagcgatgtatttaccattatcggcgttaacacacaggcgtatgttgacatgctgggtcatatacgcggccagccagtgtcatttgaggaattagagccgagaacccgcgtgatgttacgggagcgtggtcgcgtacccgggactgactatgtgaaagcagtgaatgccatgcacacgctgggacgtcgcttcgctcatttcatgacgcaatacgatctgattctcacaccaacgctgacacaggccccgccactaatcggcgagttggatgcctttgatgatacactgcgtgtacgtgatgtcattgaagggtttcatcgttattgtccgtttaccgcattatttaacgctaccggccagccagccatgtctgtcccgctttactggacgcaggaaggattacctattggttcacactttgcagcccgttttggtgatgagcaaacgctgttgtcactcgccgctgagctagagcgtgtgaaaccgtgggcgaaacatatcccctcgataaatgcgctaagttaa

SEQ ID NO: 271177 - DNA, 1383 bp, Klebsiella pneumoniae
atgaacaacgataatggtttacgcaaaaatacgttgggcttattttctctggtcttttttgtggtagcggcagcatcgcctttgactggcgtggtcggtggcctaccgatagcaattatttccggcaacggtggcggcattccggtgttttatattctgtcgtgcattattttgatgacatttgcggtggggtttatcgccatgagccgctacgttaataatgcaggtgctttttatacctacatctctaaggggttgggtgaccactggggagcatcagcctctgtgctggcgctgatagcctatgcttctatccaggtggcgattgtagccatgctcggattttttgcacagcagtttttggaagttcatgtcaacctgcatcttccctggtggactctgagcatggtattcacggtggttgcctgggtgctgggcatcaagcgcgttgaggtggggggcaaactgctgggcgtgctgatgttggctgaagtagccatcgtactgttgactgacgtcatgctgctggtaaagaaagctggtccctacactgtcgaatcgtttgaaccgtcggtgttcatgcacggtaacctcggaatcgccttcatttttaccatcgcttcttttatcggttttgaatcaacagccatttacgcagaagagtgccgtgacccgcagaaaaccgtaccacgcgccaccctctgtgccttgttcctgattaccgcctttttctgtttcaccagttggtcactggtgcaggcgtatggcttcgatgacatcatcgccatcgccagcaaagaccccggtaattttgtcttcaatattactcgccagtatgtcggacagtgggcggtcgatagtatgtcggttctgttgatcaccagcttgttcgcggcatctctggcatttcacaacaacatttcgcgctacatctttagtatcagccgtgatggcctgatctggaaagcattgagcaaaacccacctgaccaacggcaccccgcataatgccagccatctgcacagcattatcctgttgatgttgctgcttggaataggaagcgtgggtctggacccgatggtgcaaatttttgctatcggttcggccgtcgcgaccctgtgcattctcattttgcaattgggcgtatcggctgcagtggtgatgttctttcgccgcacgtccaccgacgatagccgtctgcaggtattctgggcaccgttgctgtcggcgatcttcatgtcaattaccattgttctggtcgtcaccaatctgcagttcttgagcggcagcgattccctcgtggtggagacgatcccgtggtttattgcagcctgcgcgctggcggggtattacatgtcatcactacgtaccatgagaatctaa

SEQ ID NO: 271178 - DNA, 834 bp, Klebsiella pneumoniae
atgcctgaaaattccctttgtcgccctacaggaagttttctcccggaacagccgtggtttgtgctcaatgcggcgcagcattattcagtggccgcctcagaaaacccggcaatttcacatttttacagcttcgatgtggcgcaaacggcggggatgacgctggcagtgcctgatggttgtgttgatatcgtttttgattgcgattcgttgaatcccaaaggtcgcgtatgcggtaccacgctagaagctcgtggtacagacatgctgcacaaccatcattatttcggcgtgcgtttcgcgccgggtgttatacctgattttcttgatgtgatggccgaggagatcgccaaccgtgaactcaactttcttgacgtggtgccagatgcccgattggcgtttgaacaaatcgtgcaacagcgggatttttcacggcaaattttattatttaatacccatttcacaacaagtctggtgcgcaagtctactcccgttactacctcaatcattcgggcaatggtgcagcagaaggggaatatccgtatcgatcaactggaaatattgactggctacacgtgccggactattcagcggcagttccgccaggacaccgggctatcaccgaaagcatttagtcgtatactgcgtggccagtcagcactgcactgcattcattcacaagaagatatttcctttagcagcctggcgtttgaccttggttttagcgatcagtcgcactttctgcgcgaatttaagaaattcgtcagcatcacaccgtgcgattatcagcggcacattgcagacgatgcgttattttatcgcctgcgctaccactga

SEQ ID NO: 271179 - DNA, 423 bp, Klebsiella pneumoniae
atgacacgtatcattaaagtaaaaactggctcgaagtttgaagaaatgggcagctactcacgccttgttgctttggataactggatttatgtctctaataccgcgggtcgcaatccggtcacccaggaaatcccggctgatgtgagtcaacaaacgttgcaagtgttcgccaacattgaagcagcactcgccgccattgacacctcgctgaaagatgtcgtgttctcgcgggtatttattcaggatcctaacgatgtgcctatagtcatggcaatcataggggataagtttcggggcatcaaccctgccaccacggtaacctgcccgccgctgggttcgacggtttataaagtggaattggaggtcacggcatatcgtggggcctccagggctaacgttcaggaactaaccgttgcgctgtaa

SEQ ID NO: 271180 - DNA, 1293 bp, Klebsiella pneumoniae
atgtcaccagaaattatccctgttaccacgtcatctgacgttcctaagtccaccgctatcgtcattattggcggtggcattgttggtttaaccgctgccctgacgctggcagagcgaaacattccggtggtggtgctggagaaaggacgtatcgcaggcgaacagtcatcacgcaatctgggttggattcgtaaaaccagtcgtgctgccgatgatattccattggcgcaggccgctgatcgcctgtgggctgaaatggcggcacgcgttggctgcgatgtgggttatcgtcaggcaggcattatgttcattgcccgcagtgaagcgcagatggcgctacatgaaagttggtataaagcggtcgcaccgcttgcgctggataccctactgctcagcagagcagatatcgccgagcgagttccgggtggaaaaggtacatgggctggggggatttttaccgcttccgatggtcgtgcggagccaacactagccgccagcgcgattgctcgtgctgctatcgccaaaggtgcgatcatcgtcgagcagtgtgccgtgcgtacgctggaaacaagtggtggccaggtgagtggagtagtcaccgagcgaggtgaaattcactgcgagcacgtgctactggcggcaggcgcctggtcgcggcgttttcttggtaatctgggtattgcgttacccacactgccactgatttgttcggtaatgcgcaccaaaccgctggaagggccgaccaatattgcagtcggcgcaccagacttctcatttcgtaaacatcaagatggcggttatatcattacccagcgtggcgcactggatgcaccgctaactctcgatcatctgctaattggtatgcgctatctaccgcaactgcgccatgcgcgtgacaacctgcgcatttcgctaggcaagtattttgttaaagatttagcgctggcgcgccgctggcgcagtgagcaccgttcgccgtttgaatgcattcgcacgcttgatcccgccgtaaacccagcccttaatcaggaagcaatacgtaacttgcgtgcagcttggccagtatttgagcaggcagagctggcgcaggcatgggctggcgttatcgatgtaacgccggattccaacccggtgataggggaaatcgcagcactgaaaggcctgacgctggcaaccggtttctccggccacggtttcggtacatcgcccgctgccgggcagttggctgctgacctagtatcaggccatatcccgttgattgacccgaagccgtatcgatttgctcgtttttga

SEQ ID NO: 271181 - DNA, 618 bp, Klebsiella pneumoniae
gtggcgcaggcgcttcgggataaaatcatccatggagagttgcgctgcggtcagcggctttccgaagcacaactgagcgaaagcctggagatttccagaaatacactccgtgaagtttttcgcatactgacgcaggaaaggctgctggaatatcgccctaaccgtggtgttttcgtcagtacgccggacatggcctgcatctccgatatttatcgtgtacggcagcttattgagtgccaggctatagccagtgcctggccggggcatccggccgtaaaagcaatgcgccaggcggttgagcaggcacttgaatgccaggaaaagcatgactggaatggtattggtacggccaatatggcgtttcacgcggccattgtggagttagccgacagcccgcgactgagcgcattttatcggcatatatcagcagagttgcgccttgcctttggtttactgaagaacgctgaacatctccatattccctatatggagatgaatctcaaactgcttaagctggttgaagcaggaaaaacgcgtgaggctgccagtgtgctcaggacatatctggaacagtctgaaaggctatttctggcaaactttgcccgccggaataactaa

SEQ ID NO: 271182 - DNA, 789 bp, Klebsiella pneumoniae
atgaatatcgaccttaatagcgatctgggtgaaggttttggcgcctggaaaatgggcgacgatgacgcgatgctggagttggtatccagcgctaacattgcctgcggctttcacggtggtgatcccaccggaatactcagaacactcaaagcagcaaaagcacacaatgtcacggtaggggcccatgtctcatacccggaccttatcggttttgggcgcaggtatatagatatcgccagcgatgacctgacagccggcgtgatctatcagattggtgcattaaagagcctcgctgccgctgccggcacccgtgtcagctacgttaagccgcacggcgcgctctataacaccatcgtgacggacaaacggcaggcgatagccctactggcagcacttaaagctgccgattcggctctgccgttgatggtattggccaactccccactggaaagtctggcgcagcagttcgggattcacattctgcgcgaggcctttgcagaccgggcctatacagcgagtggaatgctggtttctcgtaatgaacccggcgcggtactgcatgatccagcggttgtcgctgcacgaatggtgcaactggcgcaagacggcacgctaacggcaatagacggcaccacgcttatgctggccgcagactcaatctgtattcatggtgattctccaggcgcagttgagatggcacgtgccgtttaccgggcactgacggcacgtggcatctccatctgttcagccgtcggccggaggaataacaatgcgcttcttacccgttag

SEQ ID NO: 271183 - DNA, 1608 bp, Klebsiella pneumoniae
atgcgcttcttacccgttagccttgatgcattcttggtggaaacctccacgcaagaagagaggttggcgctgcttgataagctgctgtctgaaacgcccgtcggcatcgaggagatcgttcctgccgccagaacattactgatccgttatcaaccatatatcgttgatgcgcagacactggtcaacacgataagtcgctatacattcaactacctcgtacatgcggccggtcgggttattgatatccctgtttgctataacggagaggaccttagcgaggttgcccatatactcgggattagtacggcagaggtgattcgccagcacacgcaaacggaatttaccgtcgcatttacgggctttgcgccgggttttgcatatctttcaggtaacagaaacctggttgtgccccgcaaaacatcaccacgcctgtggatacctgcagggtctgttgggctggcgggggagttcagtggtatttatcccaaatccagcccgggaggctggcagcttatcgggaagactgaaaaagcgatgtgggatccgaaccgctcggtcccggcgttgcttcagcccggaatgcgggtgcacttctacgaagacaggcaccgaaccctgtcgttacctcccctaactggtgatatgacaccgagcgatgccgctgaaggtgtcagcgcgctgaaagtcatggctcccggtgttgaaatgctgtatcaggacgatggtcgagcaggacagtccagccagggcgtatcatgcgccggtgcgcttgatcgtggcgcataccacagtgcgaaccgggccgtcggaaatccatcccacgttccttgtctggagctcattccgggcggcgttgtaatagaaagccatgctgataacctggtggccgttacaggcgcgacctgccccctaacgctgataacccaaactggtactgtgcatcacctgcctggctggcagccttttccgctggttaagggcgatcgcctgttgattggtcgagccagccagggcgtcagaagttacctggcaatacgtggcggtttcgccgtaacgctggttgcagggagcgcttccacggacacgcttgcacagctcgggccgcctccgattacccgtggaacggtgctgaaacggcttaatggaaagggtttatccgcggttgcccccaatgaacaaccaaatctaccgctgccgataatcggcgagacaactgttctggatgtcatcatgggaccacgaacagactggttcacatcagatgctgtgaacaattttgctgcgcaacgctggcatgttaccccacattccagccggatagggctgcggctgacgggagaaactgcattgacacgcctgatagagggagaacttcccagcgagggtgcgcgtcctggcgcaatacagatcccggcgaatggccagccagtggtcttcctggcagactatccgcttactggcggctacccggtgatagcttatgttgcgccctggcatcttgaccttgccagccagttgccgccaggtgcatggatccattttaatcctgtgcagccatttcgcgcactcacatcaaatttacccccttttctgtcgaggaatgcatga

SEQ ID NO: 271184 - DNA, 366 bp, Klebsiella pneumoniae
atggccgcgatcggaagcaccctgttagagcgtgttgatgaggcggaaggggttctgattgtcacggtcgcggctgataaaggcctcgttgatatccatgaccggcgcccgcttgtcctggtaccggacgccgcccgggagtggatgaaacaggacgtttcgggtaaggaggctgaagacattgctgcagatggagctgtgtcagctgatcatttagtgatatctgacaatgacacctgcgctgaacatatcaggcgcttcgcaaaggatgttgctgcctttggagaatggcagctcatcggcctgctccgccagcaggcgactgaaacggctattttcggccgccagttcattatcgctctctga

SEQ ID NO: 271185 - DNA, 447 bp, Klebsiella pneumoniae
gtggctgagctgcaggaagttgacgcctggttagatgcgctcttggcgggtctggagcctgccgcacgtaagcgcatgatgcgggagctggcgcagcagctgcgccgcagccagcagaaaaatatcaggatgcagcgcaaccccgacgggacggcttacgagccgcgtcgcgtgacggccagaacgaaacagggccgcatccgtcggcagatgtttgcaaaactccgcaccacaaaatacctgaaagccctcgccagccaggacgcggcaagcgtcgagtttgagagccgtgtgcagcgcattgcccgtgttcaccactatggtttgcgtgatcgtgtgagccgcagaggcaaaacagccttgtaccctgcgagaaagcttttaggatttacggacaatactagtaacttaatttttgaaattttacttaaatctcttggtaaataa

SEQ ID NO: 271186 - DNA, 1959 bp, Klebsiella pneumoniae
atgattgtggggatttttttaagatattttaaaacatatagtggaaatcattacataccattatcttctggaagtcagttttgtgggattgttggtaataatgggattggcaagagttctgttctcgaagctttagattcgtttattaataacaaaccatggaatattaactcttcatttaaaagaacttccagtgataggccatctccgcatattgttcctttatatctcataaggcgagataagttgcatgaagatcatcatgctaaggctgagattctgactaatttagttttagaatacagcagtagtaatcctgatgtaactttaacgcctaccacacgtgcaatattcaacacgttttccgagcatattaataaattaaaaagaaatttaaatatagatgattactttttaattcctttaggtgttgaaaaagataataatgtaagtgtttcgattcttaatggtaaggtgctgtgtcgacttttgggaattgaaaatgctgataataaagtttcaggcgaattgctgttcgagctttttggatatttgttgcatcatgttcgacataagtatgaatatatatatattccgaaggatatagactcagaatccttcacgaagctagaaaccagtgaagtgcaaaaactaatgggtgaatctttagaagagataatcaaggatagaatctctgatagaactattagtcaaattaacacaggacttaccgcgtttctagatagtgttgagggcgagcttgaagagtatggttatagaacatctggcgaaagacagtcgcgattaaaaaagaaagatgtttataatttaattattgaggctttttttagagttagaaagctaaataaaaggcagggatcggattggattgaaattagttctttgagttcaggtgagaaacagcgtgcaataatggatattgcatatggttttctcaccaaccatcgagagaatggcgataatttaattattggaattgatgaaccagaatgttctcttcatatgtctgcatgcttcgaacagtttgaaaaactatattcaattagtggtatatgtgaacagttagtctttacttcacattggtatggttatcttccaaccgtcgaaaacggatgtactactgctatcctcaaaacagatgcaactcatcattttgaattatatgatcttgctagttacagagaagaggtcaggaggaaagtaaaaacttcatccccgggtatgccatttgatataaaaataaaaagtgtcaatgatcttattcagtctataatttcaagctgtcttgctgagcaaccctataattggttgatatgtgagggtactaccgaaaaaatatatctctcgcattatcttcatgatttagtagaaaataaaaggctgcggattgttccggtcggcggggcaagtgaagttaaaaaaatatttaagcatttggaagcttcctatgaagagtttaaaaaagatctcaaaggtaaagtttttttgttaactgatacagatgctgagttagtatcatacgataccccaactatgcagcatgttgtttgtaagagaattgtaagtgtaaacgattcagtaaaattagttgacatttcttccaatcctgtatccccagcaacagaaatagaagattgtcttaatcctgtatcatttatagaaactttaacaaatttttcctcgcgtttccccgagcttcaggcattgattcctagcagtagtgttcaaattgatgaaaatcactcttcgtttgctgttatggatttgtctcctagaaataaaaaaacgctagatatgttttttgatagcgaaggtattaagtttgaattttcgaaggaatatgtttcttcttgtgagaagaatgtccgaaaaagaccagagtggattacccaaattgaaagtttttttataagtgataagcctgttaagttcaattaa

SEQ ID NO: 271187 - DNA, 894 bp, Klebsiella pneumoniae
atggcggataagactcaatcagtaagtattgtgtatcaaggcaaagctctcgacgatcataagatggatattctttcgtttgcgaaaagtttgcaggggctaggtgaggctatctactctgcaaatgagattgtaaacggagggcgagacattgaagttaacgttgacgctgaattgatagccggttcctttgggtttgatattgaggttgtacaacatctagctaatgctaaagatgttgtacaaattttaggtttgtcagccattcctttagccgttggcggtgctacagttttagaggttctcaagaagcttaacgggcgtaagatcgacatagtcgagaaagctaacggtagtgacaaagttaagctgaaagtcgatggtgaagagattgtttgctctgaagatgtcgaaaaaatcgttaatgccccagagattcgtaaggctgttgacgcgtttgtcagacagcctctgttacaagatggtatcgacaattttgtggtaaaaaaatcgcgcacctctaagaaagaaatcctcaaaattcataaagatgaggcagaagagtttaagtcgccaaaagttctctttgaaaccaaagaagaagttgacgaatttgaaacaaccgtgacattcgtttcggcgcatactgacaaaaaaagtggctggcgtgttgagtttggcggtgaaaagcgcaatgtcagaatggaagataatgagttcatcaagcttgttactggaccagacgcccccaaaatttttggcgaattgtttgctgtgaagatgaagaaaattgtgaaagattccggtggccaggtagacgaaaagttatcgatcatcaaagtgggtcgacactttgccgccaaagatagaaaaataaaacctgatgcggattaa

SEQ ID NO: 271188 - DNA, 1107 bp, Klebsiella pneumoniae
atgacaggtagtgtcccagtagtgctttctaagtctgagttaaagtcgatcttgaccttaactgaacgtttcacatggaacgttgcaaggccaattattgcgtctttagggctgccaacaggtagggggcgtgaagcaacaaacgaaaaaatactagaaagcctcattgatcttaaaagtaaagataggcaaaagtttgatggcattatggcaaacgtaaatgacctaatttttggtcaggtcgtttatggtgaaaaagcaatatttagtttgactgtagataatagtgtaattaaaacactaaatgacagatttagttttcaatggaatttgatgaatcaaccatcattattggttgattcgatccttgatgatgtccaattgcaaaatgctgtaaaaaatcaacctgaacttgttaattattctattcaaaacacccagtcaatacttgttttttcatctgtcagagaattagttgtaagagaaaaaattcccccgtcagcacttgcgcaatacaagcagtttgatgaaattattgcaaagcgaaaagaaaagcgacaatgttttgatgtctgtatattagactctgttactaataaaattcatgttttggtagatactaatggtaatattattggtgataatgttacttttgcaaagagtaacattattcgtgaattgtataatcatgtcggttatgaatttaaatcatcggaaaaagatttttatccgttaattgagccaattttcaaacaaaattcattgccttattcaaaattaagctataaagtctttgatttgtcatttttgacgaatgaggggactacgcataaagaaaagaaaaatgtggccactaaagacttacgtgatgatttgtttaataaggaaggcatcaaagcagtaggcagtattggtttgtatcgtattggaattagagttgatagaaataatccaaaactgcaattagcggataacgtagagcttatcattccgggaacactccgcaggcatctaggagggagtagttgctctcctgttaactatgctatattaagtaaatgtatatccaaagatgatttcgaaaccctcacaaagctgatattataa

SEQ ID NO: 271189 - DNA, 435 bp, Klebsiella pneumoniae
atgaaggatggtgatatgcccaagatcatcaaagaaatgtgtgcagaacgccctgaaattggggcgttagcttgctatttgtacgatgaaatcgaggcaagggctaaaaaatcatcaaatatagctttaagttataaggatttatttaatatagctggtggttataataaggttttacagccagaaacgtatgagcaggttatctatccggccatacaaattctttgtagcccaaaggttgattttttaaaactcaattattggttcgttgatgattttcatgaccctgtagaacttgaaatagaggaagttattgaggcggaaatcagtcaatctttagcaaacccatttacaggggagcttatgtatgactataagtcattcgtatttcctttttttacattagatgaatctaaatcaaaggatattatctga

SEQ ID NO: 271190 - DNA, 825 bp, Klebsiella pneumoniae
atggatatgctgcatctctcggcgcggcctgacgccagaacggtggtgacctatcactcggatattgtgaaacaaaaacggttgatgaagttgtaccagccgctgcaggagcgattcctcgccagcgtagactgcattgttgcctcgtcgcccaactacgtggcctccagccagaccctgaaaaaatatcaggataaaacggtggtgatcccgtttggtctggagcagcatgacgtgcagcacgatccgcagcgggtggcgcactggcgggaaaccgtcggcgataacttcttcctcttcgtcggcgctttccgctactacaaagggctgcacattctgctggatgccgccgagcgtagccggctgccagtggtgatcgtcgggggcgggccgctggaggcggaggtgcggcgtgaggcgcagcagcgcgggctgagcaatgtggtgtttaccggcatgctcaacgacgaagataaatacattctcttccagctctgccggggcgtggtcttcccctcgcatctacgctcagaggcgtttggcattacgttactggaaggcgcgcgctttgccaggccgctgatctcctgcgagatcggcaccggtacctcgttcattaaccaggacaaagtaaatggctgcgtgatcccgccgaatgacagtcaggcgctggtggaggcgatgaatgagctctggcataacgatgaaaccgccagccgctatggcgaaaactcgcgtcgtcgttttgaagagatgtttacagccgaccatatgattgacgcttacgtcaatctctacactacgctgctggaaagcaaatcctga

SEQ ID NO: 271191 - DNA, 219 bp, Klebsiella pneumoniae; identical to SEQ ID NO: 227149

SEQ ID NO: 271192 - DNA, 600 bp, Klebsiella pneumoniae
atgccgagaaaaacttttttttcttttcactatcaagaagatgtatggcgtgcgtggaatgtcagaaacagctgggttgttcctaaagagaaagaatctgagggattctatgatgctagcgttttcgaagcatcacagaaggaaggtgacaacgttctgaaagattttctacgcgacgggctaaaaaacacatcggttacttgcgttttggctggtcagtacactgctagcagacgttgggttcgatatgagattgtacgcagcgttttgaagaaaaatggcctactgacagttgatattcacggcgtaaaaaacagtatgcaggttttgggggtaaaaggaactgatccactttcccaagttggggtttactgttcgaatggactgatttactttgctgaaattaaaaataataagtgggtaaagtacgaggactataccttggctattcctgcatccgacctgtggtttgaagcccctactaccttagccgtaacgagaatctcagaccattgtctgagatatgattacgtagctcagaacggcagagaaaacatatccgcgtggattgaagcagctgccgtagttgctggccgctag

SEQ ID NO: 271193 - DNA, 1338 bp, Klebsiella pneumoniae
atgtatgcggctgtcgagatagtaccggcagagttcgaagagggaaatccgaaaagtggtttgactcccatgcgcgattggatggccgatcgttcagatgcgattgtctgcgtcggtggcgcctggtgggatgtcaataaaacgaatgctggtgtgcccaatgaactagataccatgctggagcttggaaagcctggatttgtggccgcaggttttggcggcgcgattgctggctatctcaatgaagatccgtcgctattaagacgtctgaaaaacggactaagtcaggaagataacgaagtcattgcgcgttgcactaatgttgattcggttgtcgatctgattgtcgagcagctcaaaaatttgcccctctcacgaaggaatgtaactcaaggccgaaatttccgaattttggctttagacggtggcggactgagaggcacatttactgcagctgtgctagccaagtgggacgatatgctcaaagctggtggcggaaatggcatcatctctcatttcgatttagttgcaggtacatcgactggcgctatccttgccatcggtctagcccttggtctgaacccaagtgaaattctggctttttacgaagaaaagggccctaaaatttttcctaaggatcgaaagctgagacattggctcaaatccaagcatgattcaaccacattgcgacagctacttacagaggtgtacggtgaaaagacactggctgaagattcatgctgtcgtttggtcatacctacggtaagagcgaagcagggacaagcagaagcgatagtaacgcctcacagtccagatcgtactgcgtatcgcgatatctctgcagtcgatgcggccttggcttcgtcagcagcaccaacattcttcgacgagtcgacatgggaggggccaatcgccctcgaaacgttccttgacgggggagtttgggcaaacaatcctattttgcctgcacttgcggaagctgtcagatacctaaaaattccactggatcgtatcgatgtgctgagcattggaacactcagcagtgaaagcgattttactgaccagttggggaagggcaaagccggatgggcacctcatagcgctgacctgttttttgctgcacaggagcacggtgcactcgcacttgctgaaagtttcctaggacccactcgtcatttgcgtatcaaccaacaaacccctgccgaaatcaagcttgatgacagagaggcaattcaggaaatggctgcacgtgggaatgaagcaggaaaagaacactttgcagaagtgcgctcaaggttttttgatggtcggcatgcagatgaatgggtgcgtttttaa

SEQ ID NO: 271194 - DNA, 837 bp, Klebsiella pneumoniae
atgttcctggacttgaaaattgaaaatgtcgttgcgctcgattcagaatggagtgattctgacgtcgcatcctacaaagcgaaaaatgaccacattgccatcaggcttgaagagtacctgatgaatggtaacaacctgctggatgcagagaaaatccagcaaagcgtattcccagagacggagattgacgtattcatttcccactcacataacgatgaagatcaggctattcgtattgctttaagcctagaaagaattggcctgaagcctttcgtcgattcatgcgtttggggcttcgctgatgagttgcttcaggagattgataacaaattctgtatccctacaggttgggaaaattatagctacgcactgaggaacagaacgacaactaatgttcacttaatcttaaacgcagcgctccagcagatgatccatcgctctgagcttttcgttttcttaggcacggaaagttcgatcaaaattgatgaatacatgtcggatagggagcgactttcctctccctggattttctccgaacttatgtttgcacgaaatgtgaaacgaacagtgcgcaagcgactcgaatacgggatgggtatggagggttatcggaaaatagaagaagccgcgtttgatagtaaacacgctgagtttagatacttactccctcaatccacttactcaatggattatgaacagtttatgaagtggctaagctcctataccctgccggatgactccgatttcattaggaggctcagcgggctccatcatgttgataagctttatatggaactgggggtcgatgagaagctactagaggtaccccggatgtag

SEQ ID NO: 271195 - DNA, 1143 bp, Klebsiella pneumoniae
atgcttcctatctatcagcttgctgttataggctccccttcagacgagcaactgcgcgatttggaggatgcggttaaaactgcagtggagatgtacgggctacgactcggtcaggagataagttgggaaatagctcctgatatgtttacaccaaatcagttgcgagcgagcgcggttgttttttttggaggagagggcatagaacacccaagtttaccgagcttgcttcgcagcggtactcctgtaattccaattgtatccgatctacgacatgtagctgcggagattcctgagctgctgcgaccgctgaactgtctggcctacgcaaatggtggtgctaagcgtgtctcgatagctcttcttgaatgcgctggattgcttccgaaacaacgaagggtcttcgtaagctaccgccgggatgaagccagagttgccgcgctccagatgttcgatgctctgtcagagcgccatttcgacgtattccttgacactcatagtattgcgccagcagaagattttcagaccatgttgtggcatagactctgcgattctgacgtgctgttgatgctagatactcctgactattttaatagtcgttggacatcagctgagtttgggagggctctcgcgaaaggtataagtgttcttcgagtcgcttggcctgaaacgaagcagtctcgtggattgggtactgcaagccttgctgagttagctgaaggcgagttggacggcggaacaggacatatcgagaattccgctatcgaccgcatttgtctacaacttgaggcggtgcgcagcaaaagtcatgctgtgaggactatcaacctagtcagcaatttgcgtattggaattgaggcaataggtggtgaagtcattggtatgggagtggggcgggaaatcaaagttcgtctgcccacaggacgaattatagtggtttacccgacggtcggggtcccgacgtcatcaaccatgcaccaagcctcaatgaactatccagatgaatcagttgctatactgtatgaccatgtggggctacatcctcagtggctgaatcatatggattggctcggctcgcacatccaggcaacgaagtgggtgaaagcatgcgaggtcggctggcagtttgcagattgggaggtttaa

SEQ ID NO: 271196 - DNA, 588 bp, Klebsiella pneumoniae
gtggattctatttttctttcagcaagcgtcccggtcaatgggcgaggtgattattacgaaactgctgatccgttcctgattcagtgtgctgtacgtgagtttgccatcgcggtcgtaagaaaaatgaaaatcgtatggggggggcaccctgccataacacccatgatctggagcatttgcgaagatctgggcgtcgattacactcgctccgtagtattgtaccagagccgatttttcgaaggccagtatcctgaagaaaatgagcgattcgacaatgtcgtttacaccgatgcagtgcctgatgatctagccggcagcctacatcttatgcggcaggaaatgttgtctcgatgtgacttagttggcgcagtctttgtaggggggatggagggagttcaggttgagtatgagctatttaagcaatttcatcctgacgcaataattctaccggtcgccgcccctggaggcgcagcactgagactagcaagggatcatagctacttagatggaggccgtctgggagacgtggatttcgcatctttatttgatcgttatcttaataagatactgggctctcaatccgattga

SEQ ID NO: 271197 - DNA, 552 bp, Klebsiella pneumoniae
atggctcgtaacgtcacaaccgcagagctaagaaacatttcagctagcagctctcaagctactcgcgataacgtattcaaatctttggctgctacggcttcgatgagtacgtttctatctcactcaagcaaagacaaggaaattctacctggggcgattcaggtacttcagaatcatggagcatctgtgtacattgatgaaattgatcccgaaatgccgccatatacgtccgaagaaacagcagctttacttaaacaacgtattgcgcagacgaaaagattcgtgctccttactaccaaaaatagcaaggaaagtcgttgggtaccttgggagttaggcatcgctgacggtgctaaagggctctcaaaaattgcaatatttcctgcgtcggatactgcacacgacgatagctgggttagttgggagtacctagggctttaccaaagagtagtctggggtttattgaaaggatatcctcatgaactttggatggtgcttgatacaaaagccaatacagctgttccattaagagattggttatcggggtactga

SEQ ID NO: 271198 - DNA, 582 bp, Klebsiella pneumoniae
atgtattccgatacgttattagatccaatgaacgaaagcctaattcaacaaatttttgaaaatgaagggaagtatatattaagttattatcatcattcggcagtcgttcttatctattcagtattggaaagcgttttatctgatatatgtgaagaggtcaataaaataacatgcgccaaattttcatttaatgacttgtcgggagggaatataataaaaaaagccaagtactatctagaaattacatcgggattagatttttcattaatttctggggaatgggctgaaataggaaaatttcaaaacttaaggaatgttattgtgcatcaaaactctagctttacagggagtattgattcaatagataaacaaaagcaaaagataagaaataattttccagaaatagatatatcttccagcagtaatagattttatattcttaatgatagtcttttgaaaaaatttataaatttaattaaatcgttcctgagtaaactatttatacatgtgcaaaatattacatttcaaatcgaaattaagactcctgtattacaggatattaatgatgatataccattttaa

SEQ ID NO: 271199 - DNA, 885 bp, Klebsiella pneumoniae
atggatctttcccctgtatttctaatcgttgtaataattttagttatgccattatttgtatatttagcagttaagcagcataaaatatcgaaagaagtttatgcactacttgccgaagatggatatgatattatattttctggagagggcaacacttacatagcatttaatattaaaaaggcatcttttcgcgccgggagtttaatcgatcataggtacttccaagaatcaatatcatatatacataattatgaatggaaatggaaagaacttgatgggaaaaagattgagaacactttttacatctacatatcaaacatcgagtttcctgtgcataaaatatactatcaacgaaaggaagataatgctgaaattgaatgggcaaaacttcaagctgttttccatcaatcatatgaactgcagagcacaaaaatgaaagaaaatcctgaaatatatttcgatttctttatatctcatgctagtgaagataaagataatttcgttagaccattggtaaatgaattatcgcaacttggtattaatgtttggttcgatgaacaaacattggaaattggtgatagcttaagaaggaatatagatacgggcttaaaaaaatcatcttatggaattgtcgtgctgtctcatgctttttttagtaaaaaatggactcagtatgagttagatagcttgattaaccgagcagtaaatgacgaaaataaagttctgctaccaatctggcataatattgatgcaacagaggttgcagagtatagccattacttagcagataaacttgctttacaaataacgatacataatattgatgaaatagcaaaagaactatctaaaatagcatacaaacgtagaagcatcgcaacgtcataa

SEQ ID NO: 271200 - DNA, 651 bp, Klebsiella pneumoniae
atgaactctatctattgggtgcttatcatcggtctgctgatgaacataccatcactgactccgatgctgtttctccgtaagacgcaaaagaacgtgaaggtatggatggcggtcagactttttctgctcaacgccttcttggtgctgtccttggtgacggtatcgcagaacattacacaaaaatatggactgtttcctatatggctggtatgtgttgctatcgcactttttatggtcactctactaccaacagtgaaatttgtgcgtaaacatttaactgttggtaaaagcagaaccgttatcctttcatcgttcctgattgtctatgcggtcaggtttaatggcgtgttttcagatgtgaatggaagtggatatacgattaacggttataacacagtatggacatttttctttctgtttgcctgcctattggcttatctcggttgttccgggaacagagaaaactatggtacatatatacctccagccactgcgcagcctaatggtaataaagcctatgcttcccaatcagagattgataccgatattgctgtgaaaggatcaagtgtgttgttcgatccaaatctggatattgtggaacaacagcgttatcgggatgctattgaaaagcggaataatgatagcttgtaa

SEQ ID NO: 271201 - DNA, 450 bp, Klebsiella pneumoniae
atggaaaacaacaacgagcgaagctctatggaaatcttcgaaaaaggtcaaaaaatcgcttttattgactcgttcagcaatgctgctttgtcttacgaatacgaacaggcgggcttcaccattaatttaatacaacgctcggttcttctctttaaccataatataaagaaaaacgtaacagccaagcagttgcgtaaaaataatataaagaaaaacgtaatgtcttcgacattgcataaaaatatgaacagcacatttatatatccatatagcaacatcagggaaatcaactactcgctgcctgattgcagatccgatgatgccgagatctgtattatgactgatgatgtattaaatccagtctggacgttcagggttccatcccacgcacattatatttgcgagcaatgggtggaagtatttaataaccatattttatttggtcaataa

SEQ ID NO: 271202 - DNA, 519 bp, Klebsiella pneumoniae
atgctaatgcttaacatcttactactattttcttattatataaccatcatcaaatatccgataataaatatggtgaagaatatcatattgcgctgccataatggaatggtattcaaccatcgcgctaatcttttagcttttgataatgttttttttgctcttaagatttttataaaaaatgagttgtcattaaactcttctatttgccttattttcttgattattattgccaatgaaaaaaacatcacaataagaaaggtgattgatgtgttatttaattgtttccctagggcgaagtattcatatatggcaacaattaacaggattaatacaaaaacgatcaatgccagcatcttacaccttggtttcttttttctcttcgagtctgagggtagagtatcttgttccttgaggctggatgtgttgacttctttgttttttggttcgtcatatggagttttcatcgatattatccagataaaagacgagttggcaggaagcacaataaaagtgctttaa

SEQ ID NO: 271203 - DNA, 1422 bp, Klebsiella pneumoniae
atgacagatgcattagtagaacaaaaaaatcaggcacttagtttagctgagaacagtgtcaaaaacctctatgaaaaatataaaaacaaattagaggtaaatcccgatctggatagaaaaatcgtcagcttccaagcgaataaaattgaacctatatttagatggtttcattatcgagaagggttttcaaaacaattaatagagtatatattggaaaatattaatataccctctggtgggaaaatattagacccatttgctggaacaggtgtggcaccttttgttgcagaaaaataccatggcatggatggtatagccatagaattaatgccagttggcactttctttatgcagtgccgcaacgagttttctaaattaaaaaatcaagatttgattcgttatgccagaaatgcattggaatcaagacatgagtggcttaaaactactccggaatgggaatttaagcatttaaaaataacagtaggtgctttttcgtatgaagatgaaaaggaactgtgtcaatttaagacttggttaactaatattgaagatgaatcaaataaattatttttagatttcatcgcattttcgatacttgaaaaatttagcttcacccgcaaagatgggcaatatcttagatgggatcatcgctctccgcgatttttagatgcctctaagaaaacgacctttgataaaggagaagttttaagtttctttgaagccctcaggaggaagttagaatatatcattgaagatcttagtatagaagttagtgaagagaataaaaccaatgatgtaaagatactagaaggttctgttctgaaggttattgatgaacttgaagataatagtttggatgcaattattacctctccaccatattgtaatcgttatgattatacaagaacatatgccttagaattagcataccttggtgttaatgaagaaaatatacgttcactgcgacaaaccttgttgacttgcaccgttgaaaataagcctaaacactttgaatggctttcggatgaagataaacatcatatcaaccaagcctttgataagcaaagtgatttatcaaatgtgctaacgtttcttgatattgaggccaaagaagggcgtttaaataacaagggaattgcaacaatggtacgaggctatttctatgatagtgctgtccatttgtatcaggcttcaaaaaaaatgaagacaggtggatattatgtgatggttaatgataatgtgaaatataatggcttagaaataccagttgacttaattttatcagaaatagccaatgagttttcattgaaaacagaaaaaatatgggttcttcctaaaggaaaaggaaacagctcacagcaaatgaaaaaacatggtagaacagaattgagaaaatgcgtgtatatatggaaaaaggcatag

SEQ ID NO: 271204 - DNA, 873 bp, Klebsiella pneumoniae
atgtacagtgttgcgactgccaatgatctaatcaccactgtcagggatcgaattgacgggttttcttggcaagctaacgaaaaactttcaagagctagcggcttttttaatcatgctgattattttagagaacataaacatacgatagtcgatgttcactcgctgcgtagagataggttattaacagaatatataattgccagttgtatgctatcgcgaaagagtttagcacatatttctattgaaatgcagaatgaaattattaatagactcatcgattttacccgactaaatgacccaatatatctgttagaacttgacagaagatattttcttacatgtggtgatgctttaggcggtatgatgcgtaatgtggttgggcaaagtgctcaacattttataactgaacatattttccagcgattacataatttaaatcttaatccccaacgtataacgagaggtaataaaaccactcagatatattggcataataggcgagtattttttgatcaaaaacctagatttatcaataaatctgttgacattattgttgttggcggtaactctgctataaatgctaatcttgaaaacccaaatgattatatttgttgcggggaacttaaaggtggtatagatccagcaggagcagacgaacactggaaaactgcttggactgccttaaataggatacacgaagtattcgcagtttctagcatacctcgaccaagattagtttttctcggtgcagctatagaaaactcaatggctcaagagatatttaacttaatgcaaaatggatggcttaatggagctgcgaatattagaaatcctacacagctccaagaagttattgatataattattggctag

SEQ ID NO: 271205 - DNA, 174 bp, Klebsiella pneumoniae
atgcctgacgagaaaaaaaaccggttaaaccagaaaatcctggtcccgtcccgacgcatcaatatgaccaatcagaatgtccgaagcacgccggtaaccttcggtttaagctgtaccgtgatcaggcatgtaattcaaacatgcgttattctgtcagtcgctgtcgcttgctaa

SEQ ID NO: 271206 - DNA, 168 bp, Klebsiella pneumoniae
atgaaaatgcccaattacccgagtaactggcctgatctgctggagttgctgcagagctggtggttcggagatacgccgctcggtgctgtgctgctttctgtggtaaggctgggaggcttagtaagcactactagttatgtgtctgtcattgacgcctcgaatgtttag

SEQ ID NO: 271207 - DNA, 1383 bp, Klebsiella pneumoniae
atgtcgttttcagcattgagcagtgacgatttctatacccggttgtatcaggtagttcgaccatcgcagccaattgatgcttctgagtttttgtttggtagagatcgtcagtacgaagctatgaaacaggctctctatgccccggggagacatagtttcatttttggtcacagaggtgtaggtaaatcatctcttgctcattctattgcttttgatcttcaagaacagactgatcctattcttttaagctgtgatgaaagcacgactatggaatctatagtagcagatgcgctgcgtgaagctggtgctactggtgcgtataaaagtgagtggggggtgtctgttagtctcggagtcagtggaacaggaataaaatttgaaaagaaagggacatcggctcctcaagaaataaaaatagttgatacgtcatcagctgtatttgctctagagtatctgcaaaaaattcattcagataagccttttataataattgatgagtttgatcgaattgaaaatgctaaagaaagggagaagtttggcaccttattgaagcaactaggagataagcggtctaatgtaaagtttatcttcactggcattgcagaatcatatgatgagttacttatggggcatgcttcaagttcacggcaaatacatgaacttaagcttgatcctctacattactcaggttgctttgcaattattgacagagcatttagtgaatttggtttggttgtgcctgaagatttaaggattcgtattgccggcattagtgatggttatccccattatgtgcatcttatttgtgaaaagatgcttgttttggcctacgagagagatttaaataccattactaatagtctgtatctagatggactgaatgaagctgtgacgtcagtagcacaatcgcttaggggaccgtacgaaaaagctacattagcacgtgatcgccattatacttatgttttatgggcagttgcagactcaagagacttgcaacgcactatttgggatgtaaaagcatcctattgcagtgtgatagaccaagtgtcatggagaaaaaaagaagatattccgatgttaggggatgacgctttttctagaattttaaggaattttaaatccatagattttggggaggttgttgtacctgcttttgatggaaaacgtagagggtggtatacttttaaagaaaacatgctccgcggatacatccgtatgtgtgctgaagcaaaccgggttaaactggattttgaaaaacactttacagcagaacctactgcacaagctcgaattggagtacgctctcgtaaaacagtatcgcaaatcgaagaagagattgagagagaacagcggaattacataccaaaagatgggctgtga

SEQ ID NO: 271208 - DNA, 273 bp, Klebsiella pneumoniae
atgagtatgaatttgattgaacttgcaaggaagttagtctcctcacaaattactgcagatgaattcgaaacccaatttttcaatatgtggcgaaatgaagggagcacgggtcagctaacacaagatagtaaggaaattggagagtgtgcggctgagatttttattcttgctgattgttatacatcagatcccgtgaaaagagagagcgaattggattcgaatggtttgcgtaaagaggttaaagaaactcttgagaagtatcatttcctttaa

SEQ ID NO: 271209 - DNA, 2247 bp, Klebsiella pneumoniae
atggccgacacggattttaatgaatatgactataaccatggtattccacctcgcgacggactagtgtgggagcctgcagatgccgagggaccaggccgttggggatgggaaactacgagaattgatacacctccagggcagggaactaattcccctggtatgattgtctggcccaagcggcccggtgatattaagcaatggtatgatcctaaaggcaaccaaagcggtgaattgggtatcggatggtcagattacagtctagacggggtacctaactcgcaatataccgttatgcacggttatccgcttcgcgtgacgttgaaccgggaaattgagctgggggaagcacccggttggacggtggggctatttgagggtacaacgcaaatcgatgtaacttctgccgctagaaaggctcttgaccaagggctggtatccggtcttcctgatcctgcgcgtgccggtgtagtgccttttattaggttgtcacctgaccctactaaccctgaaaaagttactcgtatcatgacagtactcccgctaggtgctgtcaccgatgtacaagcttcttcgctgccagcttcgcctggagcggttaatgtacagcgaagcgtttcagatatcgttcagaatggcgcacagtatttggtgatgaatggcggaaagcctttttccgttcctgttgtggatgctgcgcctgttaaagacaatacacctcagacaaaccgctatgtccctggagtctggcaggctgtcgtggctccgggcctgcctgcaatgattttcgttacagatcggctacacaatacccgccttcttccccagccatacactccggatacaagcggcatgcaggttgaaaccggttcatatggtccgtcaggctatactgctgccgcaaataatggagatgtgataattcgttttcctgcctccacgggagccagtcctatatatgtctctaccataaaggtcttagatcaagaagcactgaaccagcgtcaggtagcagagaatactcttcggaaccgggcagaaaccgcagcgaaagaagaggccgcaaggagggaagaggaggcccggcgggctgaagaattacgtcgtgctgaagctatccggaaagaaaactatgcgaaggcgggcattctcgacacgcctgtttacacgcctgacatgataaaatctgcaaatgccctgctaggagcttcggcatcaatggttctaaaccgggcgccaggcgggattcagctttcaactgtcagtgctggcgttatgacagcagtcggcgaatgggcaggttctgtagccggggcgctatggaggggggcagttacaatatcagttgcagtaacagaagccgtaacactcagtactgtgggggcgtttgctgtcggttttataccattcccggccgggcacagtagtgatagcagggttccgggacgtgacctcaatatgatggctgctcaggctcgtctgttcactgccgggaagactagtatcgaaccgggaatgaagagcgttaatctaccggtgcgtgcgtttatcagcatggacagtgatgggcgtcagtccctgaacttcgtgaaaactggcagtggaggggtgtcttcaacggtaccagttttgaacgcaatcagggatacagcgaccggcctggataaaatcactgtgccggctgtggcgggagccccgtcgaggaccattctggtgaacccagcaccggtcggtccagacgcaccattccatacaggtaacaacacgcctgtgccggttactccggtgcatactgggacagatatcaaacaggcggatagtatcgttactacttcctttccagccgcggacattccgccgctacaagacttcatttactggcagccggatgcgacaggaactggtgttgagccgatttatgttgtacttagcgacccgttagattcgggtaagtttacgcgaagacagcttcaaaaaaagtacaaacatgcgatagattttgggatcagtgacaccaaaataaacagtgaaacgttgtcgaaattcaggggagcaattgaagcccatttggctgaaaaagatactgtcgtaaaaggcacataccgacgagaaaaggactcaaaagtatattataatccaaaaactaacaatgttgttgtgttggataaaaatggtgactttgtttccggctggcatttgattcctgactctcctcaacatgttaactttattaaaacaggggttctgtaa

SEQ ID NO: 271210 - DNA, 1134 bp, Klebsiella pneumoniae
atggttgatcaaaaaatcaatgcacaagttttaagcggtgttaacgacgatatttcggaaatgaaatcactgactacgttgcgtaaacgtgttgtaactgatggtgaagtggtttctaaatctcagaatgcttttcgtctggcaggggggaacacgggagtcatcttgcgcaatgacgggaatgatttttatgcactggtaacccctgatgggcaggcgcaagatggacaatggaatacccttcgcccactgtcttttaacctcaaaaccggtcgtgtctctttacgcaatggagtggatatttctggcggtacaatcatttcccataatgcgggaattaccgcgcagaccactggcccagatccgcttatcaacggccaaacctatcgggctccggatatccacactgattttatcaccggtaaaacaacaaccactatgctaatgagctctagagctctcaccggtcaggaagactatgggttaatttcctatcgggatatgaaggggaactggaatgaactccagttgaaatctggagctgagttgacagcaggccagttgacaaagcgcaatacagagggatggattaaagctgcaggtaatcgcagagtaaataatgacaaagacagtaaaaccaatggcttatggattcagggggccggggatttatcagctgacttctatcactatgaacgtattggccagcaccatttccttggtctgcatgtagctaatggcggcgcgcagggttggtatgaattccgtaatgatggtcatgcctatactaatggcgcctggaacagtagctcggatgcgcgaatgaaaacccaggttgagagaattgatgatgctcttgataagctcaatcgtattagtggttacacctatctgaaacagggggttagtgaagcaggcgttattgctcaggaagtggaagtagtgctgccccagtctgttaaacagacagaactgacacttaatgatggcagtgtgctttcggatgcgcgaagcatcaatatcaatggcgtagtggctcttctgatagaggctctcaaagaagagcgttcgcttcgacaggcacttgatactcgtctggctgcactggaaaaaaactctatggaagggcaatga

SEQ ID NO: 271211 - DNA, 903 bp, Klebsiella pneumoniae
atgagcttaagaacagagcggacaaaatgggtaatgtttttaccctgctcagctcgggaagctgaatttcggcatgtagtcgatttgatttttggggttctgtgtctggagcgtgctggtatagaacccaaggatatttttatttatattgatagccccgatagaaattttgatggtggatttgcatcagcatcgaattatgcatttaaatccaagcccacgtcagaattctttaatgatttggcggctaatgattacgataatttagtaatgtttgtatccggacatggcggccctgatgggattgatgccgctaatccaatcaccccaaatcagttgcttacagcgttaaagagcgcgcctaatctgaaaaatgcaattatttatttggggcagtgttatgccggaacatttaattttgtcggtgccgggaagaaaaacaggcaggatgaatcagcagaagttatttttgtaggtgcgactaatttacaggaaagtttaagccatggtacaaccgaactatttctgaacggtgaacaattcccgtggtcagcaaatgtatttttattgcatatctttaaatggatgtcatcacctactgatgttgacggtgatggcaagcatacggttatggattcttataaacatgcaggaatcttcaccaacgctattaataaaaagattaagactaacgggttttcaagcttacttgatatgcatgccgagtgtgggagattgaggacacttgcaactaaccctagtggtgatgaacaagctgattttaaaaacctcttagatttcaatgcatcacaggtaaaatacgatactttattatcaattcaccatgtgcatcaggagtgctggatactcaattccaggcccgcccagcttatagagttctaa

SEQ ID NO: 271212 - DNA, 282 bp, Klebsiella pneumoniae
atgaaattcacagggttacagtcagctgcgttgcccgacacttcagatacagtcaaagagtgcgtgaatcttgggcaatggatgctcttcaaatccaatgagtaccaaaaaactgttgtgttttatctcaaaactgagcacaacatatacgctctgaatgagagcggacaagtcatgccaacgccggttgccgaatatgtgtcaatggatgaggtcttttattttttagatcttccaagaccggcatctttgagcaatgctacgttttcggaatttaggtaa

SEQ ID NO: 271213 - DNA, 234 bp, Klebsiella pneumoniae
atgaacccaaccattaaaaccgctatcgccatcgtcgggtctcaaaaagctcttggtgaagcgtgcgcagtgtcgcagcaggcggtttacaagtggctacacaacaaagcaaaggtttctccggagcatgtgaacagcatcgtgaaagcgactggtggcgaaattaaggcataccagattcgccctgacttaccgacgctgttcccaacaccggccgataacaactccgcttaa

SEQ ID NO: 271214 - DNA, 243 bp, Klebsiella pneumoniae
atggagccggtaattcctgaagggacaacagttgctatcaatatcaacgacaaaaaaatcgtggacggcaagatctatgccataagccaggacggatggaaccgcttaaagattctttaccgcgtaggtcctaacaggcttagcattcgcagtttcaaccatgccgaacatccggacgaagaagcggatcttgatagtgttcagattataggcagaatgttttggacttcgaccatctggtaa

SEQ ID NO: 271215 - DNA, 267 bp, Klebsiella pneumoniae
atgagcaaaagatacaatgaagcagaactccttagcgtgacggatcagcagtttatggattttcttgatcctctggtgcaacaacatgcaaaaggactgttttgcaactcctgtggaaataactcttttacgagcccatccttgataagagcaacgctaacaagcaacagttcagctgcaatcgattattataccctctcctgcataaaatgtggtgaggttaagttctttaacgcgcagcttattgccgcttctatcatcaagtaa

SEQ ID NO: 271216 - DNA, 387 bp, Klebsiella pneumoniae
atggccgagaagtgcgaaacaccgaagcaagcagacgatctcgcgaccaacgccgatctggaggcattcctggaacgagccattgcagcgagcgagggcgcgcctggagccatccctgaggccgtggctgtcgctgaggcggccataacccgtctgagcgctcaggaggccgctggagggccgtctgagggtgtctggagggaaatgctgctggacctgttgcgtggcgacgagagcgcggcacaggaatccttggaggcgggcgttccgatctactatgtcgaagacgatacgccgagcgatctgctgatcaaagaacatccagatgggcggcgcgagcttgttcgctttagctacgaaggcgatgaggtggtggaggttctgtga

SEQ ID NO: 271217 - DNA, 264 bp, Klebsiella pneumoniae
atgacgcagatcgcgtcaaagatccttggaacggtgaacgcgccctatggcgcgaacctgtccgcatgccagcttgctgcctgtatctcggatatcgcagcagcgcagtcggccatggggcacgtcttctcctttttctcagaagtcgcgccggaactccaaaacgacttcgtggcagagatgggcctgtccgccgccaaggtgcgcgttgtcgcggaaaccttgcaagcctcatgccccttcccgctcgctctcgcggcctga

SEQ ID NO: 271218 - DNA, 3342 bp, Klebsiella pneumoniae
atgttgcgcgatgtgcatttgagtggatttcagacccacgaagattggtccaaatcgcccgaaatatcggaaattccttatcaaatcagcaaacagcctcgatacttggcgcaaggttcagagataaaactttggaaaaacgatgacccgagcgtcggtgaagagaaggatctacaaggaattcgtgaattaattttcaagttccttggcgacaagggtaacgcgcttcgggttttcgggccttcgggtttcggaaagacgcgttttgtgtatgaacttattaacgcaggtcgcgaaccggacgatgcgttggatgccaaccaagtcgtttattgcaactatgatgatgtcggtgatcgactactaaatctcgcgcgcgagatggccgattccggttcgcgagcgattttgatcgtcgatgattgccccaacccaatccacacgagattgagcgagatcgcgcaccgacaaggctcgaagtgcaatgtcatcacgattggtgttgaatccaaagcacaatcgatgcggaagaaccttgtcgtgaagctcacgccagcttctgacgagcatattgtcgatatcgcttgtgctgttcacgagcgggcaaaaggacgcaacgctacgctagtgcgcgatctggcccaaggctttccgcgcatggcagtctttgccgcacgtgcattggaagacaaagacttcgaactgggttctgtcgaggcgttgatttctcgcatcgtttggggagagcgtggcgaggatgcatccgcgcttgaaagcctccagttcttgagcctgtttacgcttgttggggtcgaaggggatgtaggtagcgagctcgaagaacttgccaatttcacggggcgtaactcgcaagcaattttcggcgacttggcttcgttcgccgagaccggagtaattcttagacagggcgactatgccgcagttcaacccctaccacttgctatgagattggcaaatatgtggttggagtccagacagtcgggtgccctagcagctttcttccggactttgagcgaagatatgaagcttcgcatggtaggacgcctaaggtgggtatcgtggtcagaaagagtcagagagttcgcccaggcgctaatcgtggaagcactccctgacctcgcctcactggacaccgaattcggttcgaaattgcttgatcgatttgtccatattgcacccgacgcaactatggagcacttggaacgactacttgatgggaaatctattgatgaactgaaatcgcttgaagccggacgacgccatatcgtttgggctttagacaaactagtatttcggcatcagactttcatcccagccgctcgtcttctgcttcgtcttggtgccgcagaaaatgaggattggagtaacaatgcaaccgggcagttcaaaggcctgtatcagcttcaactctcaggaacggaggcaagtccgcgagaaaagctcgttgttctggatgaagggctctcgcatgtagatcagcgcgtgcaagaaatctgcctttctgcactcgatagaatgctagaaagcgggtatttttccagatcaggtggtagtgagaacatcggtgcggatgaagcgctcgatgattggcatcctaagacgtacggtgagatttgggattactatcgcgaagctctgcaacggttagaactcattgctcttggcgaccaacaggagcatgcaagaactgcattgaactcaatcggttcgcacttgaggggcttgtttcgtatccaaccgatgctgagcgaagttcaaggtatgatcgcgcggctacttgagcgctacccccattggaccaaacctcttatgggcgtcaaccaatggctctacttcgaccgagaagacgctcccgaagactatcagaccaagctccgcgcatattatgacgatttgttgccgaagaccgatctagagcttttgccagtctatagctctggttgggcgatcgacattcacgacccggatgtctcatacagtcgcgatggcgacaacgacttcaactattgtgcgaacaaagttgacgaaatcgttgcacgtagccccgcaaattccgagtactttcttccagtgttagaggcttttgtgagtggaaatttccattcagcctggatcaccgttgataagattgccgcccacgtcgatgatccgcacgcactgctagaatatctaaaaagttcgaagccgctgcatggcgatacagcgaagtttgctaatttggtaagtagcgtcatcggcggagcgaggcggaaaaaccgtgacatcgcgcttgagtgcctaaacgacgctctggatgtcgaagcgcttgttccgcatgcagttaacctgatcgctgcggcaggcttagatgacacacttatgaagcgcgtgatcgagctgctgaatgagggaaaagtcgagccgcgttcaactgacgctattgccttttctgatacactccaaggtattgatactagtctcaccattgagttgctcaatgtgatgaacgagggcggtagcactggggcgtgggcctccatcgatttcatcggacgaatgttctacaagaacagcctcaatcgagagccgtttgttgaagtcgtcaaagaagttgttaccaatctcgctctatttgaacgtgtgaattactcgaacatggattggtatcactggcacgacattgtcgggaagttacttgatggaggtttttccgagcaggccttcattgaagggttattagagttcattctgagcgtgaccgaagttgaggagtataacgtccaactctcatttgacgattatgcgcagaaaattcttcggaagttgatttcgctcgatcccgagcgggtgtggcaaaagttccacgagcgcctcgataatgcggacagcatgcgagagtatcggctaaatggcctttttgaggccggaataggaaaatctacaagcgcgggtgtcctcaatgatgtcccaattgaaattagtgtcgcttggatgcttgaaaacaagaaagagcgtttgccgttcatgcttgagtggatagagcttttttccggggaagaagacagcggcgagtggtccgcaaaatttgtcgaattcacaaacgagcatattgatgacacagacgcattggacgcggtcacttcccgagtgacgtcaggaacatggtgggggtcatatgccaataaactggaggacgagagggaacggttggttaaactgaaagaagcctcgtccaatccgttggttcaacgctgggtggacaaaaccgtcgcgcggtttgatcaggcaattgttgttgaacgtaggcgagatgccaaccgagatgccgatttcaagaagtaa

SEQ ID NO: 271219 - DNA, 1440 bp, Klebsiella pneumoniae
atggcaattacaacggtatggcaatcaattggacttgtgtccagtggttttacattgatcgcgtttatctgcgctgtgattgcttggatttataaaataaaaagtgagaatgaagcaaatgagctgaaaaatgccccagataataaaagagtggaattggttttagccaagatggctttttttaatgtggacacaaaaaaactttctaaagagcaacagtactctcttgccttggcgcaaataaatcatcgtgcatctaaattaaaaatacaatcattagttatttgtatcattggggtgattttggcgatagtaaccgcctatgcaatttcaattaaccatgatgagaaaagagatgaaaatactatggctacatcacctatagaagccgcaacaatgttctatgattggtattactcaaaatctgaagaaaatagacataatcacaaaaacccttacagtcaaagcgagttaatatcgacaagtccattagtcaagcaagagtttgttgaaaaaataagcaggagtgaaatggaggaacttctagattccgatccagttttctgtgcacaggatgtacctgttgaatatggactaaagttacaaagcagttcattaaataacgctattgtcggtttttactgggagaaaagtaccaaaccttcaggtgaaattttcgtacagaaaatcggcaatcaatggaaaattaaaaacattgattgcaactacgatgctgaagaaaatgatagtgcaattactaacaagcaagaaactgtcatagcgaataatagcgatattccgaaaaataataatacaccttctcaaaatacaacgtctgcaacgtctgcaacgtctgcaacgtctgcaacgtctgcaacgtctgcaacactagacgatttcattagcaaaattcgggatactcgtgacaaaaagatgaagagcattataaaaagcgaagcgcgtgctttagtaggcaaaaatattaattttgggacattgcatgcaactagcaatgatgatttaattaaggaaaaaatgttaacaaaattcatcggctatgacgctaaatctaacaagctcagagttaatcatcagtataaaatgtacagaaaagattcttcaggaatctggtcaattgacaatacttttacatacgaagcgaatgtaacaattaatctcaacaatgtattcaagctatccagagcggggcgtgagggttttagtttagaatgtgatggtatagggagtgaaatgtgcgtcttttacacaatgattaagggaaattgccccgtctcagttgtagtaaatggaaaaacttcttgtgataaaggtgattggcatttctcatttgactcagacgaaggtgggggtacaataaccaatctacgaaaggcaatttacactattatgtatgtcattgatggcaggccgactatttaa

SEQ ID NO: 271220 - DNA, 669 bp, Klebsiella pneumoniae
gtgattcggactctgacagcgattccgactccgacagtgactccgactctgacagcgattcggactccgacagcgactcggattctgacagcgactcggattctgacagcgactcggatgctgacagcgattcggattccgacagtgactcggactctgacagcgattcggactcggacagtgactccgattcggacagcgactcggattctgacagcgactctgactctgacagcgattccgattctgacagtgactcggattccgacagcgattcggactcggacagcgactccgactccgacagcgactcggactctgacagcgactccgattccgacagtgactcggattctgacagcgattcggactcggacagcgactcggactctgacagtgattccgactctgacagcgactcggattctgacagtgactcggattctgacagcgactcggattctgacagcgattccgactccgacagcgattcggattccgacagcgattccgattccgacagtgattcggactccgacagcgattccgattctgacagcgactcggattctgacagtgattcggattctgacagcgactccgactccgattcggataccgaaccgcaggcaaataatgatacccatacggcggctatcgataccgtag

SEQ ID NO: 271221 - DNA, 693 bp, Klebsiella pneumoniae
atgccctatatatctgttagtatccgcatattactaatgtttctgggtaagactgacatgtctcaaataaccatccatattctgaatgctcaggaaaaactaactgttcactgtgagtggctgcgaactaacctgaccgatacctacatccgggccacaaggttgatgccgactccttcagtagatgtcattgttaaggccgggaagtttattattcctgagaaagggcatgccggtttttgtcctgaagctggtgttatctatataacagtcgaccctgaaaactccgcattctgcaaaaacgttgcgcactctcttgaacgtatgtttgctcatgaacttcaccatgctgcaaggtgggcaggaccgggatacggctcaacgctgggagaagtactggtctctgaaggacttgccgggcatttttctcttgagctttttggtggtgaatctgagccctgggagagccttaggaccgatactgttaagccctactatccacttatacttgaaaactggcatcgtactgattatgaccataatgcctggttttacggaacaggtgatttaccaaggtggctgggttatacggcaggtttcaacctgatatccaggtatctcgcatcatccccaaatttgaaagcatcaatgctggcgaacataaatgctgaggagttaaaggcttttatatga

SEQ ID NO: 271222 - DNA, 1212 bp, Klebsiella pneumoniae
atggggaatattacaggagtgcccgaaatatcagatgaattaaagtgtgagatacttaaaagagataagaagattcgtgagcgcgcagagatattagatataagtaaatctgatatctatgttggagaaaatattaatgaaactgttaaaacgttaccaaaacgtttaattaacaaagagcaagttagactgattgcaggtcccgaagaacatcggatgcatcttttcaattcaataatcaatgcaaaaagtagattaattatacattctacatttatcaatgaagaatgtattgctgatgtgtttgataatttaatagatgcggcacaacgatcagtccaaattgatattctatggggccaaacagaaccagaggaacagaataaacttgaatcttataaaaatgtcatagccaaatttgacgaattaaataacaaaatagtacaaaaaggattatctacacaaataaaattccatagagcccccactctatctcatgcaaaattcataatccatgatgaaatacagggtatttacagcgctacattaggttcgtgcaattggctatcgagcagatttaatagatttgaagtatctgcctgtataaccgacgatttaatcgtagcagatttaactgatatatgctcccatctatcaatgggtggaactggattagcaaataacctgagcagagaattagctgttttctctgcaagcttatataaaaatgttagtatacgcaaagaatcagatggtaatactagcgttcaaataatttctgcacctgagcatcaccctatagtaaaacaagcttgcaatgtagttaaaaacaatatatttatttgtagtcatagagttagctatgcgggtgatagacctataatattaccgctgaaaaccgtgaaagcgtacgataagaatatatctattgatattgcttatggaagatcaagtggggatctaaaatcagccgagcttaaggaattaaaacaaaatcttcagtctttaggtttcaatattacaaccgcagataatcctgaagtacatgctaagtttttctcttgggacaataacaatattgtagtcacaagtcttaactggttgtcatcttcttctaagggtgatatttacaatgaactaggtttccttattacacttcctggcattggaaatgaagtgaaggaaaaattccatgaaatgtatccagaataa

SEQ ID NO: 271223 - DNA, 210 bp, Klebsiella pneumoniae
atgaaattacaacttgtaggtaaaggcaatttgccgctactgacgtttattctggatggctgttctgatgacaacattctgaatttggctagtctggcgcgtcggcttggctgtagccgttccagcttgcttgaccgcatccacatgtatggattcgatagcgcagtgaggttttacctcaacgagaaacgaaagaagatgattaactaa

SEQ ID NO: 271224 - DNA, 1620 bp, Klebsiella pneumoniae
atgtcaacgaagcaaaaattagaacttaactggattggtaagcaaaagcgtcctcgtctggagccacgtattctgcttgaagacaagtcattatcttatggtgatgcagatagtgaaaatctgctaatacatggtgataacctgctggcgttgaaggccctggagcagaagtatgcagggaaggtgaagtgtatatttatcgaccctccttataatacaggaagcgcatttaagtattatgaagatggattagaacattcggtatggctctgtttgattagagatcgactggaaatattgcgcacattattatctgaagatggttcaatttggataacaatagatgacaatgaagcgcattatctaaaaattgtatgtgacgaagtatttggaagaaataatttccaatgtgatattgcttgggaaaaacgttacgctccaccaccagatacaaaaggatttggttatgttcatgatcatttactgtgctacagaaagagtgaacaatttcaacgtaattatctacctatgactgaagatcagactggaagatataaaaatcccgataatgatcctagagggccatggaaatctgaaaattatacttgtagatatactgcagatgagcggccaaacttatactacccaataatcaatcctcatacaggggaagagatatggcctagcaagacaagagtgtgggctatgtctagaggtgtaacagaatctaatttgcgggaaaatcgaatttggtgggggaaaaatggggcaaattcgaaaccggccctaaaaaacttcctttcagaagtgaacaaaggaatgatgcccatgtcaatttggaaacacactctcgcaggccatacacaagaagcgatgaaagaaatgttagctctttatggtgatgagccgtttacaacgcctaaaccagaaagactattacagaccatacttacaatcgcaactaataaaggggatcttgtcctcgactctttcgcaggatccgggacaactggtgcagtcgctcacaaaatggatcgccgttggatcatggttgagctaggtgaacactgtaatacccatattgtacctcgccttaagaaagtaattagtggagaagatctaggcggtatttctaaatctgttaactggcaaggtggtggcggattccgctacttccatttagctccttcattactcaaaaaagataactggggcaactgggtgataaataaggaatataacgccgaaatgctggcagaagccatgtgtaagcatatgaattttacctacgcaccaagtcagactcaatactggaatcatggttacagtacagaaactgattacatctacgtcactaccggttctttggcttatgaacaactcaaagttataagtgaagaggtgggaactgaacgcacattgttgatctgctgcaaagcctttatgaccgaaggggcagactttcctaatctgacattggtaaaaattcctcgtgccattctaagtaaatgcgaatgggatcaggacgactatagttttacgctaaatgtactctctgattcagaacaacctgacgatattgactacgacgaagatactgaaggcgaagaacaattatga

SEQ ID NO: 271225 - DNA, 150 bp, Klebsiella pneumoniae
atgcgcattctgttaaacatgctgtgggatcgttatcagaagccgctgttcattgtcgaaaacggactgggtgccagagatattcttcaagacgactttacggttgacgacaactaccgtatcgcttatctgaataaccacctgtactag

SEQ ID NO: 271226 - DNA, 1719 bp, Klebsiella pneumoniae
atgcacactgaaaacactccgaaagaaacacaaaaaaataaactggcaaccagcatacaaattgatacaccatctaatacaaatcaacaacaaccctcaacaagggtagaaaacattccccagcaagaaaaacaaataacaataactgacggaagtaaagacaaaataaatatagcaatattaattgggatttcggattatggctctcaatccacaaatctacctcagtgtgaaaatgacgtttctctagctaaagagataataactagaacaaaaaaccctagatatactcttcacatttccaatcgctgctctggacaggatgcaacagacaaaataattaatttctttcgagacattaaagagaaagaagaaaaaattgatgagttattcttctactttactgggcacggaattgcccatgaaaaaaacaatggcgaaattgagtctagattggtattttctgactactccccaagcagaataaaccaaacaacaataccttcagagtttattgacaatcaagctaggaacttatccccaaacacatacgttaaaataatagactcttgttatagcggtagcaaaataataaaaggcaatattgagcaacgagaaaagttcttaaacgagctatctaaggatgaaaaacattatacgcaaattggttttaacagcgtatatgttatggcctcatcaaggagcgatcaagtctcattcgccaatagtaaatttagtgacttctccgagtcattatttatatcacttagtgaattaccaggtgatgtaaaatatcgccatgttgtaaaccgcctggctgacgactttacaacaaaagaacagcggccagtgttcgtgacgcaaggatctctcgatgaggggtttggtgtaataagtaaagatttaaaagattacatctacaaggttttaacaactgaagaatccactgaggtaccaagcaacaagggtaacagaagcaatgaagaaaaaatactaaaagaactagcagaaagcataagacaaaaaacatctacaaagttgtttagtaaagacgacttttatgattttttaaagttagtcaataagaaaacactcacactccttgatcttctatcgcctttctacacagtagcaattgatgcaagtgaaaaacaaatagttccaaatgaaaaattcataggtgattggctaaaaagcaacactcactcttactttgctagggttagatataagaaaccagaaagcaccataagtgatagcttagcatcaaatttcctgaatacaacactaggaagaagcattcagaatacaaaaccaacttcaaaagacagtgcttcggaccctcaactaataattggattcactcctgtaggtatgattgatgacgctcatgaagaaaacagcagggtccgagaaataaggttaatacctaagggtgagatgaaaatattggattcaatattaatttacttaatcataattaattcacaggaaagaatcgcaatttttacatctatagaggcatgcccactaattgattgggacaagtactcatcaccaaaatgcccagcatggaaagttcatgaaataaagtcagcgaaccaaaaagtcgaaacatcaaatgaattagacactattttcaataacatgaagtccatagcaatagccttgataaattcaaagagtcttgatcaagaaaaaaacattccagaggcatag

SEQ ID NO: 271227 - DNA, 900 bp, Klebsiella pneumoniae
atggataataactttaatataaatagctcaaaccaaaatttatttaccgagccttcattcatgcaagtaacggtaaatgttgataatattgaaaaaacacttttcaaatttgagctaaaaaaggatggtgatgtgcttatgtattgcaagcatgcgcaatttcatagagatccaggtgaggcaccaaataatgacaataaaataaaacaacaaagatattcatttcatagaagtttagatagtgaggataacattaatttcataaaacaaacgtttgagatatccacacctggaataataaatactcacattgttactcctgtcattaaaaataacactggcttcatccatgtttttagtcgaagagcgccaaacctgtcattcgacaggtataactccaaaaaaaaagataaatataaaacgctatgcatcggtgatctggattgtgccagctcaacacttttttattctttgtttattggctcatcgacacaacattcttcagacaaaaaatctgaatcgaatgttttgacttttatcatagggggttttaaatttatgttaacatgggcgtatttgcctttacctgcgcataaatctggatttttaattcatagcggaacattaatgggagacgaagggaatgttattggtcaatccaagggggtagatgaggaaggtgcaatacaacaaagtttattattttttaaaatccttatagatgaatacagtgcaactcttcacgctcaagaaaaacttcccccagcctttgttaatgacctgttcaaagagactggttttttaaatggagggtgtttttctagtcctgacagaataaacctcataaaaataatgagtcgaaacggtagtattgcaaaatatccatttgttgcaaaataa

SEQ ID NO: 271228 - DNA, 366 bp, Klebsiella pneumoniae
atggataaccacggggctttttttatgcattcagattacaaaactcgccttaccgcgctgaccgataaattaaccgatgtggtgctgcaggaggccgacccggctaactggcccggtgctgataagaaagtgagtgagctgacgaaggacgagcgcggcgatcgctactgggataagaagaacgcggcggcatcgctgacgctgctaatcaaagtgcattcgcttatcggcatgcagacgcgtggcggaacaccttctgacaatcctgggcaggatgatgaagcattcgagctgggccagcaggtatcgaaagccgaacgcgaagcggccgccattattgagcgtttgcagaaaggtaagaaatga

SEQ ID NO: 271229 - DNA, 153 bp, Klebsiella pneumoniae
atgaagaaacctggtgataccttgcaaaaaggtgagattctgggatggactattgtttcagcgcggcaggaagagatctggaatgtactccatgagctgattcagtttgttgaaagttcttcaggcgtggaagttaaaaagcctttaatataa

SEQ ID NO: 271230 - DNA, 414 bp, Klebsiella pneumoniae
gtggtcatcgccgaaactgacggttttcaggctcttgatctcatcgtccagatagcggttcagtttccggagctcgtggtcatcgccgaaactgacggttttcagactcatgatctcattgtccagatagcggttcagctcgtggagctcgtggtcatcgccgaaactgacggttttcagactcatgatctcattgtccagatagcggttcagcttgtggagctcgtggtcatcgccgaaactgacggttttcagactcatgatctcatcgtccagatagcggttcagtttccggagctcgaggtcatcgccgaaactgacggttttcagactcttgatctcatcgtccagatagcggttcagctcgaggtgttcataatcttcactgacgctaaaactcttaacattttgtag

SEQ ID NO: 271231 - DNA, 648 bp, Klebsiella pneumoniae
atgccagtttcagaagccagacctatagcatgtttcgtcgggaatattgacagtacagtgccattgaaaggggcatatacgcggccttcatcagcaatgataccaacacctttacccaaggcttctgtagaaaacgttaaatcatttaccttagacagcggtactatcttacccgttactggtgaatttaaaatctgtccatcgattgtcttgaaagttgaaacgatgctttgcgaattttcattgttttttcctttcaagtcacttggctcaatgtttttttcatcagcagggtcgtcaaagccaaggatgaaggttaaagccatggtcaagaaaatcaccataagagcggctgaacaagcgaagataatattgctgtggttttccggattgataaacataggtaatgcaaccagagaggaaataccgaatgcaaaggattttaactttaccagacaaatgaacaagccagtgatacctgatgcaatgcatgccgcaatcatcggttttttcaacggcaaattgaccccatacatgcacggttcggtaagacctgaaaatatacaggtaaaacctgccgccagagatgtctgtttaagtttagaattacggcttttgatccctacagcaatactcgcagcaccctga

SEQ ID NO: 271232 - DNA, 180 bp, Klebsiella pneumoniae
atgtgtaagaaaacgattgtaatcaagtccctgatcatcaaaaataatattaaaatgatattttattatgttcagaacatcctgtatcaagtgagtaaccttaacagtttcgtcgaacgtccccccagcttcagcattgactatgtggagtgcaataaatgccgcctcgtcctcaggtaa

SEQ ID NO: 271233 - DNA, 249 bp, Klebsiella pneumoniae
atgagtcgaaatgaagaactgaatgctgactggcatcccgagaccataaaggccgaaatccataaacgtggattatcgttccgctcactatcccttcaggctggttacagtaaggattctctgaagagtgtgctgcgcacaccctgcaaaccttatcagcagattgtcgctaatgcgttgggtgtaactcctgaaacaatctggccaagtagatacagaacaagcagttacatcaataaggtggcctaa

SEQ ID NO: 271234 - DNA, 489 bp, Klebsiella pneumoniae
atggcaaagttgttggttttattttcatcattacttatttcttttggtgtggccgcaaagtcattgccagctattgatgatatgaaaaatggtcttgataaagtgggcttggtaaaaaaatcaacatgggaagatgaaaaaaaagatggggtatttctgaaatctatgtcggctgtgccgggagtggtagccatcctcaatgaagatcagatggctatttttatgaaaattcctgcttatgacgataaagaaaagcgcgtgaagagtattaatcaattattcgaacgctgtagaaagatggctgatgtggtgatgaagggagtaagcgataatcatatagagttaattgatgacattattagctcttcagctaaagtgcctggatttactgtcagtaatcttgttaaaggttttgaatttaacagtatgataaatatgcttggcgatggtgtggtggttcagtgtggtgtcaggaacacaaagatttaa

SEQ ID NO: 271235 - DNA, 408 bp, Klebsiella pneumoniae
atgtttaaatcgttgaataccgactggctgaagctggcattgctccgggtatttcagtccggctggacagtagtcatcctcgtgggtctgtctctgacgctctgtagtttctacgggcgtcaggcatttgtcgtctggtggttaacgttctccggcgcttttctgatcggggtgagtatctggctcggtaatctcccttaccggttgcttcagccgggccgtcctgcccgcaaatgggtacgttgcgcgtcctggctaatctgggctgtcggtgcttttctgctggcctttgcccctgtcttcgcgaccagtcctggggtcatgctgctcaatctgcttgctgcactgaccataatcattctgtattcgtggctggtttgtaagggggtattaaattggatcctgtaa

SEQ ID NO: 271236 - DNA, 405 bp, Klebsiella pneumoniae
atgtctctaaaacaaatatggcaagcagcaaaccctaaaggacatctgctgaccgctatctcgtttctgatccccattgtctgtggttctgggtttattatcgccatcggtatggggcttggcggaacggtgcaggacacgttaactccgggacaatttgatttatggcaggcgatggccactctgggcgctaaggcgcttgggctgttgccggtggtcattgcggtgggtatttccggctcgattgccggcaaaccaggcatcgcgccaggatttgtcgtcgggctggcggcgaacaccatcagcgcaggctttatcggcgggatgatcggtggctacattgccggctatatcgcgctggcgatcattaaaaacgtcaaggtgcctgactgggccgcgggttga

SEQ ID NO: 271237 - DNA, 1164 bp, Klebsiella pneumoniae
gtgacccatgccgacctgcacgccttccagcgtgcgccgagggagcgccgcgaaccgaacaagcgcgaagcgcagcgcatcgagaagctgcaaaccaagatgcacgaactggccgccgccgtggatgacgcgcttgataccgaggacgaggaaaaggccgatgccttgcaggaagaaggcgaagccgtgggcgagcagttgcaggcgctggaagatggcttgcaggactacggcacgaccgtgaaggccgcagccggtgccatcgtcaccatcgaccgcaacgggcaggcagtgattcatcgcgggttgatgcgcgaggccgaggccaaggcgctgcgcacactggaacgcctgcgccaaggtttcggcagcgaaagcgaagccgggaacgacgacgaaggcgaggacgacgagcagcccaagaccgccgccatgtccgacaagctggcgcagcggttgagcgcccaccgcaccgccgcgctgcaaatcgaagtcgcccggcatccgcaagtggcgctggccgcgctggtgcatggcatggtgcagaccgtcttgcagggcagccactacggccacgacttgccgctgggcgtgagcctgaaagcgcaagaccggctggaaggcatcgccccggatataccggattcgcccgccgccgtggcgctgcgcgagttgcagcaggtagcaggcgaaggcttgccggaggacagcgccgaactgttcgccgtgctgctagcgaagtcgcaagatgaactggtgcggctgctggcgatatccgtggccgtcacggtggacgtggtgacaccccgcgccacgccgcagcaaccgggcgcggaactggcgcaggctgtcggcttggacatggccgcatggtggaagcccaccaatgagggttatttccggcatgtgccgaaggccgcgattctggaagccgtggagcagtacgccccggcgcacgtcacccggctggcgaagttgaagaaggccgacattgccagcgaagccgagcggctggccgatggcaccggctggatgcctgccatcttcaaggccgaaggcaccgacgacaccacggcgcaggatgcgccgcaggcggtgacgaacgacgagccggaagccatcgacaacgacgacgagcagcaggcccacgcactcgccgcctga

SEQ ID NO: 271238 - DNA, 315 bp, Klebsiella pneumoniae; identical to SEQ ID NO: 199651

SEQ ID NO: 271239 - DNA, 384 bp, Klebsiella pneumoniae; identical to SEQ ID NO: 199334

SEQ ID NO: 271240 - DNA, 327 bp, Klebsiella pneumoniae; identical to SEQ ID NO: 158945

SEQ ID NO: 271241 - DNA, 243 bp, Klebsiella pneumoniae; identical to SEQ ID NO: 158940

SEQ ID NO: 271242 - DNA, 564 bp, Klebsiella pneumoniae; identical to SEQ ID NO: 199576

SEQ ID NO: 271243 - DNA, 192 bp, Klebsiella pneumoniae; identical to SEQ ID NO: 159005

SEQ ID NO: 271244 - DNA, 1410 bp, Klebsiella pneumoniae; identical to SEQ ID NO: 199574

SEQ ID NO: 271245 - DNA, 2139 bp, Klebsiella pneumoniae; identical to SEQ ID NO: 159008

SEQ ID NO: 271246 - DNA, 1800 bp, Klebsiella pneumoniae; identical to SEQ ID NO: 159009

SEQ ID NO: 271247 - DNA, 1248 bp, Klebsiella pneumoniae; identical to SEQ ID NO: 199571

SEQ ID NO: 271248 - DNA, 1068 bp, Klebsiella pneumoniae; identical to SEQ ID NO: 159012

SEQ ID NO: 271249 - DNA, 192 bp, Klebsiella pneumoniae
atgcgttacttcaacgttgaccaaatctacgcagatttgatcacaggccgaacaacacgaacacttgtttacagttcacttgtccgggcgcgtaagaatgaacagcccgatagagtggagatgttcgaggaagcgatccgacgctttgacgaatggcgagcaacgccaaacttcacgccagtgaccagctaa

SEQ ID NO: 271250 - DNA, 444 bp, Klebsiella pneumoniae
atgactctgacggcactgatgactctgacggctctgatgactctgacggctctgatgactctgatgactctgacggctctgacggctctgacggctctgatgactctgacggctctgatgactctgacggctctgatgactctgacggctctgatggctctgatgactctgacggctctgacggctctgacggctctgatgactctgacggctctgatgactctgacggctctgatgactctgacggctctgatgactctgatgactctgacggctctgacggctctgacggctctgatgactctgacggctctgatgactctgacggctctgatgactctgacggctctgatggctctgatgactctgacggctctgacggctctgacggctctgatgactctgacggctctgacggttctgatggctctgatggttctgtaa

SEQ ID NO: 271251 - DNA, 315 bp, Klebsiella pneumoniae
atgaaaacggttggttatgcagcgcacgcttccgacgcgaaactggttccgtggcatttcgagcgtcgcgatttacgtgaaaacgacgtcgccattgaaattctctactgcggcgtttgccactcagacctgcatacagtcaatggagactggggggcacagccttacccgttggtcccgggtcatgaaattgtgggggttgtgacgtcaacaggacagaacgtcaaaaaatatcatgtaggcgatcatgttgccgtgggttgtatggtggatacctgtattgtttttccaatatctttaacggtccggagctga

SEQ ID NO: 271252 - DNA, 285 bp, Klebsiella pneumoniae
atggtattttttagcaatacgtcttccgtcaacccggaaaatacggtcgccatttttaacgtatgtttctgtaatctggattttgtccccacccttaccagcaacgatttttataaccttctcaccaggtttaatgaatcgaacatctctgtccatggtgaagttaatcatatccccaatttcatagcccttatcatatttatccaccatgtaataatcagctggaatacagccgtgcaggagtccatgccccagagtgaagcgggaaaagaacagatgcattaa

SEQ ID NO: 271253 - DNA, 405 bp, Klebsiella pneumoniae; identical to SEQ ID NO: 219785

SEQ ID NO: 271254 - DNA, 516 bp, Klebsiella pneumoniae; identical to SEQ ID NO: 95399

SEQ ID NO: 271255 - DNA, 357 bp, Klebsiella pneumoniae; identical to SEQ ID NO: 102369

SEQ ID NO: 271256 - DNA, 159 bp, Klebsiella pneumoniae
atgagatcccgcccattccggttcgccggccacaacggcttcacaggcttcccgcagcgcgatttctccagcgtcgggatgaagcactggcgcagcttttacgcagatactgagtgcccgaaaacctggggcaatacgataaatttcaggggcaattga

SEQ ID NO: 271257 - DNA, 603 bp, Klebsiella pneumoniae; identical to SEQ ID NO: 269405

SEQ ID NO: 271258 - DNA, 177 bp, Klebsiella pneumoniae; identical to SEQ ID NO: 139670

SEQ ID NO: 271259 - DNA, 315 bp, Klebsiella pneumoniae
atgaacagattatccctgatccgctataccagcgccgtggcgctggggttatccaccctgtggtccgccgccgtttgcgccgctgaagacgcgggggcgttcgacaagatccagcagatccgcgccggcgacctgaatattggctacgtggatatcggcccgcgcgacggccagccggtgatcctgctgcacggctggccctacgacattcagagaggtggcgccggctctagcgcagaagggttaccgggtgatcgtgccgtatctgcgtggctacggcacgacccgtttcctctccgccagcacgccgcgtaa

SEQ ID NO: 271260 - DNA, 1425 bp, Klebsiella pneumoniae
gtgaggttagaggcgttaggtcttacagttaaagggctcaactttggtactgtcgacgccgaggcagacaaaagattagctgattatttcattaatacacctcaagtcgagcaagctttaagtttctatagtgctcatttccttggcagaaagggggctggtaaatcatctattttcactcagttaccaagattagtaagagcaaaatatggtcaggaggttattgtgaatataatgacgcctgatcagtatgcttggggggctttgaaacaatatcaagagcaaggcttattgccagagcaagcgcattgtaacgcttggaagtttgcaattgcaattgaagctgctgctgaaattattaaatcaggaagaaggtttacagaaaaaagatctcaagatgcacttgcgagaataacgaaattcgtttctgataactatggtggaataaatccaacgactcttggcactgcaagaaaattacttactggattaagttcatttaattttgaagctttcggttgtggaataggatttagcaaagataatacacaggcaacattgactccccaaattatcaagatgattcttgatgaacttaaagaaatatgcacagatataggtgtgttaatcgctacagatagactcgatgactcttgggatggttcggatgatgctaaaagcctattgattggtttgctaaaggcaactaaggatattaatgataattattctgataccagagccaaaggcatccatgttgtaacttttttacgctcagatatttatcaaggactggagtttgatgacaaagataagcaccgcgcattagaagaagaaataatttggacgcctgaattattgaaagatatggttaatgctcgtttgccaaaaaatacaaatattgatgaaatttttgaggtgggtgagatgaggggaagcatttctccgtttaattatttagtgaaacgcacttttttgcgtcctagggaagtgattcaatttttgcaggaatgccaaaagcgtagtgtaagtgatgctgttgaaataaaaaaagatataataagaattgccgaggagaggtatagtgcatggaaagttgaagatttaaaacaggagtataaaaggctttaccctcattttggtgagctattggaatctttacggcaaacacagcatcgctataattcaacagaagaatttgtgaacaagattgaagagaaagcccctgatctttgcaagaaatatggatctcgtgaactcatgaaaactctcttcaatgcctcagttattggtgtccgtttggggaactctggtacagctaggtttcggtgcgaagatgctgatctaatgttacctaacacaggttctgtgtatattcaccaaagtctatataaaggtttgaatattattgagacaagaaagtga

SEQ ID NO: 271261 - DNA, 306 bp, Klebsiella pneumoniae
atggtggtcattctggtggtcttgacagaaagtgagttccgtattagcttatttattagccagttaatggcaaaggcgatcccagtcagaggagccaaatttaagaagcctgctttcgagcaggctttttgcttttttgcgtcgctgacgttaactcagcatcgcatccagcctggcaagcacctcgttgacaacgacgtcaggtatgcgttccagacgcttgcctttccgggccgccatatcgatagtcctgggctggtcgcagcgaataacgcctgttgttttggtccccgcctcttccagtga

SEQ ID NO: 271262 - DNA, 810 bp, Klebsiella pneumoniae
atggaaggtcttgatatgtatttaatgaaaagctgtcaaaaaaaacacaatataattgagagtaactctataagagtgggaactttatttggtttcagaacgctggagaatttagagctacaagataaaagtgaagcatcttatgattacatggtaagaataattgaggctaatatcccatccgaggtcttcgtgtatgttgcagcttgggagatcggtgatgaaaacttcccctataatagcgtaagcaccccactaaacagcaagcaagctaaaggtatttgggaggctgagcgcatcaggagtaacagatatgatgttgacgtgactgatatgaaaatttatttcacaagcttacatcataattgctttgtattctgcatgtctatgtctgaatacttacccacacaacccaaatttaaagggtatgatgattattggtatttcaagcataatgacgctactgctttttctgaagaaataaaggagttaataacaaaaaaaataaaagacagcaataatcctttaggcatagacaacttcaacccagacttaattgaagttaaagcaaaacacggaatggttatgtataacaaaaaaacatcaaccatttctcgtggggatgaagcaaatcttattcagcttataaaaagacttgaaaacatatgcttcacaaaatatgaaagatacaaaaaagatgaagagtatagattttgctttgatgtattttatgacaaaatccccatatcaataaacatgccttacattgacttatctttacccctgaaattatctattaagatacaataa

SEQ ID NO: 271263 - DNA, 714 bp, Klebsiella pneumoniae
atgtgtataagagacagcgataataattggcattgctatatagtatgtaatactggctgcgatctacctgcattacctgatgaaaataagttcactatcttatctgtagatctaaataaaatgaatgtccaaaagtctgctggattacattcttattatgacgctataagagaagataaaggacagcgtttatatacagcttttaaaaaatgtaacaatgacgatttttttatggttgttgattatgatgactttattcataaagatatctccttatatgttaacaaacaccagaatgaaaatggatggtatattgataaaggttatttttactctggtggtaacgtcttaattaagacaaaaaaattcgatacaaaatgtgggacttcaaatattctgaaagtttcattggtttacgaatttaataatggagaaaaggaattgtcaatttcattgatcaaagaacttcttggcagccatcgatttttaaagaaatacatggttgataaaaagaaagaatttaaaagtattccgttttatgcagccctatataatatcggtatccctggctcaactagcggaacttcaggggtcatgagtaatttcttttcgttaaatgttttgattagaagacctgatcgttttgtcagaaatttttttaatataagatggttttcttcaaaaaagaaaacattctttggtcttgttaattaa

SEQ ID NO: 271264 - DNA, 750 bp, Klebsiella pneumoniae
atgggcgaccgcctcggccttgagattggcctcatgaccggcaaactcgcgcaggtgaaatgccttgagcagatcgtgaggagccagatcgcgcccccgggcattttgcgaatcgaagaactggaacgcctccgagatatcctgcagcacaaagcagaccacctgacagcggttgagcagaaagtcaatttgctgctcgtcaaactcagggcgggccaccagccgacgcaactccagatagttgcgtctgaggttgaactccgaatcccggctggggaagcgctggcgctgcataaacgcatcgataggtccacgcaagacctgcaattgctcacgcagatcctgacgttgaaaccggatactcttctctttgccactgcgattttcgttatccagcacctcgatcagcgccttgacggtcaacatcagggtcagggtgcgttgctgaccatcgacgatatcaagcatctcgccctgctcactatcggtgtgctgatgaaacaccaccgagcccagccggtaggcgctcttgtcctgatgggttgccaaatcggtaaagagatccgagatattcttggagccccagcggtaaggtcgctgatagcttgggatggccagttggggaatggccagcaactggcgtaccgactgcacttgattattaatgctctccatcatgcctcctgcggtatgaagtggtcaacaaaaactggccaccgcgttagagtttttccagtatcggttttctga

SEQ ID NO: 271265 - DNA, 525 bp, Klebsiella pneumoniae; identical to SEQ ID NO: 219718

SEQ ID NO: 271266 - DNA, 612 bp, Klebsiella pneumoniae
atgtacgggcttttttttcgcatgtggcacccgctgggggggatgagaacccccgaccagggttcgacaactggcaacgccagttggacagaccgcgcacgcagtaagcgggctgccccgcaggggcgagcgaagcgagtcaatcccccctcaccgccatattttaagaagagctcgtacgcatgtacgggcttttttttcgcatgtggcacccgccggggggatgagaacccccgaccggggttcgacaactggcgcagccagttggacagactgcgagcctgcgagcgggctgccccgacaaaaacgccgggagcgtttttgaacaacgcctgcgttggccccgcaggggcgaggcccagggatgggccgagtaacggcgagcgaagcgagtcaatccccccctcaccgccatattttaagaagagctcgtacgcatgtacgggcttttttttcgcatgtggcaccgcagacatccccggggtcggcagcaatgcctctcccgggctaccagaccctacccgccaggtagcccggctaagcgcagcgccgccgggaggatgcccaaaaacaacaaagcccgggctagcccgggccttgctcacagtatga

SEQ ID NO: 271267 - DNA, 849 bp, Klebsiella pneumoniae
atgagttttacgagtaaagaaaccgaagagtatgaacattatgagtcttattacttttgtaatattatcagaaacgtacttaacaaccagagtgcttacatgagaggtcttaacgattaccatggggatggtcgttctattttttttgaaaagcccttcccaaaatggtctcatttccatgattttattgagttcatagtggatagtgtgtacgcagaaaaattaactcatgacaaccttgatgaacaattaaatgcatttaaacaatattccacttctttttctgaaccagtcgatgcagcaatagtttcctttgcgagtttgagacggtattttcttgcatatttaagtgataatgataaaaatttgaaggaaagttgcatctctgatctcgaagatttcttatgtttattttatgaaggggaattgtataagaaatatctggagcaaacaatcaaggaaatcttttatatattgtttggggatcgctctgtgcttaggttatacaatgagatgatcgctgagtcacgtgggcttgatttcaatccagatgatttcaatgttaaaacaaccactaagaatggatacctcaaaagattaacgattcctaaatgggtacagaaggcagtttaccatcgagacaaaggccgatgtgttatatgtaaaaaagaccttacggggttggttaatatatataataaaactaattacgatcatattgtaccattggcgcggtttggaattaacgatgtgtccaatattcaattactttgtgatacatgtaatcaacagaaaaaagcgaataacaataactcttctaaggattattttccttggtacccgatttaa

SEQ ID NO: 271268 - DNA, 387 bp, Klebsiella pneumoniae
atgaaagagaaaaccgtacttaatccgatacttgttgaacggcttacagagttgaacaagcgcggtatgactaaatctgatatggctagggttgcaggggtaactccgcaatccgttaacggctggtttaaaaaaggcgtaataagcaaaaaatcagcgttgtctatagctgacgcagttggtgtttcagtgccttggttgcttggtgaggacgttggagaaaaagacggactcaagcctgacgaacagcgccttcttgagctttatcgccagttgccggaagatgagcaggaaaatatgctgcgtatattctccatccgccttaaagagctggatgctttgtatgagaagtatatgaaaggtcgcattcggtcacagaatgattga

SEQ ID NO: 271269 - DNA, 474 bp, Klebsiella pneumoniae
atgattaaacctagcttcccgccactcttccctgcgggttttcatgatttgactgatgaagaattacgtcaaatatgcgtaacaaatttcgaagattctgcacgtcgggatatgctatactgtaatttaatacagttaattactcagtttcggggccttaaccaagcatataacattgtcagtgagatctgggttgatggttcttttactactgaaaaggttgagcctgatgatattgatatactgattgtgctggactatgccatgttaaacgcggttccacagcagatgcatcaaacggtagggctattactaaaccgtgactttgtaaagcagaactataatatcgatcttctaccattggctcaaaaccatccgaatgtggattatgaggaacgaagaagctattggcgcgggtggtttggttttgatcgacaggagaatccgaaggggttggtgaggatttcattatga

SEQ ID NO: 271270 - DNA, 927 bp, Klebsiella pneumoniae
atgaaagattttaaaagttcaaaatataatactcatcttaaaattcttaccgaagacgcaaaagcgtttgaggcgaataaaaacacttcttttgccgatcaagttcttttcgattcactcgattcatatatttctgaaataaaggggcaaatacgcgataacgaagttaagcatcccttagccgattttttagagatgcgtttaaaaggcgttactgttgataacggaactatacctttagaaatgttatcggtaattacacaaaatatatccaatcttattcatagagcaacaaataaattaacttttggccgtgacagtcacagagtccccaaagatatcaagcaattgctaaatcttagattggctaacatcctacctggttccacgcgcctaggcataagcttaaacacaggaaactctgaattatttgatacaatcccatcctcagcgatgaaagaaatattccacttgcttgaaagtgactccgataatatttttatggataaagtggccgagataggttttagcgcagcacaaagtctgaaaaatatcattgaagaatgccaaagaaatgaagtaactctccagttaaaatggagcggcccatttagcaataatagttacagttatctagatactgatcgtcttgctatttttaaagataggttaacttcgaccaggataacacaaccgcaagaagaggttttatcaggtgagttagctttactttctaaatatggcaaacttgaaattgaaatatttggcgaacatgtaaaagcatcatatccaattgatatgcttgagcttttacagtctaggtataaagtgggacaacacatacgtcttttagtggaaattactgaaattcaaaacgtgactctaggcattaataaaagaaacatagtagttaaaaatatactgtaa

SEQ ID NO: 271271 - DNA, 273 bp, Klebsiella pneumoniae
atgcccactttgaaaaaagaacgtatcgatatacgactgaccgatgaagctaagtcagtcattgaggaagcggcgatcttgtccaatctaagcgtgagccagtttgtgataagtagcgcagcagaaagagccacagaggtgattgagcagcatcgcagaatcgttttgtgcgaagattcctggaaattggtgatggatgccatcaacaacccagatcaaccgaatgacagaatgaagcgagctgctgagcgccttaaaaatttaaggacctga

SEQ ID NO: 271272 - DNA, 519 bp, Klebsiella pneumoniae
gtgaacacgtatgatattgaaccaatacagaaagattttccatacgacattagctccttcgactgcggtaacgaggcgctaaatttattcctgtcagaacatcttcaaagacaggacgaaaagcagattctgcgtggatacgtatatcttgagtatggatctggcttaccaaaagtgcttggcttctttactttggccggggggtcgtttgagcgaagtagatttccatccaaaagccagcagaagaaaattccttataccaataccccatgcataatcctgggccgactggctgtcgacaagacagtccagcgacaaggcattggtgaaatgctggtggtcgaggcagcaaaagtggttcttcaagcagctaacgcgataggtcttcatggtatgtttgttgacgctaagaatgaatctgcttgtaaattttatgaaaatttagggtttactaggttgattggtgataatgaaaacctattcttttaccctacatccaaaattgcacagctcccataa

SEQ ID NO: 271273 - DNA, 153 bp, Klebsiella pneumoniae
atggagttagaaattggtcgctcttcattctatcctgaagacagcatttacatgattgtcgatggcaaaaccgtaataatggacagaagcacggccaagagattcgttgagtccgttgtttctctcggtcactatcatggcatgattgagtaa

SEQ ID NO: 271274 - DNA, 1011 bp, Klebsiella pneumoniae
atggttggaaaatcatctcgattctcagtcgttcgaagtgatcaagaccggatatcggcaactgatgggcagactgaaatttttggcgttgaagctaacggtgacgtcaaagtcacgaattcactttatgccaaaggcattctgcaaagtgattatcaggttaaagcacaaagtatcgagctttcattttcctcgccttacatcgattttcattatgggaatagcgtagccgactatactcatcgaattattgcggatgatcctgtggcacttggttttgaatgcagtataagagtttccaaaaacataagagcgcaagaaggtataaaagcagataagtatatgcgcgctgcgggtagagttggtttcattgcgcaatatgacagtgaccccggcggaaatatcggtgatattcgagttgccccgatcttgtgcagccaattcgcaactataggctctgatggaaacgggaacgctggcgcgaatttttggtttgaggaacacataggtaataaccaccgtttggtaactcaggtcaagggatatggtgcggcggttcagtattggcatcatcgcagcgatgggatgatttggaatagtcaacgtggggatgtggcatgggctgcaacctctgataaaaatctcaagcatgatattaagcccacagacggtcgacagtcattgcagaatatcaacgctatggatctggttacatttatctataacgacgatgaacgccagcgtctgcgtcgaggtgtaattgctcaacaaattcagaaaattgacccatgttatgtgaaggttagcaaaggggtgataaaccatcctgccatcttggatgaaagtggtaatgagattgagccagaacgtatggagacaattgaaaaacttgtactagacactaaccccttgatgatggacgctattggcgctatccaggtgctgtcacgtgagatggaagaaatcagacgagagaatgcagagcttcgcaatttacttacgcttaaatag

SEQ ID NO: 271275 - DNA, 522 bp, Klebsiella pneumoniae
atgtctatgtacgaagtcggcactgttactggtgctgcaaatcaggcgaaagtgaccggcgccacaacaaaatggtctaacactgctctgggtattcagcagggttctattctggtcgtttatcgtagcggcaatgcagatctatatgcaattaagtcagtggatagcgacacccagataacgctaagcagaaatatctcggcggctttctctggcgcatcttatggcatcatcacgtcagagacagccagtacgtcagctttcgctaaccaactcgccagtgcattctctctttggcgtagtgtagtcgaagggtggtctgccgccctgacatcgactggtaacattacgatgacagacccgatcactggaacatcagtcactgttcctgcgattaagggaatggcgaagcttgccggaggtaataatttcaccggcacacaaagcctggatagcgacgactcaggcttcattcttggaaagaacggcgatattggtctggtcaagaagagcggcacttag

SEQ ID NO: 271276 - DNA, 1323 bp, Klebsiella pneumoniae
gtgaaactggagtttttaatacttgtcaaaaataatgacactttttgcaatagcaaaaaatcatttatagaatttttaggggtcgattctctcatctctatcaatgggcaaaatctttcatataagaaaagcaataactcaaagccattaattactgttaagttttcagttgaaaccaataatatcccttcgaataaagaacggtattttgttattactcttgagaataatgatgaagcattggttgatgagttttctgaggttggagataaaataaaggagataagccgaaggataaaccctgagtcgacaataattaatgtgttatgggatgatgttggtagatattatgctaataaagcctaccctctgataaatgaagtcgagaatgttatgaggaagttgatcggtaagtttatgttgattaacgttggtatggattggtcgagggaaacgataaatacaaatcttgctgaaaaaattaaaaaatttgatggtgatgatagatatctaaatgatcttcataaactcgactttatccatttatcagaggttttgtttaaaaataaaagggatattacattagaagagcttgatagaatcatatcaaaacaaaaaatagatgagtcggatatagctaaaataaaaaaatacatcccaacgtctaattgggaaaaatatttctcaagtttaattgaaacgaaatcgggggagcttgaagaaaaatgggagcgtttatataaactgaggaataaagttgcgcataacatattcataagtaagcaagatttctgtcaaatgaaaaggttggcaggggatgttaaaagtgtgcttgatgccgctacaagcaagttgaatgaaattagtctcgaggaagaggaacgtaatcaaatcattcattcttacaaatcgaataatgcttacgctgtatatgatttagccgaaaaagctgttgctaattattacataaagaaaggggttgatgtttcttttcctgacttaataaattttggggaaggtaccgacttgataataatggagagtgaccgtgttgttgcagttgaaataaaagtgatagtttatagaaatccatctagaattatcaatgttatgaaaatggcatcgcgccaactcgaaagttacatgtcacgtgaaaatttagagtatggacagattgtaggtgttttacatagcaccagtaatggtttatatcatatttcctctgagtctatgtgtttgttgagggaatcaatggatccaaggatatcgataatgttcggtattattaatgatggcaatgagtttgaagtgattgatctttga

SEQ ID NO: 271277 - DNA, 534 bp, Klebsiella pneumoniae
atgaacaaccgcgattcaatcatcaccaaagagcaattaaccgaatgggtttcgcagctcgacctcgatggcgactgtgatgcaacagaccatcaattagaggcgctaattcgacaatcactggttgcaatgaacagcgagccagtggcgtttgtcgataagtcatggacgttgacctattaccagccaccaatgaatttaggggtaaagattggcgataacctctatcgccaggaacaacctgctagggatagttgcgcgatcgccgatgttatcgctgaacgtcaacggcagcagtctgtaaagggattttcgacagagcaggatgatacgtatgttggctgccagctggcggctgctgcaatctgttatatcgaaccgatggaggcgatgagttactggcccgctgactggcatgacgacagtttcaagccgacaaacgagcgacggaacctggtgaaagcagctgcgcttattatcgctgaaattgagcgtatcgaccgtaaatctgatgcggagctgaaaaatgaataa

SEQ ID NO: 271278 - DNA, 183 bp, Klebsiella pneumoniae
gtgaaaactatcatcgtaacactggagatcgatgttcctgataatgccaccgataaggatatttcagactgggtggacgttgaatatgggcagtgcggaagccgcaagctggataacccatgcatggctaatggtggtgatgctactgaattattccgccattactggaaatatgaggcctaa

SEQ ID NO: 271279 - DNA, 138 bp, Klebsiella pneumoniae
atgaataaaaaactcatagctgaagcctcccggtttcagtcgtcgcaagagcgtaaaggattttggtgtttaatcctggttacgttaactgcagcattaacgctcttctttatttttaatatggcctatatggcctga

SEQ ID NO: 271280 - DNA, 126 bp, Klebsiella pneumoniae
atgaaattaaccattggcaacattcgtttattgctcgtgctgggctgtatcgtcatctgggtggctgttgcatttattttttaccccgctgttgtttcagtctgggattactttcataagccgtaa

SEQ ID NO: 271281 - DNA, 273 bp, Klebsiella pneumoniae
atgaaaacggtccctaatgttaatcagcagctggccgatgtgatgactgccattgcggcactcaatgcaatgaatacacctgttaccagcatcatgatttattcaggaaagccggttattcgtgtttcccgggacagtccgtgcgtcagtcatttcagggagcagaaatcagattatacgataaccggtattgaccgtcaggggcactaccgccagggtgaaattgagttttatggctgcagggttatctggtccgaatctttacttcactaa

SEQ ID NO: 271282 - DNA, 699 bp, Klebsiella pneumoniae
atgaaatttttgcagattcagaccagattctttatgggtaaaaggtatttgcttcttttactgtcagtatcgcctttaattctttcaggttgcgatggtgcgcagaaagctgcgactgaatatgttgcacaacaaatgcgcgaccctagctctgccacgtttcgtgatgtccagaccgttaccgactctgctgatccttatgttcaaaatatctgtggtttcgttaatgggaaaaacttgtttggtgcttacaccggtgaaaaacggtttgttgtcgagattttcactgggcctcaaaaatcggcctttacccccttgagattcattgttgaaggtgatgacaaccaatctcgtcgggccacgaagggatcgaacaaaactcctcatccgcaaacacttttcgaagaacaatactggaacaaacgctgtctcaccgataagcgtaaacctacatattctggtgttagctggaaaacaccctttgagctttgcagagagaagatactctcatcattagaaattaagggagatgtgccagtagtcgcagacaattccattaatggagattcgattcttgagtggtatggcgataatgaattctttgtgccgacatcaacaccaaatgtgatggatctgcgtcgtgttcgttgtgttgtgaataatgcatctggggaaatcagtgagttcaatgtcttttaa

SEQ ID NO: 271283 - DNA, 1185 bp, Klebsiella pneumoniae
atgacgacgttatttccctggctggcagaccccgactggtcccgtggcgtgaccgagacgctggagtggaagaccgacgtgctgcagtcacccaccggcgctgagcaacgtatttcccgtcgtctctcgcctcgccggacgtttgagttcacaacactggtgcatgacacgggccgtcagcgttttgagaatatgttatggcagggctgtgccggcacatgggccatgccggtgtatccggacgttttcgcgctgccggcagcggtatccagtggcgtgacagcgctctccataccgaccgccgggcgtgactttaccgttggcggaacagtgttgctgaaaaccgacgaatcacctgcagcaaccagccggatggtcaccatcgccggtattgccgggaatgtactgcagctggcatcccctctgaccgacagctggcctgcaggctcgctggtgtatccggtacgccaggcagtactgacggaaccgccgtcgctgtcgcgcctgaccggttccgcgacgaccgcgcaggtgcgtttccgcatcgcagagcacaataccttcagcgatgcgccggtactcacacagtaccgtggccacccggtgcttgagtccgaaactgactggggcgaatcggtcagcggcagctatcaacctctgattcgtgagctggacaacaacagcagtattccataccgactggacacggcgggtcgaccgttctggcggcagacacacaactggttcaccgtcaatcgccaggcgcagacattactgcgccagcttctgtggtatctgcgtggccgtcagcgcccgatatgggtacccgggcagacgctggatttttccccgaggtccgccatcagcggcaattctgttgatgttctcgaggcgggctttaccgagctgggtattcgcccgggtcgccgtgatatctgcattcttctggcggatggtacccgttattaccggcgcattgccgacgtgagcctggtcagcggagctgaacgtctggtgctcgatggcgatgccattaacacagattcacacccgatagtttccgtttcgctgatgactctggcccgccaggacaccgacagcgtgtcctgggagcatgtgaccgacgccgatggcgtggcccgggtcgccaccacatttactggagtccgtgatgagctggagtga

SEQ ID NO: 271284 - DNA, 2694 bp, Klebsiella pneumoniae
atgggcggtaaaggttcgaaaaaagtcaccgtgggctatcgctattcgtgggatgtgcaagcggggctggggcgtggtccggtcaatgagattgtgtcgatcatggcggataaaaagactgtctttgcgggtaccccggggcagatttccgccagtacgtcggtgtacatcaacaagcctaacctgttcggcggcgatgataccggtggtgagggggggatacaggggacgctggatattatgatgggcgagccgggtcaggtgccaccggcatccctcctgaaactgctgaacggtctggtgccggggtttcgtggcgtggtgaccacgtttttcagcggtctggtcagttgctatagcgccagccccaaaccgtggttataccgtgttcgccgcacgactaaaggctgggacggtgatgtctggtacccggagaaagccaccatcatgcttgaaaatacagagggccagcttgatgacgagtctgctctgctgccggatcagattgccaatctgagagctattcatgcgatgaatccggcacacatccttgtggaatgtgccacaaatcgcgactggggacgtcaactgaccctcgcagatgacctgaatctcgacagttatcgcgccgcggcggatacgctttttgacgagggttttggcctttgcttccgatataaccgtcaggacggcctggacaccttcgttcagcagatcctcgaccacgtgggcgcagtgcagtatgccgacctggcaacgggaaaactgaccatgaagctgctgcgcggggattacagtgtcgataacctgccggtatttacctacgacaacggcattatcgccgttcaggatgatgacagcgccacgaccacgtcgaaccctaatgagattgttgtgacctggaatgaccccgtcacaaacgccgatggtgaggtccgggcacagaatctcggagcgatacagaacagcgggcttaacagcagttctgtcgaatacagagcgatccccacgcattccctcgccgcccgtgttgcacaacgcgaccttgagactgcgcagtctgaacttacccgtctggttatccagttcgaccggcgcggcggtatcctgcgtcctggagatgttttccgcgtcaagttgcctgaccgcaatatcgacaatatggtgctgcgcgtggggaaaatagaggaaggcgataccggtgttctgacgctgactgtggtgcaagatgtttttggactgccatcaacctcgtatagctccgggcaacaggacagtggctggacaccccccgataagtcaacacgtccagtcactacccagcggctgattgatctgccctatgcgatcctggcgggcacgctcagtaatgctgacctcagctatctgaatccagaatctggccatctgggtgtgatggctgtcgcgccgacgtctctcagtatcaactaccagctgcagacccgggcagcgggagccgcattcgctgaccgtggccagggagactggacgccatcagggacactgacgtccccggtcggtcgcctcgataccgtcctgcatgtgaacatggacagctttccgtcagtgggagatgggctgattgttaatgatgaaatcatgcgtgtagatgctgtcgatcttctggctggcaccatcaccgtcggtcgcggttgcatggataccctgccgtcaggtcactttgccggtgaccggtgctgggcgtatcaggatgcactggactccgatgggctggaatacctgtccggcgaaacggtggaggtacgtttgctgacccggaccagcgcagagacgctggcagaatctgccgcgccggtggtcacgctgaccatgtccgggcgtcagtcccgaccatacctgccggggaatatccgggtcaatggcgtcttatatcccgatgtggtcgcaagcacagataaatttactctggcgttctctcatcgtgatcgtctgctgcaggcagatcgcctgattgactgtactgaaaacagtatcggccctgagccaggtacagagtacgttgtgaaactgattgctcagggcaccggtgctgaggtctggtcgatggccaccagtgacgccagcattccgatcccctatgtcaccggcggcagtggtgcggcaacgcacgccctgacgctgcagagtaaccgtgatggcctgacatcgttgtctgtattccagaccctgttgcctgctggccgttaccacgcgctcccggtcacgttgtcgctgactgttctggcgggagacgactgggctgcgattgcgccggaagatacggccaccggcgcggtccctgagctgcacgccattgctgtcgctgccggtatcaccgactggtatccgcctgacctgctggcccgtggactttccattcctgcggacgatatcagctatccggccgggacatggccagcatcaccctggtcgtttgcctctcatcaggttctgtccatcgtccggtggaccgtggccggggtgccgcgcaccgttctgaccctgtcaggtgatgtttccggtatcgcgctggattcgatgaccggttccgctgccgttattccctggaatgccggtgtttatcaccctgagacggatatgacgttgttcacgaccgatgagccggttctgaacgagggcataatttctctcacactgacccagagaggttaa

SEQ ID NO: 271285 - DNA, 804 bp, Klebsiella pneumoniae
atgaacgacacatattattatggtcagggcaaagttttcctttcggtacgccacccggagaccagcaaagctgatatctggcgctgggtgggtgatgtttctgcgctgacgctgaagctgtcatttgaacagagcgagaggaagatatcccggggtggcgtggtcatgacgtcagaacgccggtataccgcttttgccgcctcgctggcatcggtctggcacgatttctccgctgataatctggcgctgctattcttcggaaaaaccagccgggtgattcagagttggcagaatggcgaggtgttgcccgcaggtattacagcaggtgatcgtgtcgctctggtttatcagaacatccgggaagtcagtatcagtggtctggttgagggaactgactacgaagtagattatgcgtttggtgccatcagttttctcactaccccaccacaacaacctgtcagcgtgacctatgactatgcgggcagtcagtccgtcagtctgctcaacgcgacatcccccgaggtgtcactgcgctatgaggggattaacctggccgaggggggtaaaaaagtgctccttgaactctggcgaatgacatttgatccgctgacagttctggaactcattaataacgccacgtccctttccggaatggaaacctcatctgcggtattacccgacctgaaccgccaggcagcggacgtttttggcctgtttggccggatcgtaatgatagaagacttcatgactatcacttacgacggcaccatcgacttcgatggtaaatacaattttgcttattag

SEQ ID NO: 271286 - DNA, 1005 bp, Klebsiella pneumoniae
atgagtatagaaaacctctcattaatagatttagctgacaatcaaaatgtcatcctttgttatatgcctgttcctagtacagttcatattaaagtggaaccggcgactatggcagcaatagtctcagcagccatggattacataaaatcgaaagacaatctgaaatggcagtcggacgtatcagatgcgttatcacaaatatccgccaagctagacttaatattatctgaaattcaaaagctaaggctgtactttgaccaaagaattaaagatgagacattgtttatttttcagagcgaagttgaggccagaagagtttctgcagaggagatacttgctggaattaataaaaatggggtttctctacctgaagagacaaagtctcgtttaataggattgttagatgggatgagtgtatcacttcgccaattgatgaactggcagcacttcaattttgacgcatatcaagctgtattatctggtgttttatcgaaattatttttgatgtcaattactgatcgtccaattggagagataaaagcttttgctaagatggctgtgaaaacatacctgcaacctgctgtagatcctttaaacacgaattcatttgaagcagctaggaatagttgcgcgttagaggcaatcaaaaagaaaaatgaatttgatggttacattggtcgttggtggtggctatctagacaagaaagtattgggcggggacatgatcctgatcataaccctgacgtccaaatacgcaacactttcggcattgcttccggggatataagtactcctctcaattttaattcatcgggaaagttaaatttcgaagttccatggtatccaagaataggtaaccgcgaagatactcgtgcaatgcaacgatttcaggatgacttaaatagtcaaaagcaaacagtactagacttactgtcgagagaagcggcattacgctctcatatagaaactataaggaaagtgaccgagattcttgaggcatattaa

SEQ ID NO: 271287 - DNA, 225 bp, Klebsiella pneumoniae
atggactctttctctgaagccttgttaattctgtccaacttttgggggtctgtacaccacgaggccacctgtatgcctagacaacatcaggatagcctcttagatgccgcaaggcaaggagaagaaggccatgaaactgccgcgaaacactctgctcgggtgcgtattaatagtgtgcctcacactgctgatattcacttacctcacccggaaatcactttgtga

SEQ ID NO: 271288 - DNA, 747 bp, Klebsiella pneumoniae
atgggtggtgggcctggggtagttacctggacgggagaccctgagaaaccactaacaccaactgagcaaccgggaggaaggccgtggtacatctacgttaaatttgacgggcagtctagtgtccatattaacggcacgaaatgtggtgggtacctaccagggcagcgccgcaaaacccaactggttaaagtccagtataacggagctgaagcattaaatagcctggtgctgaaacccattctggatgcgggggacaccgcaacatcatcacgtccaatgcgcctgtgtgatgccatcaacgcaataatgatttcgccctataatctcaatgcctggacgcaatcgtatggtagcggagggacgacctacgttttcagtattgacacatcagtttattatgatgctgactctccgacgtcacgtaagtacgttggtactgacggaactaactcaacagggctttaccaggaaataccttgtttgcccgggagtctgataaatattcacgcagaggttaaggttacggcgctgacccagggatactgcgccctccgcatagatttttacgactttaaggggaatgtcatcggttcgtcgattaagacggttaccgccgtgacggactggacacaggtctgggtttacacaaaagttccgaatggcgcggtgaaagtaagggttcaggagtactacaacgattttatcggtactgcgtatttctcgaatgaaaatgtctggtttcattag

SEQ ID NO: 271289 - DNA, 210 bp, Klebsiella pneumoniae
atgagcattttttcggtaggtgataaagtacgaattatttcctgtgcggcacggcaggatttaactgatgttgagaccgtcataactgaagaggaaaacgacatattcactgatttagattacgccgatgcttacggtgttccggcatatcgggttgcagttgaccgggatttccggcctgtcgcatcgcaacttgaactggttgattaa

SEQ ID NO: 271290 - DNA, 690 bp, Klebsiella pneumoniae
atgaatacccagtaccttgagtatgttcgccagcagctgatagtggccaccgcggatctgagcggtgcgacgaaaggacagttggttgcttttgcagagaacgcacaattcaccgctacggcgcgcagccggggaaggaagaaagtagccgatccggtaacaggccgcatggtaaacccatccagcccgccaatccccgggcagcagtcgcgcgcaaaaggttcatcaatcgctctcgttctgcccgttgagtactcgacggcaagctggcgccgggctctgctgtcgctggaagagtatcagaaagcctggctgctgtggaactacagcgacaatatccgctttgagtatcaggtagcgataacacagtgggcatgggaagaattccgtgatcaactcggcgctaagaaagtggccggcaagacgatgcagcggctgaagaaactgatatggctggcagcgcaggacgtgaaagcagagctggcgggtaagtatgtataccagcaccaggatcttgcagccctgtgtggcgttaaacctgataactggtgccataactacgctgattactggcggactatgtgcgccatttttaagcggcttgatagcgactctcttctctgtgccgtgagaacacgatcacaacaaaaagcgactttttcgcagcagggtcttgcaaaagtcaattaa

SEQ ID NO: 271291 - DNA, 1197 bp, Klebsiella pneumoniae
atgaatagtttgaatgatataattaaatccaagattaaagtaaatattgaatttttcaatgatgaacatgaaaaattattatgtaataaaagacgatacccgtctgatgttgtcgatcgtatgaaaaaattagtgtcagatggttttatggtcgatggatatgattttatagaatattatcttttccataataaacgttccggtattgaaaagaatgacttcattgaaatgataccttccgcatctaatatgctcagaatgcattttgatatcaaagataatcaactatttaaaatgaggaacattgcgttagataaaggaattactgagcatattggtgaatcagttggaatgcttgtgatttctcattgttttaatatattaagtgcagactggaattttatacctgaaagtaataaagtaaaaacgctcgattgtagccttgcagtatccaataacggattaattgagttggaggcaaagggaacctctgctattgcaatcaatctatctagtccaagctctagtattactaagaaaaagaaaggaaagaaatcggcaaaaggtaattattactatggcacaattaccacaatggacacctctaatctaacgtgttatcttcttgaccctcctggcagtgatgtgaaattagattatgttcgattaagacttcttaatcggctctcgtattactatgaggtttttcgtgttatagctccaacctcagagttaattgacatattgatggagcgaattgaacttcttcgtgaaaaaaatcaagacattaaatcgcttgggcgacttaagccgaaaaatagatcgcaattcaattattcgacaggatcacaaccgacttttttctttcagtcttattataatgataaagatggagtgaaatttggcggccgcttcttttatcttgaaaaaggccgttcactttttattggtgtggaaaataccttgttgagtaaaattgtagaccaaagtgttgatgatatcctaaccgtttctgatgagttgtcatattttgaagttaactcgctagttgatcgaaatgctcttcaaacaactacccgagaccatcaagtgcttgagattaaggataaacgcttcactaattcagaacgattgagaatgagagggcgagtttatttaaaaaatgggctcgccctaggtattcttagttacagctga

SEQ ID NO: 271292 - DNA, 1245 bp, Klebsiella pneumoniae
atgagtgtggataacaaagcaccagaaattcgctttgaagggtttagtggggagtggattgaaaataatttgggagaattaattgatattaggtctgctgcgagagtacataaagagcaatggactgacgcaggtgttccgttttttagaacaagcgatgttgtatctatttacaaagggcaagagaacactaaagcctatatttcccatgagatttaccaagatctatctgagaaaattggcagggtaaaaaaagatgatctacttataaccggtggtggctcgattggtattccttacctagttccgaataataatcctttatatttcaaagatgcagatttgctatggctaaagaacaataaaaagttcaatggatactttctatatacatttttctttagcgaatgtttcaaaaaacatattaaaagtatttctcatacaggaacgattgcgcactacacaattgaacaagcgaaagccacgccgataaatacatgcgacgacgaagagcaaacccaaatcggcaactatttccaaaagctagatgagctgatcaatcaacaccaacaaaagcatgataaacttaacaacattaaaaaagccatgctggaaaaaatgttcccgaaacagggtaaaaccgtcccagatattcgctttgacggatttagtagagagtggaaggaggtgaagctaagtaaggtatctgacaagatcactgaaaaaaacacttctgtaatttattctgaaacttttaccaactccgctgagtttggaataatcagtcagcgcgattactttgataaagatatttcaaattccaataacataggtggatattatgtagttcagccagaggactttgtctacaaccccagaatatcaacgctcgctccttgcggtcctatcaatagaaatactctgggtagagctggcataatgtctccactttatactgtctttagaacaaaagatgttaataccattttcattgagtattttttccagactaagctttggcacactttcatgtttcttaatggcgatactggagctagggccgataggttttcgattaaggactcagtgtttttcgaattaccattgctactgcctacacttaacgagcaagacgttattggtaactatttccaaaagctcgacgcactgatcaaccaacaccaacaacaaataaccaagctcaataacatcaagcaggcctgcttgagcaaaatgtttgtatag

SEQ ID NO: 271293 - DNA, 207 bp, Klebsiella pneumoniae
atgacagctgattacagcgttcttaacgaccaactggtgacgatggcgtttatcacccggcgcacaggcctgacggataaatggttctataaattgataaaagacggcgagttcccgaagcccattaagttgggcagaagctctcgttggttgcaaagcgaagtagaagcctggctacagcagcgtatcgaccaatcccgccagtga

SEQ ID NO: 271294 - DNA, 264 bp, Klebsiella pneumoniae
atgaccgcgcagaaagaaaagggccagagcctgcttccggccggaccttttacccgccagcaggcggagtgcgtcactgcgacataccggaatatcttcatcgaggatgaccagggaagccattttcggctggtcctgcgtgatgtggatggccggatgctgtggcgggcctggaactttgagccggaggccgggaccgggtttaatgcgcacatccgggactacggcatcctgcagagccctctcagccgcctgccttattaa

SEQ ID NO: 271295 - DNA, 450 bp, Klebsiella pneumoniae
atgactgacaccacaacggacaccacaactgaactcaccatttccgccgctgttgttgccgacgagcagcgtacccgcttctggccgcagcactttggcagcatcccgcaatggataacacttgagccccaaatcttcgcctggatggaccgtctgtgtcccgattatcacggcggcatctggaccttttatacgcttaacaacgggggcgcgtttatggccccggaggctgacgaagataatgaagataaatggacgctgtttaacagcatgaacggtaacggggctgaacttacccgcgaagcggcggggctcgtcgcctgtctgatgacatacagccaccacgcctgtcgcaccgagtgtgacgcaatggctgcgcattattatcgcttacgtggtttcacgctcaaccacgcggaatgcaacgccatcatgcacatcatcgactga

SEQ ID NO: 271296 - DNA, 546 bp, Klebsiella pneumoniae
atgaacaccattttatccctggtatcatcacaatccgaactcttcccctttacggcgctacctaaaacgcctgctgaattactccctgagacttccggattgacgccttatgcccgacgtaccattcgccgcgcgatcaatctgctggagaaacatctgcgtcagccaggcatagcctttacctcaagtactgctacccgcgactggcttcacctgcaactggcaggacaagagcgggaagtgtttatggtgctctatctcgataaccaacactgtttactggaaagcgaaacactgtttgcgggttcagttaatcatgtgcaggtccatcctcgtgaggtagtgaaatcagcgcttcgcttcaatgctgcagctatcgtgctggcgcataaccatccatccggcgatccggagcccagcaaagccgatcgccagttgactggcaggctaaaggaggtgctgggactggttgatgtgaaaacgctcgatcacctggttgtcggtcaggatagcattgtgtcgtttgcggagcgagggtggatatga

SEQ ID NO: 271297 - DNA, 729 bp, Klebsiella pneumoniae
atgaatatcattcgagaatttacctctaatttgaatggcgagtttctcgcaattgtgtttgctatgttttctttattgtttgcaataatatctcttttgttattcaaaaaaagagaaactatttacaatgaaaaactaaatagaattgaacttgattttatgcgatcaaattatgaaaataagatttacgaattaaatgaaaagttaacttttgaaaagaaaagatggttggataataatcattttttcgcaaatatgcctaatgatgatcgaaagataggtgcaatcaatcaagcgatcaatccatatttttttctagagaatatggggttaaaccctgatacattgagcattaaacccaagagtgtatttatcctcactccatttaatgataggtatcttaatgattacaaagctattgaacaagcttgtatcaacattggtatatctgtttctcgtggagatgaagaacgcataaatggtgatatcttatcctatatagtttctcaaatttgttcatctcaattgattatcgctaatatttctggtagaaatcctaatgtgttctatgaactaggaattgcccaggcattaggaaagccggcaataatagtcagtaaaggtgcaaaggatataccttttgacttaaaaaatagacaggttattatttacgagagcttatctgatttaacatcaaaaatccagaaagccgttgtaagccttctttaa

SEQ ID NO: 271298 - DNA, 144 bp, Klebsiella pneumoniae
atgcccgcagaggccccgttactcgacagtgatttagaaattcgcgaagcgctgcccgacgatgcgcacgccatcgccgcgctgtatgtctggcacgtgcttaatggccgcgcctccttcgaagagatccccccccaccgttga

SEQ ID NO: 271299 - DNA, 1050 bp, Klebsiella pneumoniae
atgcaacgtaaagaaatttacaatcttcaaattatacgtggtattgcagctctgctggtagtttttgagcaccttcttcccaaagagatcggaaagttcgtgccgcaagggcagattggtgtatctatgttttttttcattagtggctttgttatgatttattcatttaaagaaaatgaaagtggaatttcattttttaaaagaagaattgagcgcatatatcctgcgtacataatactatcattaccattaatcatttatttctcttttatttccgggtctgctcagtatctttttcacaacttatcactcatagctttctttgagtgggtacctgagcaacctgcttataactttgtcatacgatcaaatgctagtcctgtggcgtggacattatactttgaaatgttcttttattttatctttgctttttctaaatatttatcaaaaactaaaataggcgtcgcaactataacaacctcatcaatacttttgatacttatagttagcaattatatttatggaaatagcaagcaccttggctggcaagatgtatcttatattaatatttttagcaacctctctcttacttcatttgtcgcaggaatgttattccctttactttggaatctcaacagtaataaaaaattaagcttggccgtttttataatcccgttactgtcatggctatcgttgaaaatttccggaaaattttttccagcggcgttcagcaacgaacagattaaagacattattttttctagcattccatcatggatatttgttgcattacttattagcgcaaagagattttccggtttcgttttcgacaggttgcatcacattggcatgatttcttattcgctttaccttttccatgctaatttttacatccttaaaggggtgttagatcttggaagttacaacatatttattcaaatgctcttcttcataatcacattcacattaagcatctttgtagcaaatatctcattcaataaaattgaaagattaaaattcaaaccattaccttcaattaaaactgcgtaa

SEQ ID NO: 271300 - DNA, 225 bp, Klebsiella pneumoniae
atgaaaatagaatttaacgataaaggtgtaatcgcaaccgctattataaccagcacggtattcgaattccgcctacacaaccgcgccgttgataccgccttattcctggctccttccgttcggtctaaacgtagcgggctctttataatgaaaacagttatttccgggaaaacatcacatgtgcttcgtgcgtataaagcgcttaaagcggaggtatcacgatga

SEQ ID NO: 271301 - DNA, 825 bp, Klebsiella pneumoniae
atggctaattcattcagacaaatgcgagacggcgacgtcatcaaacgcaccgatagtggcatgttcatccggattgatgaactgcatgtcaaaccgaatttcaatcgccgcgaggacgatgaacgtacccgccaggctgatgacgaattatttaattacctgatgaatggcggcaccgtcccgccgctggaagtcgttgttcgtgatgaggggggcgtctggattgtggaggggcatcgtcgccaccgcgcatatctgcgctgccgcgaggcaggaaagcccgttgagcgcatccagattatttccttcaccggcaatgacgttgagcgcatcgctcgcatcatgacaagcaacaaccagttgcctctgaccgcggttgaacaggccgctgtagtgaaagacctggccgcattcaacctgacaacagcggaaatcgcaaagctggtgcacaagtcgattccgacggttgagaagctgctgacgctcagtacggctgaccacgcgattcagaagagcgtgaaatctggtgaggtatcggcatccgtagcggtagaccgtatcaaagagcacggtgaaaaggctggcgaagtgctggagcaggataaggccaaggccgccgcagctggtgtaaaaaaggtcactaaatcgtttgtgtcgccggaaatcagcgtgaagaaagcccgccgcgcggtagaactgctggcgctggcacaaatcagtgatgaaggcgttattgccctggatggactggcactggctgaaatgctggaaattatcgacgaacagaaaaaaatcgctgctgatcgcagtaaggcggcagcatga

SEQ ID NO: 271302 - DNA, 765 bp, Klebsiella pneumoniae
atgcccggcgttaatatcctgtgcatcggcctgggttttactcagattaccccagagattgaagctgacactgtccgacagcggaccattgaggctaaagttagtacgtttcgtcgccccttctttacggtgctgcggagcattcatataggtattccacgaaccgtgccattctggtgtggtcggtttggtcacgatgttaacgaccccgcccatcgcgccattaccatagcgcgccgccgccgggccgcggatcacatcgatatgatcgatcatctccgctggcacccaactggtatcgccgcgggagtcacgatcgccgcgccagccataccgcaccgagttacggctggtcaccggtttaccatcgaccagcaccagcgtattctcaggccccatgccacggatatcaatttgccggttgttgccgcgctgcccgctggtagagttgccggtcaggtttaccccgggctgcgtacgaatgaactccgacacatcgcgggcggggggatgtttgcggatctcttctgcggtgatggtcgacacgcccggcgcctgcaggttctgcctggcggcggttatgaccatcgtctcctcgtgattttcggcagtggcggcgctctcgtcaggcgtcgattgttcggtcatgttctctgccgcctgcagcggcacgctacaggcgagcagaggaatgacgatccccagcgggaagtgagacgtgtatttcatagaatatgccctgttttctgttgctgtcgggcataa

SEQ ID NO: 271303 - DNA, 1032 bp, Klebsiella pneumoniae
atgatggggatgaccaccaacgccctgctgctggccatcttctgggggatcaacggttgggcgcagtcgatgggcgtcggcccctgcgcggtctcgctggcgcgctggtacggcgttaaggagcgcggcaccttctatggcatctggtcgacggcgcataatatcggcgaggcggtgacctatatggtgatcgccgcggtgatcgccgggtttggctggcagatgggctacctgtccaccgccgcgctcggcgccgccggcgtggtgctgctggtgctgttcatgcacgattcgccgcagagcagcggcttcccgtccatcaacgtcatccgcgatgaaccgcaggaggaggtcgaagcccgcggctcggtgtttaaaaaccagctgctggcgctgcgcaacccggcgctgtggaccctcgccctcgcctccgcctttatgtacatcgaccgctacgccgtcaactcctgggggatcttctttctcgagcaggataaagcttattccacgctggaggcgtccgggattatcggcgtcaacgctatcgccggcatcgccgggactatcatcgccggcatgctctccgaccgctttttcccgcgcaaccgcagcgtgatggccggattcatcagcctgctgaacaccgccggcttcgccctgatgctctggtcgccgcacaattactacactgatattctggcgatgattatcttcggggccaccattggcgccctgacctgcttccttggcgggctgatcgccgtcgatatctcttcgcgcaaggccgccggggccgcgctcggcaccatcggcatcgccagctacgccggcgccggcctgggcgagtttctcaccgggatcattattgataaaacggctatccttgaaaacggcaaaacgctgtatgatttcagcacattggcgctgttctgggtgggtaccggtctgggttccgcgctactctgttttaccactgccgccatcgtcgcccggcgccatgccgtcgaacggcagacctcgttctcctcataa

SEQ ID NO: 271304 - DNA, 582 bp, Klebsiella pneumoniae
atgccggaatgcgccaagatcccttattggcgtcccccagctgtatgcggaaacaccgttaggcgtatcataatgatagaagcccttgggataggtgtaattacctccgtcgtcaatggtgccgaagcaaccaccttcaaaacggatcgacgcatattcggtaaagttatctttgtactggctgacacaatccagatggaagccctgcagacgggatgctttgccgttgaagccccaggcgctgacggtataaaagttgtatgtccactcggtatatacgccagtgaatacgtgattctgggccgtgccatacacagaaccatactgagcattataatcttttgccgctgctggcccccagtaaccaccagagacatgcattgcggtaccagtacagacggcgatatattccggcacagcaccggaaacgttcgctgcatttcgccacgccagacggtttgtcacttcacagttataaagcgcagaccagtcgcaggcgtttctgtaagtccccctgcgtccaccctcaaatttacaatcgtaatttgttacgcggttaaagttaccgactctggatgttaa

SEQ ID NO: 271305 - DNA, 258 bp, Klebsiella pneumoniae; identical to SEQ ID NO: 250491

SEQ ID NO: 271306 - DNA, 567 bp, Klebsiella pneumoniae
gtggctaaataccagattgattctattcagaactggccttcatttgaacatgatggttctacttattctctttcacacctcgatgctcatgagatcacgtataagggtgataagcaggatttcacctttgtggttacctatggtttacattgtttcgctaaagaagatacgccttatgtcatcccggttgtatatcaggacgggcgagaagaaaaaaccatatgtatggagcgctatgaggcgtccaagcacatccgtcatatcttggttaatctgccagatatgcgattgtttcatacggcatcagagaagtatttcacgctggatatgatgaatagtgctacggggcagcttgaaccttacaaaatttgcattgcgttctacaaagagaagcgcttactacgtatgcatattctttctgcctttttcgttcgttacggtccaggttttcccggtgagcctatcccaaataaggctgtcagtttgtttaaggtcgcgactgatacggcaagcaggcagaaaaaacatgcttggataccaaaggaagcgaacaaccgtatcaaatga

SEQ ID NO: 271307 - DNA, 144 bp, Klebsiella pneumoniae
atgaccgtcaccaaaaaggggccaccatgccccgcttacatcgacccggaggccctggaaaaggcgatcgccgccgctcgcaaaatccgggaagccaacccggagcgctacaaacccatccccgtccagccgaaacttttctga

SEQ ID NO: 271308 - DNA, 597 bp, Klebsiella pneumoniae
atgcccgccctgaactccgggcacacagtaggtgatgtcacccgcccacttctggttcggaccgctggcaaaaaagacctgcttcagcaggttctccgacaccggcagcccgtgctcccgatagctgaccggactgaacttgcgggctgcctttgcccgaagcccctgacgacgcaggctggctgctatcgttttgatgttgtaggctgggagctcatccgcaagtcgtggcgcaccataccgttgttttgcatcagtgaatgccctgagaaccgcggcatcacaggccagacggaactgctgtcgcgtgtctatctgatgacgccgggaacaccaggcgtaccagccactgcgggccacgcgcagcacccgacacatggctttgatgctgaactcagcctgatgcttttcgataaagacatacttcatttcaggcgcttcgcgaagtatgtcgcggccttttggagaatagccagctcctctgcctgctccgcaagctggcgtttaagccgggcattttcagcggccagttcgctttcgcgttcagatgatgtcagttgttgctgggctttgttgaataaatcagatttcgggtaa

SEQ ID NO: 271309 - DNA, 285 bp, Klebsiella pneumoniae
atgcgggccgggtatgtcggttatcgtcagatagtcgcaaaaagcggcatgaccgatgccaagtgccgaaaccttgttaacgcataccgtatccccaccgatacacacgaattcatgacgcctgatggtctgctgtctcgacgggcgatcgtggagtttgagccttttatgaaagcattccgccaaatgatggcagaagccgaaccacgcggggcccgttggtatcacccgaaaatgggcctgtttcaggctatcggatgggaggaaaaacattgtgaaggttga

SEQ ID NO: 271310 - DNA, 654 bp, Klebsiella pneumoniae
atgaataaatacaaacttttcgcacagctatcaagatattcacttgaggcgcagattgatgatttcgaaaaatatatcctaggagcaggcggtcaaaacagagttgacttatcggaattaaaaaaagcatatgaagatgaaaaaaaagatgctcctgacgattatattaattacttagaagactattattcagagcaatatgacttcttagttaacatacaaccaaatatttttaataaatctgctttggtatctttatactcatgcttagagcacaatctaaacgactattgcaatatatgtcaaaggattgtaaacaccaatatatcagtaaccgattttaatggtgatggcatccacaaagcaaaaagatatttaacaaaattaatggatataaactttggcctgtcacaagaatggcaattcatgacagagtttaacaaaataaggaattgcatagttcatgctaatggagacattaaaaaaatgaactcaactgtagccttaaaagatatcattgataaaacgcctactctttcattaaacaatgaaaataatataataatctccttaaattatttaaaagatactatcacaaaaattagaaaactctttcaatggttatatacacatctggatcaatcatcaaaatga

SEQ ID NO: 271311 - DNA, 462 bp, Klebsiella pneumoniae
ttgttcgcaccttccttagctattcagtatgggcaggttgatgcctcactgctcggagagtatgaaacctccgtaagctataaaaacggtaaaaaagtgttcgttgcactaaaaacagataacgacagttataccggtacaccgctgctggataaagacgcccgggtggtggaaacagaacacggaaaaaccctgtacaaaggcaaacgtaaggtcaacggccttgaaatttcagaatggtggattaaaagacttgtagttaatgacgcagacccatcgctaagttatattttttatctcactatccatgaaaataaaattaatggcagcaaaccgcttgatctgaaaatgtcttaccgaattgatttcctaaaccctggagatgtattaaccgagaatgaactggtagctctgtgggagaatataaccgaaacaattaaatatcaccccacccggtggtaa

SEQ ID NO: 271312 - DNA, 339 bp, Klebsiella pneumoniae; identical to SEQ ID NO: 247586

SEQ ID NO: 271313 - DNA, 201 bp, Klebsiella pneumoniae
atgggcatcgcctggctgccggactggctggtggcgcaggcgcttgccgatgggacattgcagcaggtgttggcgcccagcgctcaggtgcgtttcgccatccacgcggtatggccggaggggccgtggctgccgcaaaaaacgcgggcggcgatcgatgccctgcgggaagggctacctcttaccgcaacacctggttag

SEQ ID NO: 271314 - DNA, 522 bp, Klebsiella pneumoniae
atgtgtataagagacagctttataagtatgtctgtttgcgatcaattaggtgttaataatgactatattagagtaaatcaagtaatacaggactatatttcaagaagtaagtttggcactacaagcgaatatgatactatcctaagtgaacatatcaagaaattcatagaggaatataccgatgataatagagatatatcagactattttttctcgttccaagaagcaatcaaggctggaaaggacgttgataatagagtattagttccgtcatattttgtaaagacaataagatctttatacgaaaaaggcggctctgcgaattataaagaagctgtacgattgactgatcagatactttcgaattcccaatacatgcattcgagtgttatcaatcatatattattcatgaagtgtcaatcactcgctagactacatgatagagagttttttaatgcggttagggatgtctccgagcctgaatattcgttcttacatggtttttatggctttgttgaataa

SEQ ID NO: 271315 - DNA, 180 bp, Klebsiella pneumoniae
atggctataaccataaccatagtaactgcttgcttttttcactacgccgttaagaatacatcctttaacgtttataccaccttgctcaaaacgcttcacacttacttcaatttccttggttgtatttatttcgtagcgagctacaaggagtgtggtccctgcatacattccaatgattga

SEQ ID NO: 271316 - DNA, 318 bp, Klebsiella pneumoniae
atgaaaaatcatgagctgtacgaatcaatgaaggaagaagcgcgtttaatccttagcgaaaccaaacgctttcaaatcatttctgagaagaaccctatcagctacgaagcagccgacctgctggcaagccttcgcaaccgtttaaacgcattcgaaaacatgaccgatgaagcgggccgcatcatgcgtgacgaagcggaaagcaacgcatccaccctggagcgcaagaaatggaagccatccagccgcctcagcgtgggtgagcgcgccaagcgccaggcggtgaagcgcggggctatcctggtgcggagtgcataa

SEQ ID NO: 271317 - DNA, 210 bp, Klebsiella pneumoniae
atggctactgacaacaatatttatgatgctgttctgaacgttatcggcgttaccgaaaagatgacgaacaacaacgcaagccaactgaccgacgcgcagaaggtagcactaaaaaaccttagtaacgcgatgaaatcctggaaaggtatcacgtttggaatgcgtgatatcacagccagtgacaaaccaattgaaagtaaaactgcataa

SEQ ID NO: 271318 - DNA, 207 bp, Klebsiella pneumoniae
atgctggaccgtattcacacaaaaccggaaggaacaaacccctggcctgaactggtggatatggtcctgcccaaagttatggtttgcgaaacagcggagggaatgcaggcacagcgtaaacatcgcaccgaatgcgccctgcaactggctgctgccgccctgcgggctgctggtgaacacaccctggcagaaaatttacttaattag

SEQ ID NO: 271319 - DNA, 582 bp, Klebsiella pneumoniae
atgtcgaccgggtcgtcggtgctggaacagcgagccgccgcagcgtgtggcgtcatcagtgatttaaaagtaccactgcgtgacctgtggaaccctgatacctgtccggtgaaattcctcccttatctggcctgggctttttcggtggacagctgggatgagagctggagtgaagcggaaaaacgcagcgttatcggtgaggcgttctggctccatcagcgtaaaggaactgtcgccgccatcaggcgcgtgattgagaagatgggatatgcattgacacttgaggaatggtggaatgttgcggaccccgccggaacattcaggcttgaggtggatattaatgatattggtataaccccgttaatgcttgatgaactaaatcgcctgattaacgatgccaaacctgttagtcgccatatttcccagatgaatattgcctccgtaacgctggggcccgtttctgtcggaacatcttcgggatgtggggagataatcagtgtttatccagaggaatatcagccggaggataacttcctctataacggtgtgatttttcacgatggaaattttaattacaggtaa

SEQ ID NO: 271320 - DNA, 1383 bp, Klebsiella pneumoniae
atgtcgttaaaaactgtatctaacatgccttatcttggtgatattgcagacctgccgcctttaactgcgccaatgcctaatggtggcgtgtattacggcgacttcgtttctggcatgtacattaacaatgttcccgtcccattccagaaaaataagttatacgcaacggtactatcatttgcccgcaactcacttgcttcattggttaacgcttccggagcccttgattatgcggcggtaaacacacctcgttttgatcatcaccccgtaacactggagaatataggtgaaagggtcgagaactccactactaactatgcgttaagcgctacagatcaaacaggggcaaactacatccctactggcctggctgtgtcttctccttcaaatgggtggtgtacattaactgagagcacggctaatgaggttcataccctcttagataatcagagccagattgatagctcgctttataatgcgatatctgttcttgcaaaagccgggtctgctcaatttatgcaaatacaggttttgggcgcaggggctcaggcgtttgctaactttgacctgagaaaccagaaagtgacgaaaatggggcgtctggcataccgggcaaacattttccagtcggtgaataacagcttgcgctgtgtgctttgtgttaagggggcaggaaacacaactgcatctgtgaaatacagcatcattaacgaccctttggcagagccagatgttgcatatacggggactgcgcgcaacattcaggtaagcctgatgcagatcgagaaaaatacttaccacgccagctctccatttttcccggatggcgccgtaggtggcacaaccagcgcgaatcgccaggcagatgccgcccgtctgctggatatccctgcgggggttaaatccaacttctcggtatttgttaaaggattaatgacgcctgttccattgggcaatgctggcggtaacattcttttctcactactgaataataccgcgttgaaatatgttggatttggccttggcggggctgacagttcaaatgcgtttcagtccctggctgcgcacaacattaacgccggtagcacgctggcgggcattccgtttaccgggaaaatgttttctcagtatggtgaatatgctctgatgatcaccgttaataacggggtacttaaagtctatagcggcatgacgtcagcacctgaaacacttctaacctcatgcccggcatttgattatgtaatgctgggacgcaatagctcagtgtcagggtctaccgtctcgaacactggtttttggggtgggtggctacagaaagctgtgcttttcgattctgcgttaagtgacgctgacatgatggctcagttcgatctgctttcttag

SEQ ID NO: 271321 - DNA, 741 bp, Klebsiella pneumoniae
atgaaacttattaagtattggaaagttcagcttctgcagctttctcagccttccagcaagcttcccggcattatcaacgcccgcactctggtcgaaagcctgttgtttgaggggtattcaaaagacaaacccaatatcaagctaggaaccgggctcagcatcgaactatttacggcgcctgactcagtggaaacctgtatcttccgagaccacctcattgacggcgtgttatgcatcccggtgtatgagagagatgaaggtgacgatgaaactgacgggactcaggaagagcagactaagacaccctcacgcgaggccatgattgaatatatcaagcaggccattggggaaggctatcagcctaaaatctgccatgagctcattcgcaatcctgatctgctttggcagttgcatgacgaggcggtcgattatgaatatcgcgcttgttggcgctggtaccaaaacggtcatggttttcatgagacttttagcgtccctgagaaaatccacgatcacgcctgcgtaaactgttttgccgataaaggcccatgccttggcgagtgccacgtatccgacattaataaggcccgcagctcctccttcgaagacgtagtgaagccggtaatcaaatggcttaacgaaaacgccaaccctcatacatcagtgatcatcgacgcgaccagtgctcatctgcttactggcgaaatcggcatccacacggaagagttcattaaggactga

SEQ ID NO: 271322 - DNA, 291 bp, Klebsiella pneumoniae
atgctgcaacggcggccgaagcagcaaaagtcgcagcagaaaccgcggaacaagatgcgcaaaatgctgcttcgtcttcaaccgaatcggcgacagcagcagctgaatcagcttctcaggcggcacaatctgcggcagctgctacagagtttgcagataataaattcacgtttcctactaccgctgacggcctggcagcaacgactaacgggcagtatttcagagtacctcaaggggtggataatgatacgtcgtttatctattaccaaaacaattctggtgtcgctgtag

SEQ ID NO: 271323 - DNA, 651 bp, Klebsiella pneumoniae; identical to SEQ ID NO: 171117

SEQ ID NO: 271324 - DNA, 786 bp, Klebsiella pneumoniae
atgcaaacctatttcgaccaggttgatcgcgttcgctttgccggacccaaaaccgataatccgctggcgtttcgccactataatccggatgaaatcgtgctgggaaaacgcatggcagatcatctgcgttttgccgcctgttactggcataatttctgctggaatggcgcggatatgtttggcgccggctcgtttgagcgtccctggcaggccgcgggcgatgcgctggaaatggccaaacgcaaagcggacgtggcgtttgaatttttctacaagctcaacgtaccgtattactgcttccacgatgtcgacgtctcgccagaaggcgcgtcgctgaaagagtatttgcataatttcgccatcatgaccgaggtgctggcggagaaacagcagcaaaccggcgtgaaactgctgtggggcaccgccaactgctttacccacccgcgctatggcgccggggcggcgaccaaccccgacccggaggtatttgcctgggcggccacgcaggtagtgaccgccatgaacgccacccaccagctcggcggcgaaaactatgtgctgtggggcggccgcgaaggttacgagtcgctgctgaataccgatctgcgtcaggagcgtgagcagattggccgcttcctgcagatggtggtggagcacaagcataagattggctttggcggcacgctgcttatcgagccgaaaccgcaggagcctaccaagcaatcagtacgattacgatgtcgcgacggtgtatggtttcctgaagcagtttggtctggaaaatga

SEQ ID NO: 271325 - DNA, 573 bp, Klebsiella pneumoniae
gtgtatggtttcctgaagcagtttggtctggaaaatgagatcaaggtgaacattgaagccaaccacgccactctggcggggcactctttccaccatgaaatcgccagcgccatcgcgctgggcattttcggctccgttgatgccaaccgcggcgatgcgcagctcggctgggataccgatcagttcccgaacagtgtggaagaaaataccctggtgatgtacgagatcctcaaagccgggggattcaccaccggcggcctgaactttgacgccaaagttcgccggcagagcaccgacaaatacgacatgttctatggccatattggcgccatggacgtgatggcgctgtccctcaagctggccgcgcgcatgattgaggatggcaagctcgatcgggctctggcaaaacgctatgccggctggcagggcgagctggggcagaaaattatgagcgggcagatgtcgctggataatattgcccgatacgctgagcagcataatctgaatccgcagcctcagagcgggcgtcaggaattactcgaaaatctcgtcaatacctatatctttggttaa

SEQ ID NO: 271326 - DNA, 141 bp, Klebsiella pneumoniae
atgctagagaacggtgttacccggcaacaaatcgccgatgcgataggtgtagacgtgaaaactatctacaagtacctgccagcctctaaaaatcattacgttgcgtcggtgcgtctgatcgatagctgtaacctgtattga

SEQ ID NO: 271327 - DNA, 588 bp, Klebsiella pneumoniae
atgaaagaaacaacctccataggtaagcgagttaagaaagcgctaattgactacaaagaaaaagacatgacatctgcgctggttaatatcatgccagtcatagactcaaccgccaataaagaatatggaggtggtgtcggaaacagaatcaaattattcataaggaacaatgaagcattaattaacattattgcacttggtttccttgttaaattaccttcattcatttatccagggaaaactaaatcagtagactttgcagacataatatacgataacataagaacatatatagttcatgagggggaggttggggagatgataaatttcactcctgaaaataaactttcattttccctaaccaagtggaatttaagcgaggggcatgttctggcatttattttatgcgtcatcatttcagataaaaatgcaaatgagttcattgctggggatgaaataataaatctaaaattcggtaacttttcagttaacgatttatggggtagacgtttagacttattgcatcacatagctaataattcaaacggacgatatagagtagaaaactcaaacatagtaaccaactga

SEQ ID NO: 271328 - DNA, 537 bp, Klebsiella pneumoniae
atgacaggagccccagaatgggttatgaaaatcgatgcggttaaaatccacattatcaaatgtcacgtcctggcagttttccccggcagtcgccccccatccctctccctgcgaaacggagtcactgatatgcagcccggaaacgttattataattcagggtataactgtaaatactggagccggacgaattataagagtcattaggccagggggaatagacattccggaacttaattttatatccaccatcaatagacaaatcgactgcactgccattatcggtcagggggcgattgataacagtcggattttcaatcgtcgcccggctgatatcataaaaaaatatattaattgtgtgcggctgattcttcatatcaaaacagcccggcgaaataaacaactcaccatcactgaccggcaaagcataaaccgaatccaccgatgcaggcatggaatacttaagcgcccggtcaagctttccttttttcgaaatccggctcatggcaatccatgttttatttttcccccttcctga

SEQ ID NO: 271329 - DNA, 255 bp, Klebsiella pneumoniae
atggagcccggttaccccgttacgctctgcatgacagttcaccatcgagccattcttacccgggcggggagctataccgttgttagccagcgtccctgcatcaatgctgataccggttttgagattgtcattgaactggccgttcaccaccaccagaccagaggcgccgcaatccccgaagccgtggccgttacccgtgctgacgacatcagagactatgatctgccttgcaacgtaaggctggcccgggcctga

SEQ ID NO: 271330 - DNA, 966 bp, Klebsiella pneumoniae
atgagttatattgataatttatctagagcgctaaattgctctgtaatgagtttaatctccggttatattaaagcaccaaaaaaatataaagtattttatattaaaaagaaaaatggtaaagggcttagagaaatagcacagccaactcccgatattaaagaggttcagcgagcaatagttagcacgttacttgctaagttacctgtgcatgaatgtgcaaaagcttatattaaagaaacgtcaatacttaacaatgctgagcctcataaagaaaataaatacatccttaaagttgattttgaaaatttcttctattcaattaagccgcaagatttatatttctatctcctaagaggagaaattaaacttactcagtttgaatatgaaatccttagtcattatcttttcagacgtaaaaaaggggagaaaaaattaagattatgtattggggccccatcatcacctattatatctaatatagttatgtatgacttcgactgtattttatctaattattgtcatttaaataatatagcatataccagatatgcagacgatataacactttcatctgaaagctatggaaaaatcaaggatgcatatagcttcattgccagagtagtttctgatttgaaaaaacctgaactaaaaataaactcagataaaacaaaaattattggaaaaggaagatctcgacgtattacaggggttataatctccaatacaggtgaacttggtgtaggtaggtttttaagaaaaaaaataagagctttaactcatctatattctaatcataagctctcagagagagatattccatacctactaggaatgttagcgcatataaaaaatattgagccgtcgtattacgaagcgttagtcagtattcatggggacaatttgtttaaaaaacttgggaaggactcttacagaattttagagaataaaagaggaaatgataattaa

SEQ ID NO: 271331 - DNA, 1752 bp, Klebsiella pneumoniae
atgagagactttcgttactttcttaaagaaaaatataccaatagtagagcattagttattggtataaataaatataaaaatgtatctcctctttcgtatgcagtaaatgatgcaacagaaataagagatttacttattagtgaattcggatttgtagaagaaaacatttcttttctgatagatgaagaagctagcaaagataatatattgaggtcatttgcgagattgaccagagatgatataggacttgatgaaagaatttttattttttacgctgggcatggagaaactcgttcaggaatatatggtgaggttggtttcttagttccgcacgatgcaattattgaggagttatcgacatttattcgttgggatgagcttaccaaaaatgcagagttgataagagctaaacatattctattcatcatggatgcttgctacggaggattggctttaacccgaggtatagggccaggtagtactcgttttttgaacgacatgatgttacgttattcaagacaagtacttaccgccggtaaagctgatgaaaccgttgctgattccggtggtcctttatctaatcactccgtatttaccgggcatctaattgaagggctcaaaggaaaagcagtaacagataatggggttttaactgctaatggtttgatgacttatgtttataacaaagtatctaatgataaaacatcgaatcaaacaccacattatggttatattgatggcgatggtgattttattttcacttccccatcatggtctgataatgagtcagaaaaaaggactgaaaatgatagattgatttcaataccttatattcaagaagagttctctcccttaaaaattgaagataaaattaggaaaacaaagcaactattagcaaatgactcatcatcaattgaattgcatgattttctcatcgatgaagtaaaaaaatttctttcacagacaagtgaagatttcttctctgtaaatggtcagtacacaaaacaagaactccttgagagaatttcaaaatatgaacagcattctcaaaacataattttgataatttcatgtatagcatactgggcacgtcctatccatatttcattattaagcaaagcattagcacgttcaaccgatcgactcgagagagggggaggcttaactttatggctaaatctccgatggtatcctttgatattacaattatactcattagggatatcagctcttgagaataaaaaatatgataccttattcgaggtattctttataaaattagattcatcactttcttatgatggaaggccatcttacttagtagaagctgttgccaatgctattttagaattaaatcggcaggatacttttaagcaacttcccggttttgaaaggcattatgtacctatgagtgaacatctccatacaatattacaaccattgattgatgacactcttttcattggaaagaattatgaaaatacatttgatgaatttgaatgcctattttcacttgttgtcgctgatttaaaaaaccaacaagatcgtacagtatggggacctatcggccgttttggttggaagcaacaacgcggtaacaatacccctctatctaatttgattcatgacgccaaaaagcaaggccaaaattgggcaccattaaaaagtggtttttttggaggagatatttctagattcgccacagtagcagatgaatatttaaaaagcgtatcacaattacattggtattaa

SEQ ID NO: 271332 - DNA, 1842 bp, Klebsiella pneumoniae
atgaaaacaaggtctttttctatttttttgcttaaagcaggctacaacgcacagaactccctcaagccagatcatcaacttctcgatgactttcaggctcaaaacctcccacagggtgcaagtttatttatttctgacagatttaaaacaactccttggtgggtgaattacttctcaattggcgggaatttagaacaagaaagtaagggagcgttaatttttcttccagtaagagaacgatgtttcgcactaacttttgggcacatttatcacaatctacgcgatgtttcctatgagtatgactttggtcttaaagtaacattaaatagccttgaacctaaagagttaaaaagtgctgacatagtggatcctggtgcatcaagaagaaaaagaatgcaagttccagtcatgtctgacttaacctatttggattttgatagtaatagcgagattttaaaaagcttaacaggaaaagttaagccacagtatatagaactatttaaaaatgccactggctctacaaatttaaaagtaggtctaaaattagaaccggatgagcttatagttttatgtgaacagctactggatttatatgcaagcaatgaatatttagagtcttttcctaacatacaaaaaatagtcccggaaaaagaccctctgaaaatagaaaagttagacacttcacttttagaggcatttataaataaaagtgatgaattatccttatcaattccggacattgttgattatagtgacaatatatattgtgtattcaaaggaagaaaaggaatctccccaatatatactgatattagtcttgatgaattttatgactatctaggagagattgatttaaatacatttgatatagaaaaaataaaaagcttttcattaaatctctgtaatgaagaagggattacaactaaagcatataatatttacagaagctttatttatgacattccctttgacgatgagggagttgtttatcatctttgcgaaggagaatggtataaagttgatcaagattatttagcaattttgaaagattatatcgatcaaagatgcgagaacacctcacttccaccatacaatcacgataacatagcagcaaacaaaagaagttatagtgaagaaaactacaatgaagatgttgcccgtaactcacttacacatatctgtcttgatcaaacagatataagccctgatggacatacgcaaatagagccttgtgacataattagttacaatggaaatacgtgcattttccaccatataaaaatatcctcacgctcatctcagcttagtcatctttttaatcagggtgtcaactctatggagttgttaattctggaaggacacagtagagataaattaaaaaatctcattgaagaaaaaatacaacatcgtgatttagatagtttcaagcgagtaatcgatggaaatgactataaagttgagttcggcataattacaaaaaaacctgcaatgtctaaatctgataaccttccacttttttcaaaaataagcttaatgagaagtttaagagcactttctctttgccgcacggaaggtgtggtaagttttatacaagatataagtcctcctaaagaaagctatagtaaatatcctcgtattacagtagtcgtatctcttgatgcaaatggtaagaatgaggttgttgtagataaaaaccaaattttcccacaagggaaaaaagtaatgagatgctctcaagaaataactaatagcgctatcggttcaaaatatatgatttatgtcaaagcaagcgaaaatggggaacttagcaccagtcacgcttgggaaagtgaacggatttag

SEQ ID NO: 271333 - DNA, 138 bp, Klebsiella pneumoniae
atggtaggtttcagcatttattataaaggcatgctgtcgcttattttcgatatcaatatgaatgcacatttcattctcttgataactgttatcgattctacacaggacttagtatctatatatggattaattaaatga

SEQ ID NO: 271334 - DNA, 654 bp, Klebsiella pneumoniae
atgtctgacaaatattttatctcacaaaataatgacaatagtggctgggagagatattttcaagaggaaaggcctggcagtaaaaataggtcgtatagacgacttctccgcatttcatatcaaaggccgcgagatgtattttcagcaataaaaatacttattgatatatataaaaaagatgggagaggttcattaaaccatttttcatggcaagattttatcagccctgaatttactaaagtgtattctcagtatcttttgggagaggtcaaaaattatgctaattactatatatcaaatgcacagtttgatgttttgatttcattttttcaactgttagatggcaatagcaattttactgaagaagaatttagagaagctttcaatacatttaaaaataggcacgaaaatgaaatacaagagacatcaagtattacaaatgattatagttcctttttgcagttttggtatgatgtgaatgtaattggctataaggaaagagtggcagatgaaaataataatttctaccattggtcctatcgtgaacgaaatgcactcaatgtcatgccaaaaattaaaaaagggtgcatgtacatgatacatccaggtatagcgaaagctattgatatcggtaagcctactgtccgagaataa

SEQ ID NO: 271335 - DNA, 1047 bp, Klebsiella pneumoniae
atgctggtcgcattattttgttcaatcatcaaaaaatttgatgaaatatcgacactggaagaattcaatctaacccaaattgaaggtattgtaatcattgatgaaatagatcttaatcttcatattgaatatgcaaaaaatgctgtcccggaacttttacggttattccccaaagttcaattcattataacaagtcactctccattttttttgcttggcatgaaagagtgcttctcagataattatcaaattatcagcacaccaaatggagaaattattcaagaatctgattttgatgagatacaaacagcatactctattttcattgaaagatttcaagatatcaaaaacaatctcaaaatccttgaaaaggatctatataaatcaacaaaaacattagttataaccgaaggaaagactgactggaaacatataaagtctgcacttttattttttcaagaaaagcaagagaaatttattgacttagactttgagtttcatgagtacaatgatgcttcattttcagatgataaacttaatagctttttgacaaatgtcagccaagtgcaaaacacaaaaaaaataattggtatttttgatcgcgatgaaggtaatggaaagcgatatagtaaaaacaaaataaatagtcttggtaacaaggtgtatgccatcagcatacctcaaccagaacaccgtaattatcatgaaggaatttgcattgaattcatgtataaggatcaagatttatacagatgtgatgaagccggacgtagaatttatacctcaaaagaatttaatgaaaatggcagattaactgaaaatttagaaattggagtcaagaaccataacaaaataaaagggaaaaataatccagcatttgataatatcatagattcagatgttattgacatctatggtaattcattggcattatctaaaaatgatttcgctgacaatatcttaaataagaaagaaagatatttggatttagacttctcggcatttgaagaattatttgaaacaataagagaaattattaattcttag

SEQ ID NO: 271336 - DNA, 657 bp, Klebsiella pneumoniae
atgaaaatgaatgatcgtatccgcgcacgacgcaaagaacttaaactcacccaagccgtattgggtaagcttgtcggcgttaacagggttaccgtcactggatgggagtcgggtgattacgctcctggaggttcaaaccttcaggcgctttctgctgcactaaaatgtagccctaaatggcttattgatggcattggtgagcctgataatgaggaaccgagctttcgccccactgaaaaattcggagttaaagaaattccagtattgtcatgggttcaggcaggagaatggacagaatcaggttctcctatgacacgtaacgatatctccgactggatttttacaactgcaaatctttctgatgaaggttttgctttacgcgttcgcggcgattcaatgacaaatccgaatggtgcgccaagcataccggaaggctcaatcgtgatcgtagatcccgactttggaagtccttacgaagtaaacggaaaaattgttgtggctcagatagatggctcaactgaggcaacactcaagaaatttgttattgatggaccaatgaaatatttagttccgttaaatcccaattacagagtacttgaggttaacgggaactgccgtatcgttggggttgttaaacaagtagttactgacctctag

SEQ ID NO: 271337 - DNA, 204 bp, Klebsiella pneumoniae
atgaataaagatgacgttatttcttactttggtggggtaagcaatttggcccgactcctgggcatttctcacgcatcagtttccggttggggcagcgtgattcctaagggaagagcatttgaaattcaaaccatcactggcggttcattgaaggttgacccggctctttattccaagaatagcgatacagcgtcgcgagtttaa

SEQ ID NO: 271338 - DNA, 351 bp, Klebsiella pneumoniae
atgcctaacagcaaatcttcaaaaaatggtgttatctacaccgaaaccttcaaaatgactgcccgtaacatcttggattttttatcctccacagtggaaaatccaaaagatatcctttctaaacaaattcaagcatttgaaatgaaagttgatgtcttccctgaaggatgtcagatttcatccgacttacttcagttaggctgtgaccgctatcgtgaatgcatcaccaaggatggttatcgtgtcctttattcctacgatgtagagtcagaagaaatcactgcccacgccatttttggtcaaaggcagtctgtacagcaggctcttttcgaaagattgatttcaatataa

SEQ ID NO: 271339 - DNA, 228 bp, Klebsiella pneumoniae
atgaaagtcgaaactatcagttacttaaaaaagcatgccgcgatgcttgatctatcagagccattactggtcacacaaaacggtgtgcccgcttatgttgtagaatcttatgaagagcgaacgaaaagggataatgctattgcattactaaaacttttaactctctctgaaaaagataaaagcgagggacgcacgtacagtcgtgaccagttaatggcaagtctataa

SEQ ID NO: 271340 - DNA, 159 bp, Klebsiella pneumoniae
atgatcatgctacgcaggctgtgttcctggacgctgttcgttgttttgcttctcgtggcctggcgcctggcaggttttctgatggatatggcgctgctggtgcttattctttcagcgctggctgcctgccgttactggccattcaaaagaaagtcatga

SEQ ID NO: 271341 - DNA, 495 bp, Klebsiella pneumoniae
atggacacagattctattgcttatgcttctatgttggtttcaaaggaatcagccaactgggccttttggtcaatgatagcagctgcagttgccgcgctagcctcattgattacctcagttgttactggtgcagctgcggtcatagcttataaaactatgaatacatggaagcatcaggaagaaataaaggagaagaaaattctaaaagccgcattggtagagtacaggaaccttcttgtagcaatgccatacctcatgcacgagggtgttaaagacagagaaaaaaatagcctattacttaacgatgtatctaataaaatttatctaccattagtggtattagaagaagatttagacaatggtgagttagggaaaagatttactcatttttttagaatgcatttcgattatttaagtggtgcagtgacacgacaagatttggcaaaagttcttgctgagttgcttggtgctaaaataatcggccttcggatttaa

SEQ ID NO: 271342 - DNA, 2424 bp, Klebsiella pneumoniae
atggctggcaggtcattaggaacgcttaccatcgatctggttgcaaaagttggtggatttgtatctgggatggataaggctgaacgtgcatctgccaaatggagtaaacaggttcaggatgacgctgcggcgtcaagcgcagcacttgctggagttggtgctgctgccgtaactgcgggtctcgctgtaggtgccgccggatttcagttattaaagagtacctctaagcaaattactgaaacagaccgttgggcaaaatctttgaatgtatcaacgcaggaattgttagcttggcaatttgcagcggaaaaggctggtgtttctggtgatcagatggctgatatatttaaagatattggggataaaataggtgatgcagttctaaataaatctggcgaggcagttgatgcccttaattcacttggcttatctgctgaaaagctatccaggattagtccagataaacaacttctggtaatcggtgaggctcttggtaaaattggcactaatgcagaaaaaacaactatccttgaaagccttgggaatgatctgtctaaacttttacctctttttgacaataataacgagaaacttaaacagtttattttcttagcaaaagattatggagttgctccagatccttcttcgatagatgaccttgttaaggtcaatcaactattcgaagacatggaagctcaggtagctggcttgaagatggaaattgctgctgggctggcaaaggttgatttgtctcctttgcaaagctctctcgacaagcttcatgacgtgctcactgaccctgctgtccttcaaggtatttctgatcttgtttctgaggtgactcagcttgctgggtggcttgttaaagctgctgcgggagcagggcaattagctgccagtacaggtaacaggtttgcagcattaagcgggaaaatagatcttaacaatattgaccaagtaaatgagcgaataacttatttgcaaaaacaagttgagggtaggaaagatatttactctcaggatgcatcaatgtttggatggcttacaggagtcgatgatagcgctaaagctctaaatgatgaattgtcttcacttatcgccaccagagataagttatctaaaccaaccacgggtaaccttccccttgcacctgcgactatcgcgactggtaatccatattcccttcctcctggaggaacaaacgggaaaccaacaaaggctcctgttgataaggttcttaatgctttcaaaagtgtcgaacaaagctatcttcgccagctggcacttactgaccagcttaacggtaaaacaaaagaagctacagaacttgaaaagttaagatttgatatttcatcaggaaaactatcaggaataacacaggcgcaacgactgaggctcgagggtcttgcatcagaaatagataaatataaattacttgagaaatactataaccttcagcaagagttacttactccagaggaaagatttctcgaaataaccaaggagcgtatcaagcttttaaaggaagctaaagaatcaggccttgcaaaaccagacgactattctaaagcggctaaagctattgctaataatgcgtttgaagctgctccagaattttcaggtattgatccactttttggtggtcaaagtggggaacttcgaaaggtagataacgcgcaaaaggagctggaggattggtattctactcagctcaatttgttggctgaataccgacagtcgcagtctgaacttaatgacgagtgggatgcaaaagagctcgcccttaagaagaagcacgatgaaagccttcaggctcttaatgatcaaagaaatcaactgatgctgagcagtataagtgacggtttgggctcaatggttgatctgacaaaagaggctttcggtgaacaatctgcaatttataaagctgcatttgtggcacaaaaagcggttgccattgctcaatcgataatagctattcaacaaggtatcgccatggcatctgcgaatccttttccctataacctggctgctatggcttcagttgctgctgcaaccgctggaatagtttcaaatatttctgcagtcggaatggcgcatgacgggattgatgcagttcctgaaacaggtacctggttgcttcaaaaaggagagcgggtgaccaccgcagcgaccagcgccaaactggatgccactctggatcgagtagcaaaccagtcaaccggtggtggaactatttattctcccacgatcactatccccatcaatggtaacccttccgatgcaactttggcgctggtccgtaaggctgcagatgagggggcagaaaggggataccagaaggcggttaattcagtcgcaagcggtcagggtgatttacataaggctctgatggggaaaactacctcggggaggaaaattagctga

SEQ ID NO: 271343 - DNA, 1059 bp, Klebsiella pneumoniae
atgaatgaacaacagtttggtatctatagttctcttgaaacttttatagaacaggaaatatttagagaactttgcagtaatatttttggaataggtgtaacaaacaaaattgaaggtattgatggtgctttaggtacacacccaggtttaaagagaaagcggaacgaagacaggttggctgttggctctatcacccttaatgatagtctcatttattgtgcaattctctgtgatggtgtcggaggttctgcctttggagacttggcttcttcattagctatcgcaactatattcggatatttaagtacagaaaatacaaacgagcatcttcagaaaaaaatagagaatgctgttctgtatgccgataaaactatacaagataaattattaggagacggagctacaactttaagcttgttagttgcttcctcgtctggtgaaatctatgcacttaacattggtgatagtagaattttttcttgggagccatctaaaaaggcactaacacaaataagttgtgatgacactattgaaaatgaagttagtaaactaaatattaaagataaaaccgccttggaagcatttggcttgaagggcacactatctcaggctttgggtgaatccaatcgtaatagtaacgatctaaattttgttttctatgataagtcatatttcaatgaaggttttattttagtaagcgatggtgcatggaaagattctgagacatctttcgaaaaagttataaaaaatgcagctaattctttagatgtagtaagaagaacattggctttagcgacctggtgcggtggaaccgataattcttcgattattgctttttcatcaaatcctgtattcactaccgaaaataaaaattttaggcataatcattcaaatataatcattggggataccaaatatagtttccttaacgaaaagacaaatattaaaaaaacctctctttcatataaaaacaaaaagaaaccacctactaaatcaaagaaagatgacactaattcaaaagagataacaattgtacctattggaaacaatgacaaataa

SEQ ID NO: 271344 - DNA, 360 bp, Klebsiella pneumoniae
atgagcattactgttaacaccctggccactatcgtgaccggcgtatccgctatcgcatccggcgttgtcagcgtttatgaaaacggcgaaaaactgctggaaatcatgaaagcggccatcgtaaaagtggaagaagcctatgccagcctgaaggctgctggcgcgaccaaaaaagcgctggtgctggcaacactacaggcggctgccgaagccctgggcgaagcgtgggataaaatcatggattatttctccgctctcatcgattccgttgtcgatctgtacaacactgcgaaaggcgtgattgatgatgtgaagggcgacacgggcaccacggaaacggctgctgaagcaacggcatag

SEQ ID NO: 271345 - DNA, 345 bp, Klebsiella pneumoniae
atgaaactacagaggccgctaagcagaattctgctgacgctgagcgcgtgcgcaatgctggcagcgtgtcagagcgaacagcagcaattaacgacgcaatccgacgcgctaacgacaaagccggtcgttaactgcgaagaagacaaggcgtttcagaaactgccagattacccggagtgtgcagactgtgacaaaactactgacgttgctgtactgcgtacttacatcgctactcagcaggactgggcggttaaaaccatcggcgtctatacctacaactcaatcctccgcgacaacaccgccgcctgcatcaggcagctgcgcgacagcggcattatcaactga

SEQ ID NO: 271346 - DNA, 231 bp, Klebsiella pneumoniae
atgactctcgtcgataactggaagcaggcatggaaatggtattcaacccacgcgctgattctcgccacttccgctcctctggcgatgtccgaagctgagaagtatttcggccacgaattcccgctatgggtaaaagcgatcgtcgctggcgtgattttcgtgagcggggttattggccgcgtcattctccaggagaagcccgatgtggtcgatactcagcgcgataattag

SEQ ID NO: 271347 - DNA, 468 bp, Klebsiella pneumoniae
atgccagataatatttcagcattccttgacgtgattgcgtgggcggaaggcacgagcaaaagccgctacaccaaaaacaacggctatgacgtcatcgttgacggcatcaactccccacacatttttactaactattctacgcatcccaatatcctggtgaccgtaaaccggaaaggactcaaatcgacggctgccggtcgctatcagttgctgggcaaatactggccgcattatcgtgacaagttaagcctccccgattattcccctgattcacaggatgccgtggctgttcagttaatcaaagaacagggcgcgtacgctgatgtgctggccggacgcattgaagtcgccattcagaagtgctcgaacatatgggccagttttccgggagccgggtataaccagcgtgaacacagaatgtctgaccttgttgctgtgtttaaaaagttcggagggaaagtcgcatga

SEQ ID NO: 271348 - DNA, 222 bp, Klebsiella pneumoniae
atgaaaacaatgtcagacaaagttaccactgccgctgcgtacacaacgtcaggggcaacgtttattgccggaagcatgtcgcttaacgagtggctggccttgggcggtttcattctcgcaatattcacatttggcattaacgtctactaccagcgcaaaagggaccggcgcgaagagcgtgatagcaagatgcgatatggggggcgtgataatgccagataa

SEQ ID NO: 271349 - DNA, 1089 bp, Klebsiella pneumoniae
atgaaaaaagaaattattgacagcttgaccggaattagaggtattgctgcaatatatgtagtgatataccatttatttcaccatgcgtctgataataacttcataaataatggatatctttcagttgatctgttcttcattctgagcggctttattataacgcatgcacacagaaatgatttttttgatgtagtgactaaaaaaaactatatcacttttatgttatcgcgagttatgaggatatggccagcatacgtattttggttgttattcaacattgctataattgcattaaaaggtcgacctatatcatttgaccaaattgtatccaacgtacttatgatacaaaacatgggtttatcgtcatcaattatcggcactggatggtccttaagtgtggagttttttgcatatttcttcttcccttttatatgcatttttacaatgagtaaaaatgcatataaatcattatatatttttttactttctgtatgcgtgattatgttagtggcgtttgtcaggcattcgtttatcgtaggttcacagataaaatttagcggtcctttggacgttatgtcttttgatggattcggggcgttattgagagggttaagtgaattttgcatgggggttgttggatataaaatatacatatacgccaaaaacacctcacttaaatatgtaaaccacctcacatatgcaataacattcatattaattgcatcgctgctatcaagtggtatggatgttttattttcagcctccacattcgttttgataccgcttcttgccatgggcaacaataaaattgtttcattcctaagttcgcaattttcagtctttcttggaaaaatatccttctcgctgtatctttgccacattccgctagttttttatatatattcgagagcagagctactattaagcaacatcattggacatgaattatttcttctagttgcatgtggggctataagtatcagtgcatgtatatttattgcctgggtttcttatgaattaatagaaaagaaactgaggatttacatcaatataaaaatgttcaactcaaaaagaatagcgaaaatttaa

SEQ ID NO: 271350 - DNA, 1095 bp, Klebsiella pneumoniae
atgactattttaattcaggattcattacgtcgcgccgttgaagctgcctccggcggtgcgcagactgtactttataccagcgccggtgacccgtcgtttgtgaatattattcccaaatttgacgtcagcacgattgatgcatcgctggggtcgggaacgcatccggcatttattgtgaatggcgtcgaggttgatcagatattcgttgggacatatccagggagcattgtaaatggtcagttactgtcactgcctgaccgcgctccagctgtatccgttccatacaatgacggcatcagcctggcgcgggctgcaggtcctggctggcacgccatgactaacgctgagtgggctgcaatcgcattactatgctattcccagggccattccccgcgcggcaatacaaaatgggggctgtcatctgacaatatcagtgaaaaggggcggcgggttgatggcatgacggccggggcagaatccggaacgggtctgacgctgacgggttccggcccggttggctggcggcacaaccgtgactatgcaggcattgcagatttagccggcaacgtttgggagcaggtgacgggagtccgattctgtggtggtgagctgcagattatgacgaataacaatgcggcgatgggctctactgaccattccctgtcgtcaactgcgtggaaggcggtaagcggtgttgatggttctctgctgataccaactggcacggggaccgccgggaccgattcctgggtgccgaccacgaccaactccgtgcggatcgacatatcgggaacagggaattacacactggtttatggtgagaatacgctgtttacgagcgcccgaaatccgggtgctacgccggtagcagaagcggcgctaagagtgctgcgcagactgatgctgttcccgctggcgggcctggtttccgatgattcgctgtcgtactcaaaaggaggcgaggtgatgacactgcggggcggtgcatattcgaacggtacaggcggcggtatcaacgcgctactcgctaaccgtggacgtacttcagttggtcaatctaactctggtgtccgtcctgtttactacaagccgtaa

SEQ ID NO: 271351 - DNA, 1203 bp, Klebsiella pneumoniae; identical to SEQ ID NO: 202785

SEQ ID NO: 271352 - DNA, 153 bp, Klebsiella pneumoniae
atgcttgtgtggctgagcaggagaggcatgtattgtatgaagaatttttgcaatcataatttaatttctattttttttgttattttgaataagtttattattggttatgctcagtgtgataatattcagttaattatggattacaaagagtaa

SEQ ID NO: 271353 - DNA, 357 bp, Klebsiella pneumoniae
gtgccgccgtcaccggaggcgctctctcagcaccgggctgtgcattatttctccggtcaggcgaggcgggccgatgagttccgcttcgttcgccatggcgagaccttttctgtacccgtcagcggcaacgccgcggtgaatgaaacggggctctatataaaaatgtgcctggcaggatttgggctggcgcagctggcggagaatatcgttgctgaccacctgcaggaggggagactggtggaagtgctgacggactggcagccgcccccggtacccgtcacattgctctatccgcaccagcgctttctctctcccgccgtgcgggcgtttgctgagtggatgagcgaggtggtttga

SEQ ID NO: 271354 - DNA, 2034 bp, Klebsiella pneumoniae
atgcaacccatacacccccttatcaaagcggcaagagataaaaaattaccgcatccagcccagttgaataaattcaatcaagaatactggattaaattcatggaccaaataggtccgctaactgcagaggcttcagcatacatttcaggtgctacgtggctcaataataattttcaaagtgtgcataatactcgaaagcaaatttgttttttaaagggctgcagacctgaatatcatgaaatgatcagggcacatatcgccagtgctaattatgcattttggcaggtatgcgacgaacaaaaagagatttttgaagatacaagcaatacagctatagagcagtttattatctcaaaaacttcgaaggtaggaaaaagcgacccggtaagtgtcaacagtgtaaatatgcatagacttgacagtctaagaggtccattgttcgagctatttaaatataaggaccgtatgcatatactctttcctgatgatcgcccgaacaagttatcaaaacttgacttttatctcgcagaaatgaggctgtctcagcactaccatagcttttcttcgctgtggcaagacttgctctatggtcgtgcagtattcactttccagcagaagcgagtctttttcatgcaatgtcattctgactatcaccgcatgaaaacaattgcagaataccgtcgagatcattttttagccacttcaataactgaagctcgtaccgtaatggataaatttcagaatatcaatccttggtcaaattatctacattatgagccaggtaaagcgttgagctcagcaccatggcgaacattatctcaacgctcgcaagtgattgccagatatcagcctttatcggctttaattcagcttgacgaccacctcaaatcactattaaaacgcaaatcctccccttgtattgaacgtaaattacaaagtgttttagatatatgggttcatctatctgtgctggctgttcagattgatgaacatctgcacacaaacgaggaaatcaacgactggtcaaaactagttcatcttgcacctcaatttgaacattctaatcttattgctgcactaatacagtgttgtgaatatagtgaaactgagatcatcgatgccctagatttattgacctggagaggaaagtcgccgcaggaggatttatgggtgcagcctctggtgtctgtagaggataattatgttttcccgatcagtgcttttcttacagctagcctaacccgcaatatagattgttggatgactaaaatagatcccaatgatactcgccgtggaaaactatttgagaaggatttgattagagtattggaagagtgccgaaatggaaactcggtgatgaaggagcatttgcgctatacctctgcaattgaaccaaactatcatggacataaggaagaaatagacctgaccttctcttttggaaacttactaattgttgtagaagctcgtagccgtaaaacatctatcacgccactcgattatgacaatgaacttttcgattctaacgggctggtgcacaaaaccaagcaggccattagaaaagcagcctttgttaaggaacatcttgagcatttttgtagggattattacccccacttatcaggtacagaagacgttgaggttgttccattagtaataatcaatggtcaatttcatgcgggttttcctctgaataacgtacctattatcgattcagcgcttctgttgcattatcttcgagatcgtgaggtgcgttttatggcagcagcatcttatgacaaacatcagtatggcatcccactttggcaaagtctcgaagaggcacaaagtcgtttcagggattatctttcatgccctactttgataaaggtttacgattcaatgtgtagagagtcagtaaaacgctccagcaatctcggggaggattttgatgaggttgtttcacttacattcgaaattcatttcatgggatgggaagagcaattggctcatgttaaacgagcctttcaaaatcaatttgtaaaatattactga

SEQ ID NO: 271355 - DNA, 1515 bp, Klebsiella pneumoniae
atgttaattgatgatattatttcaggaattgatgagggcggaccaaagagttattactctttcgaaacgtttgtcttgcatctttttaagcaccatctagagaatcaacaaaaggaacttcaaatttctcgagactcatcacaatttggagatgcttttgctccgaatggtttcgaccaatttcaagggccaactttaattgaaataaagttcgatttaacaaaatccccatttcgtatgttcttagatagatacatactaagattcgcgaatgaatacattgaaaataaaataaaaaatgtgttaattgtttctgcaaagccgattccagaacgattcttgctgcgcttcaatcgtgagattttaaatagttcgttcccttttaaagtgttcctatgggggccagcagaattaaacaaaatagtatcaaagaataaaaagatagtaaatgaaatccttaaaaacctcttttcattaagactatcatctgctatatccaagccagttagggattggaaaatagaacgagatgaaatattagaaaggttaaaaatttgctacaacaaaggtcagttttcattatttttgggcgctggagtatcaagtagtgctggaatgccagattggaataccttattaaattcattgtttgtaacttaccttacacaggaatttaacgaggatatcgcaattagtgacaaagatcttgatgatattgtcggcaggttaaatgctatcaacgagccctcagcattgatggctgcaagataccttcgtaaaggattttcaaaaggtgatggtgaagcaaaagacttcatagaagctgttactaaaaatctgtacaaactgagaaattctaatttccctatcgattctgaattaataaaatcaattgcatcaatgtgtcttccaaggcgtaccggtgccaaagtaaaatccgttatcacctataattttgacgatctacttgaaaggcaattaattagcaactctattttacacagatgtatttatactaataatgaaagctttgatcctgatgaacttccagtctaccatgttcatggattcttgccagaaaatagaaaactttatgatgggttagataaatcaactttagttttttcagaagagggctatcatcatatttattcagactcctaccactggtcaaatctcgttcagttaaattcatttagagaaaatagttgcttgatggttggattatcaatgacagacccaaaccttagacgattattagatatttcttcaaaaaacattgaacgcagcaagcattttacatttatgaaaagaatttcatcaaatgaattctgttatgaggataacgcaggaaagaaaataaaaataattgacaacatcgaatctgctgaaaaatttcttgagcgacaccacactttaaacgaagagctgatgaaagaattaggcgtaacaatcatctggtatgaaaaatacgatgacattcccaagtttattagggaagtaacgaagcattaa

SEQ ID NO: 271356 - DNA, 4290 bp, Klebsiella pneumoniae
atggtaaaaccgatgaatctggacatcatatcgttggaccgatcctttacagtagtccctaagaacagccttggtaatgaagatgaagcatccacatctatgggcatctcatcgggatcaataaaatggtctcagcttgaggatgagtatcgggttgtgattcttgcggctgcaggtgctggcaagaccgttgaaatgcgctctcgcgctgaaatcatcaagcaaagtggtagattagctttttttattcgcatagaagatttgaatgagtcggattttgcttggggtctggaagttggctctcctgaagagtttgagggttggctggcttcgactaacgaggcttggttctttctggattccgtggatgaggctcgtctggtagcgccaaatgctttcgaaaaggcggtaaaacgatttgcatacaaaataagtaaatctcgtcacagagcgcatatttatatttctggaaggccttatgcttggagcttcgcaagcgattatgaaatggttgaacgttatttaccattctcaactcaaaacgctgctaacagtttcagaaaagagaactctctaaacatctatagccttaactctttaaatttagatgatattcgcttttatgctgctcagagacaggttgataacacgactgaatttgttgatggaattgagcgagcgaatctacaagcaatggcatctcgcccgtttgacctcgattttttgatttcaacatggagtcaggaacgaaaattcggatctcgcttcgagctgtttgaacgaaatgttgcaacacggctcgatgaaatcgatccttcaaggcgtcaggcaagaccacttaaggcaacaaaagcgcttgagggggccgctcttcttgcaggtgccgtaactttcacaggaaaaagtggcattgagatttatgataagcaaactgatcgcaacggtgtgaatgctgaggttgttttagctgagtgggagcctcctcatgtgtgggctctactggagagaggcatttttagtgatgcgatatacaatatggttggttttcgccaccgagaaattcgggattatctttcagcgaaatggcttgattcattattaaaaaaagggcattccagaagaatcgttgaatccctcatatttcgtgatatgtatggtgaacaggttatcactcctagactcagtacattagtgccctggttgattttaatggatgataatataagggataaagcattaagtatacagcctgaaatagcactcaatggcggggatgtttctcatttaccactgtctatacgagttagcatgcttaaaagcattgtgagccggattgcaaatgatacagacgaaagatatgtgagatataatgatgctattggaatgatagccaaagctgatttagttgaggaaatatcatctctaatcagagagtattattcaaatgatgatgctattttctttttaactaggttgatttggcaaattaatcaacctatttgtcttgaagagttaatgtctgtcgcaattgatcaaaaaagagatgtttactctcgtataggagctgttagagcgttagtgacaacggcaacagatgatgttaaagcattgctatggaaaaatctgaatgagaaacagaacatttttcctcgacgtattttgaccgagctcgtaaatgactcaacgtttgacattcgtaacgtaaactatttattaaattccctcatgaagttggagccttataggccattcgagacgacaggattggtcgaaggaatcaaggtcttcatagataaagtatcttgcattcaatcccttgaagatgaagaagcgtgcaccgtactattggatggattttacgcgttaataaaacatcctccttattgtgaacaaccagatattaggatatctcaggggaatgggtggctgttatcttcagccatggagcttattgaaaaaatggtgttgttacgttcggatacttgcttagagacaaaagtgttagatttacttttggcttttgttcaagtcagagattggcatggcgatcatattcgggaatacaaaggggcattgtcagaactagtacccgcgtggccagagttaaacgatgctcttttctggcgtgcagtagagaacagaagagccgaagcgcaattcaaaaaccgcagattgatcgatgactggcatgtccaatggccagggcatttctttaagtttgatgttccaagttttgagcgagttttgaactatgttagccaaaaagaattacttgatgatcggttggttgcgttgtctttggctctgcgcatttatactcagtcgaataataatgaacaatatttatccaaaattaacgaggtatccgaacaacatgatgagttagtacagaaagttgaattatattttaatcctccttttgatccagaaatagatgaactaaaccggcaacaggctgatttaaagcgtcgaggtgaggaaaaacgagcacagaacgagcgtaagcgaattgagtggattgagcgtgttagagccaatcctaaggatataaaaagtccacccggactggcgacaggtgagatcagcaatggacaatattggctataccaggaaataaataagaataagcatgatcatctcgctaaaaatcatgactggcatgatcttattgaaacatttggtatggacgttgcctgtgcgtttcgtgatgcagctatggcatattggcggatgtaccgtcctgaagatgaaagcacgacttcgataccatttaggcttgtttttggattgcttgggctggagatcgaatctagagaaaatccggattttcctagctatcttccaccggatgaagttcaacatgcccttttgtatttaacaaaagaaatgaatggctttcctggctggctggaaaagatgtatcaaacttatcctgaaactgtattagacgcactttggaaagaaatagagcgggagtttgataatgagagccaaccaaataaagtaaatcaacttttacatgacattgtacatcgggctccatggagtcatatagggctggctccacggatttatcactggcttgagagaaacgagccgcaattaaatcaaaacttgaggaattgtatccgcactttggttaatggtggtgtcagttttgctgagcttgcaaagttggcgagcgttaaaattggtaatcctgtggtggaggagaatctcccaatatggtttgctttatatgttgataccttaccggatgaggccataccaaagctaaataaatggcttgaacaattaccaaaagataatgcaagtatttttgcacaacactttgtgacgacactcaccgggaaattccgtcatggtgaagagagaacttcttttactggtggtgttcgtaacccttcgagcttaaaaacattatttttgattatgacaagatacatcaaacctgaagacgatttggatcgtacgactgttacctgctacacaccaacgctcagggatgatgctcaaagcgcccgtgaactgctttttcagtggttagctgcaattccaggtaaagagacctatgttgctttgatggaacttactaacgagtatccttataaagattatacgcagtggatgatgagagcagctcgcaacagggcattagccgatgcagatttcgagtgttggacagataaacaggttcacgatttcgatgccagtttggtctttacacctaattctccagcacaactttaccaaatgggggtctattatttgctggattttaaggactggcttgaacgtggtaatgatagtttggctaaaacctatcaaaaaattaccagcgaaactgagatgcgtactgttgtcgctcatcatatccaaaatgcagcgaaggggcgattcacttgcgctcaggaggctgaactcgctaatagtcaaaggccagatctttggcttcaacatcacgaagtttgtattcccattcctgttgagttgaagctgttggataaatcctggtcaggacctgacctctgtgagcgtttggaaaatcagttgataggagattatttacgtgaaaatcaagccgatttcggtgtgtttttactcatttggcagggtgaaaatcaatcagataaaaattgggttattaatggtgtgaaagtaaatctcagtgaacttgaaaacgcattaactcaacattggttatctatctcacctaagtatccaaagataaaggatgtaaaaatcattgtgatcgatttaagtcttcgcgaaatacgatctgctgaataa

SEQ ID NO: 271357 - DNA, 273 bp, Klebsiella pneumoniae
atgagtaaccagacagttcgatgccccttctgctttaaggaaagtccccacggtgtaaaaatatgcattggatgccatgcaaaagtggtctatggcgaaagcccggtcatagtggcatttctatttcaattcgtggcgttcggtctcgcatggttagcattttcattgaccggaaacactcctgtctcagtcattacgtttttcgtaagctgtattgttcttatatgtatacttaaaaaaatctatgcagacagggttctgtttattcaataa

SEQ ID NO: 271358 - DNA, 252 bp, Klebsiella pneumoniae
atgctgacgataccgccgctgacggttcacgctgtggtggtcgctcagctgactcacgtcctggcgggcagtaatgataaagcccaccatgcggtgggcttatttatgtcgcagtacatttcaccacgcagcacaccactgtttaaatatcagggttttctcttgtcaaatgtcagattatgtttctacctatcacgaatttttaagagcattaccatatggaaattttttgggttgtggtgggcgttgtag

SEQ ID NO: 271359 - DNA, 285 bp, Klebsiella pneumoniae; identical to SEQ ID NO: 102270

SEQ ID NO: 271360 - DNA, 438 bp, Klebsiella pneumoniae; identical to SEQ ID NO: 214956

SEQ ID NO: 271361 - DNA, 588 bp, Klebsiella pneumoniae; identical to SEQ ID NO: 213915

SEQ ID NO: 271362 - DNA, 123 bp, Klebsiella pneumoniae; identical to SEQ ID NO: 6161

SEQ ID NO: 271363 - DNA, 402 bp, Klebsiella pneumoniae
atggccagcaccgtcagcaccgatataggtcacacatggctcaccgtcttcagcaactgcagcaatctgcttcagaatcggagcgaccagctcataggcttctttctgcccaccaggcatgatggaaggccctttcagagcgccctcttcaccaccggaaacaccggtaccgataaagttaaaaccttcggcagacagttcacggttacgacggatggtgtcctggaagaaggtgttgccgccatcaatgatgatgtcgcctttgtcgaggtaaggcttcagggaatcgatggcgctgtcggtcccagccccggccttcaccatcaacaggatacggcgtggtgtttcaagggattcaacgaactcttgtactgtatagtaagggaccagcttcttgcctga

SEQ ID NO: 271364 - DNA, 429 bp, Klebsiella pneumoniae
atgcagtatgtgaagacatgccctgtcctgaatgttgaagagtgtgaccgcctgtcttttatgccctacctgttcggcacggatttcatgctcgcggaattacaggtgtacgctctggccaaaaaatggatgcccggatatgaggggggcttctggcatttcatccgcctgccggaagggggcggatacatgatgccagacagtgggcgggtacatctggtcagtggcgaaaactggtttgatcgcatggtcagcgccgacgcggcgggcattattctgaccagcctggcgattaatcgccgtctggcggcccatcatgacagcagtaacccggcactgacccgcctttatatgctgcgtgatgcccagctctggaatcacatcacccttcacccggaatgcaacgccatttacgccgcgctggactga

SEQ ID NO: 271365 - DNA, 330 bp, Klebsiella pneumoniae; identical to SEQ ID NO: 226797

SEQ ID NO: 271366 - DNA, 297 bp, Klebsiella pneumoniae; identical to SEQ ID NO: 266565

SEQ ID NO: 271367 - DNA, 297 bp, Klebsiella pneumoniae; identical to SEQ ID NO: 266566

SEQ ID NO: 271368 - DNA, 588 bp, Klebsiella pneumoniae; identical to SEQ ID NO: 243449

SEQ ID NO: 271369 - DNA, 243 bp, Klebsiella pneumoniae
atgctgcagttttcatccaccgggcagggccttcgggtgaccaacccaactccgtattacattacgctcgccgatcttaaggtggccggagtcagggttcctctcagtgcggtagcaggcaacaccatgatagtgccttttggggctcagttatatgcgcgtgcgccgcatcaggggcgggttgaatggaaggctatcaatgattatggcggtacggaggtgtttcatggttcggtccgctaa

SEQ ID NO: 271370 - DNA, 510 bp, Klebsiella pneumoniae
atgtccgccggacgttcgtcagtggatattgcgctttacaccctgatacccgtcatggtcgtgatgatggtgatgatgaagtatctcgaatcagtgggcgtgctggcgaagctcgtaaatgtggtggcaccggtattgaagccatttggcctcaccgggctcagtctttttgccctgatacagctcaactttgtgagtttcgccgcccccgttgcgacgcttgccatgatggaaaaaaaaggcgcgtcagatcgtcatctggccgcaacgctggccatgttgtttgccatggggcaagccaacgcgctttatccgctggccccattgggactgcactggattacaacggtcctgctgtccatcgtgggggggcttggccgctggggcggtaacgtggtatctgcctggccgccgtcttgcttcgaaagaggtgatttccacagacgatgcgcaggtgcacgccccgcaaaaagccggtttgctcagcatcatcaacggcgcagggggtga

SEQ ID NO: 271371 - DNA, 672 bp, Klebsiella pneumoniae
ttggccatctggcggcggggggtcgcgcacgagatccgcaacccgctctcgtcgattaaagggctggcgaaatattttgccgagcgcacgccgcctggcggcgagtcgcatcagttagcccaggtgatggccaaagaggctgatcgcctgaaccgggtggtcagcgagctgctggagctggtccggcccgcccatctaaactaccagacagtcgatatcaacgcgcttatccgccactcattgcagttggtaagccaggatgcgcagagccgcgggatcgcgctgcaatttactccgcgacctgagttaaccacgatcagcgccgaccccgatcgcctgaatcaggtgctgttgaatctgtacctgaatgcaatgcaggcgattggccgtgacggcgtcattcgcgtaacagcaagcgaagccgatcgtcagcgggtgaaaatcgtcgtcacggatagcggtaaggggatgagcgatgaagagttacaggctatcttcacgccgtatttcaccaccaaggcggacggcaccgggctggggctggccgtagtgcagaatattatcgaacaacatggcgggacgatccgcgccgaaagtcagccgggagctggagcgatatttacgctttggttaccggtggatgctcaacggagggaagatgagcagcgataa

SEQ ID NO: 271372 - DNA, 1152 bp, Klebsiella pneumoniae
atgaacgatgtcattcgtgactttttcaaaatggaatcagctggtggtattcttctcgtgattgccgcggcaattgcgatgaccattgctaactcaccgctgggcgaaacttatcaatctgtactgcatacttatgtatttggtatgtcagtttctcactggattaatgacggcctaatggctgttttcttcttactcattggccttgaagttaagcgagagctgcttgaaggtgcgttaaaatcaaaagaaaccgcaattttccctgcgattgcagcggttggcggtatattagctcctgctcttatttacgtagcctttaatgccaacgatcctgaggcgatttctggttgggcaattccagcggcgacagatatcgcttttgctttaggtatcatggcgttattaggtaagcgtgtaccagtaagcctaaaagtgttcttgctggcggttgctatcatcgatgatttaggtgtagttgttattatcgcgctattttacaccggtgacctgtcgaccatggcgttgcttgttggcttcatcatgactggtgtcctattcatgttgaatgcgaaggaagtaacaaaacttacgccatacatgatcgtcggtgcgatcttatggttcgcggtgcttaaatctggtgttcacgcaacattggcaggtgtagtgattggttttgctatcccactaaagggaaagcagggcgaacattctccacttaaacatatggagcacgcgcttcacccatacgtggcatttggtattctgcctctattcgcatttgccaatgcggggatttcgttagaaggcgtatcgatgtcaggtctaacttcaatgctgccactcggtattgctttgggtctactggttggtaagcctctaggtatctttacctttagctgggcagcggtaaaaatgggcgttgctaagttacctgaaggcgttaacttcaagcatatctttgcggtatctgtgttgtgtggtattggctttacaatgtctatcttcatttcctctttagcgttcggaaatgtaagtcctgaatttgatacctatgctcgactcggtatcttaatgggttctacgacagcagcattacttggctatgccttactgcacttttctttgcctaagaaagcgcaagcgtaa

SEQ ID NO: 271373 - DNA, 255 bp, Klebsiella pneumoniae; identical to SEQ ID NO: 268996

SEQ ID NO: 271374 - DNA, 255 bp, Klebsiella pneumoniae; identical to SEQ ID NO: 268996

SEQ ID NO: 271375 - DNA, 174 bp, Klebsiella pneumoniae
atgaaccattatgatgatctgcagcgctttcaggaaaaaacgcggacgcaaaacctcaaatttcaggatctttcatcgcaagccgccacgcgcgagcatggcgactgggcgatcctcaatcagctaaggaaggtgcgaataagcaggtcatttcttcccaagctgactcgctga

SEQ ID NO: 271376 - DNA, 141 bp, Klebsiella pneumoniae; identical to SEQ ID NO: 102393

SEQ ID NO: 271377 - DNA, 255 bp, Klebsiella pneumoniae; identical to SEQ ID NO: 268996

SEQ ID NO: 271378 - DNA, 141 bp, Klebsiella pneumoniae; identical to SEQ ID NO: 139621

SEQ ID NO: 271379 - DNA, 2184 bp, Klebsiella pneumoniae
atgacggtctcaactgaagttgaccataaccaatacacaggcaacggcgtaaccacatcgttcccgtatactttcaggattttcaagccgtcagatctgaaagttcaggtagctgatgtagatgagaacattaccgttctgacactagattccgactatagcgttactggtgctgggatatactcaggcggaacagtggttttgccttctccactgaaaaatggctggcagatattaatagccagggacttgcctgccacgcaggaaacagacctgcgaaaccagggtaaattttttgctgaagtgcacgaagatgcttttgacaaattaactatgctaatccaacagtgctttgcagagttgggtttagcgcttcttaagccatcgttgatggcctcatactatgatgcaaaaaacaacaggataagcaacttacaagacccaaaatacgggtcagatgcagcaaccgcgcaatgggtggaagctcttgcaggtggcgccatcgaaggaactcttcgggctgatcttgctgctcctgacggtgcaggcattgtaggctatagggacagcaccgtttatacggctcttgatagattatacagatcgttaggaggggtcattatatctcctcaatggcaaccagttgcaggatcatcaactataagcttttctggtggtctttattcttttaatggcgttagtgttattggtaaaaatcagaatgtcacaacaacatcaagcacaatatgtattgttgttaaatcagacggaacatatgaagcgcgtgacagatatccatttgacggctcgctacttattgctcatattaaatcagggactcttatagaattaattggcaatgcaaataaaagtgcttttggaattgcagggtgtccatcatcaataccatggcttcccggtgagctgagaagaatagaagagcagattccaatttattgtgcacttcgttctgatggaacattgaggtattggactgattttgatgtttcttcaaaaaaggcatcaagcgggacgacatattatgttgactgcaccagtggaagcgatactacaggtgatggtacgttggccaaaccattccagagaataaaatatgccattgaaaagactccagcagccaggactataatgataaaaggcgggatggaatatacccgtgattttacatggaatgttagcgtagttgaccgcgagctcgatttcatcggatacgatggaacaccaattctgagcactgttgaaccggctgcaacatgggcggcacagggaagcgctggcgtataccagtacacaggtaatcttgttctaaacgttgttgactatgccaatcttgatagttatggacatgctcaggttctaactcccgtagccagccttgccgactgcgtttcaacacctggctcatcctataaaacagggaatacgctgtatattcatctttttgacgggcgagcgcctgattctaattcacggcttgttcttcaattgactaatggaagaattcaggataatagcaaagtttatattgaaaatattcactttaaggacagctttaggggttttcaggctgaggttcaaacggtgggtaaaaaaggatacttatatgcaaaaaattgtatatttgatttatctgtgacaaggaatgcctttaactctttaggtgtaaactgtattatgcagaattgcactgctcaatacgggatgcaggacgcatttaactatcacgccgatcagaatggattgggtgttaagccttggtttattgaaataggatgtgttggcaggtggagcggattcgacaatcagccaaataataatggttcgacagcgcatgatggtactgttggattacgcctgaacggagaatactacggtacttttggtcgcgtggtccatgacgtgcatgatggtactgttacagctaactttgggtgttactcgcatgacagctcgagggcagactttatcggtggcgcctgctttactgctggacaaggatctgatttaactggtaaagcaaaggtatatctatatggctgtaaacatagcggtccgaatgcgacaattactaaggatggactaagtgaagtatggatttttgatactccaatagggacaaatgcgcaatacacaattgctaatccctattctttcatccattaa

SEQ ID NO: 271380 - DNA, 696 bp, Klebsiella pneumoniae
atgactttgtttgaacgtttgttacaccgccgtctttgcaatgagcagcccactgatggcggcgctgcgccggcagcatctgaaccatctgcaccaggcacaggttctgcccctcagggcgatcagcctgcacaacaggatggtgaaaacccttccgttgatggggaaggccagcaagaaaaggctgagaaccaggacggagagcagcaaaaaaccgagaaagagcagaagcaggaaggcgcgccagagaagtatgaatttacggctgccgagggcgtcgacctggataccgaagcgctgaaagatttcgagccggtagcgcgcgagctgaacctgaccaatgagcaggcgcagaagctggtggatgcatacccgaaaattctggccggtgtgcagcagcgtcaggcagaagcatggcaggcgcagacagaacagtgggctgctgatgttaaggctgacaaagagatcggcggcgacaagctgaccgcaaacctcagcgctgcgcagcgtgcactggaacaattcggcgatcaagaactgaaagaatacctggattcaaccggtctgggtaatcacccggcgcttgttaaagcgtttatcaaagtcggcaaggcaatgtcagaagacaaggttgtcaccggcggtcatgaaagcggcggcagtgaccttatctccgccttctatcccaaaaagtga

SEQ ID NO: 271381 - DNA, 204 bp, Klebsiella pneumoniae
atgcgcaccatcgaagaacttggcaagcatgcagcattgctgaagtggcggcgccagtttggaccgttcgagaaatgcccggtctgctacgggcttatctcttcctgccaactatgccacggtagcggcagggtgattcaggaggatatcgactcctggaataacccaatcgccaagatgagacgggaggtgaaaaatgcgtaa

SEQ ID NO: 271382 - DNA, 672 bp, Klebsiella pneumoniae; identical to SEQ ID NO: 129616

SEQ ID NO: 271383 - DNA, 732 bp, Klebsiella pneumoniae
atgatcccgtcatccagtgctcttgtctccctgaagccagcccgtcaggcagcgctgcaggccatcatgacggtggaagaggctcgccagcgtggcgcacgtctgccatcgatgccacacgtccggacattcctgcgcctgctgacaggctgcagccggattaacagtgacgttgcccgccgcatccctggccttcaccgtgatccaaaagaccgcctttccagcctgaaacaggtggaagaggcgctggatatgcttatctccagccacggggaatactgtccgctgccgctgacaatggatgtgcaggctgaactgtttccggaagtccttcatacccggacaatacgcaggctgaaacgtcaggacattgccttcacccggaaaatgcgccgtgaagcccgtcaggtcgagcagtcctggttactgcgtcagaacctgctgggacaggctgtcacagaactgaattttcagtcaccggaaacggtcatcagctggtaccgccggtggatcgatgagtttgacgcgagtgagctggaaccggccttctggcgctggcagacgcgattcgcttcactcagggagctggtctggctgcgttacagtcatgcaccattgtatgaggtgatgcatgaaatcagttttatcgtcaggggatccggggaacacattctggagcgcgaacgctggctggttcccaacaaacttgagttgcgggagagaaaacgatga

SEQ ID NO: 271384 - DNA, 1275 bp, Klebsiella pneumoniae
atgagcgagatgagttatctggaaaaattgctggatggggttgaggttgagtggttgtcactctcaaaagtattcaacttaaggaatggttatacaccgtctaaaactaaaaaagaattttgggagaatggtgatataccttggtttagaatggatgacatacgtgaaaatggtagaattctagggaattcacttcaaagaatttcatcctgcgccgtaaaaggggggaaactatttcctgaaaattcaatattaatatcaacgtcagcaacaattggtgagcatgctttaatcactgtacctcatctagccaatcaaaggtttacatgtttggctttaaaagagtcttatgtagattgctttgatattaaatttttattttactactgtttttctttggctgagtggtgccgaaaaaacacaacgatgtccagttttgcgtctgttgatatggatggattcaaaaaatttttaatccctcttccctgcccggataatccggaaaaatccctcgccatccagtctgaaatcgttcagattctggacaaatttactgcacttaccgctgagcttaccgctgagcttaccgctgagcttaccatgcgtaaaaaacagtacaactactatcgcgaccagttgctgagttttgaggaaggggccgcacctttctatcctctgggacaaaaagaggttggtgaatttattcgaggaggtagctttcagaaaaaagacttcactaaatcaggcattggttgtatccattatggacaaatttttactcattatggaacatatgcaaataaaacaaaaacatttgtatctgaatctcttgcacaaaagtgccgcaaagctaaaactggtaacttagtgattgccaccaccagtgaaaatgatgatgacgtgtgcaaagccgttgcatggttaggaacagaggatattgcagtaagcagtgatgcttgtatttacagacataacctgaacccgaagtatgtttcatatttctttcaaacagaaagttttcaatctcaaaaaagacaatacattactggcactaaagtaaggcgagtcaatgctgacaatttagctaaaatattaattccagtaccatcgcaagaagaacaaactcgtattgtcgatatattggataaattcgatctcctaaccagttccattagtcagggccttccccgcgaaatcgagctacgccagaaacagtacgaatactatcgtgacttgctgttcagcttcccgaaaccagaagccgccagcaactga

SEQ ID NO: 271385 - DNA, 339 bp, Klebsiella pneumoniae
atgaataactccacctcatacaacactctgcaatctgtcctacaaacctatcatgataatttcgccctccctatgctgcgtcttgtcaacctgatgcagcgtgacagaacgcctgaaagtcttatggcggcgattaacgcgcaagaactggcacaggaaatgttagagcatattggcgacgtagcgagccgtatagcgactgcggaacactccacgctaacacaggatgaggcagatagtatttctgaggaaatctctgatgccctgctgctgctattgtcgtgcattgaggagacgggcgaaatggcgctcgaactggcaccgaacaccaactactag

SEQ ID NO: 271386 - DNA, 501 bp, Klebsiella pneumoniae; identical to SEQ ID NO: 85998

SEQ ID NO: 271387 - DNA, 279 bp, Klebsiella pneumoniae
atgtcacaagccccattagatgctcccgaaactaaactttccgccatcatcgataatgcaatccgcaactccatgggagtggcgaatatccgaagccggatttcagagctactgggttctctgcgcggtgcagaagaaagtgagtcggaagatgccgaaaaagcgctttctcccgatggttccctgaatcagttacatgtggttctgagcgaaacagaatcctccgtgctcgcgttgcagagcgaacttgacgagctgttttctctgctcggtcgctga

SEQ ID NO: 271388 - DNA, 270 bp, Klebsiella pneumoniae; identical to SEQ ID NO: 235366

SEQ ID NO: 271389 - DNA, 174 bp, Klebsiella pneumoniae; identical to SEQ ID NO: 194888

SEQ ID NO: 271390 - DNA, 330 bp, Klebsiella pneumoniae; identical to SEQ ID NO: 194880

SEQ ID NO: 271391 - DNA, 642 bp, Klebsiella pneumoniae
atgagtgaaggtgagcaacagctgctcactattattgggcttatgcgtttcactcagcgagatgaaagtctctttttgttagatgagccggacacacaccttaatccagcgtggtgcttggatttgttaaaaaacctcagaacatatggtgtcgaccctaaaaacagccaaattttaattaccacacacagcccacttacttttgcaggtttagacaagcacgaagttgtgattgtggacaaaaactcggatggtcagatttatagctatcaccctaccaccgctccaaaggggatgggtttccaggctattctaaccagtgatttctttaagttacgctcgaccctggatagggatactctgaatttgcttgatgaaaaacgtgagctgggtttaaaagaagaaaaaaccgacgaagacagacagcgacttgatgagctcaacacaattcttggaaaattagatttttcacatgcagcacgtgatcctctatatctagaatatatccgcgcaattaccgaagcacaaaaagagtttccagaaattgcaaacgcaactcctgatcatgtttcttggcaggttaggaaacggatttctcttgatattgctaaacggttatcgagaaaaaaggaggacgtttga

SEQ ID NO: 271392 - DNA, 213 bp, Klebsiella pneumoniae
atgtgcattccgctgaacaggaaaatcagatgtgtacgaaatcacatttttttccctgtcgcctcggctgccgcggtccggcaggcggccgaagcatcgctcgccgcgcgggaaacgggcggttactcttccagcagccgggcctgcagcgcggcgcgaaccggcgccgtaagctggtactctgccgccagccaggcgtcgacggtgccatag

SEQ ID NO: 271393 - DNA, 270 bp, Klebsiella pneumoniae; identical to SEQ ID NO: 235366

SEQ ID NO: 271394 - DNA, 471 bp, Klebsiella pneumoniae
atgagccgattagcagcaattatcagcgccgttgtgatctgcctggttgtttgccttgggtggctggccagtcactaccacgacaacgctaccgagtttaaaaggcagcgtgacgagaaggttaaagagctaaaccttgcgaacgagaccatcaccgatatgacaacccgccagcgtgacatagctgcgctggatgctaaatacactggagagttggcagatgctaaagccactatcgatcagcttgagcgtgatgttgcttctggtaagcgtcggttgcagctcaacgcgacctgccccaaaaacagaagcagcagcccggccagctccaccggcgtggatgatgcagaccgccccggacttactgactccgctcaacgggattatttcaccctcagaagtcgaatcgaaaccgccggaaagcaaatagccggtcttcaacagtacatcagagagcaatgtcttaactaa

SEQ ID NO: 271395 - DNA, 243 bp, Klebsiella pneumoniae
atgaccttttatgaaactatcatgctgtggttctcgaccatcgtttccgcactgtatctcattgccggtggctgggtaaaaatccgggattacattaaggcaaaagcgcaggctaagtctgatgcaattgaggaagaggtgcagacgcgactgaaggccgcgcaggctgccagcgctgatgctccggctgctacagccacctcagttgctggcccggtggctgaaagcaaaactgctgcataa

SEQ ID NO: 271396 - DNA, 492 bp, Klebsiella pneumoniae
atgatttccgtgcgtttgccaaaaaatattgacgaccaaattggctacattgcctataaaacaggagagactaaaaactcaattatctgtaaagctttagctttgtatctggaaaatgtgcatttggcttcaactccactgcctgagggttttcaagaggaatcaccagaggatatgggcgctgtgctttctgaactggaggaaaataagcgcagtgaattcatcgaccaaagtctagagattcgcaaatggattaatgaccgcatgatttggtctaacaacccgaaagatttaagtggaaacccagtggtgaatcgaggacgtaacttagtcattggttttcaatggcctgactgttcgtccggtgacgagattatgcttttttatcgtcatttaggtggagcatcaatctatgggttaggagatgatcaaattcgcgcgactacttaccagaaatggaaggacagcatggtggtggttgatattaaatag

SEQ ID NO: 271397 - DNA, 852 bp, Klebsiella pneumoniae
atgaggaagatattttttgataatgaaaagggagtacctcaaggattgtcaatatctaacattttagcttcgatttatctgcaaggtgtagataatgaaatgctaaaatttgatgtgacttactatagatatgttgatgatgtactaatgtatggtaattatgatgacgtaaactcagcttaccattcattaaggcgcaggcttaaatatagggggttaaacactcatccgccatcatcaccaaaaacacatttaggttttcttaatgagtcctttagttttttaggatatgtgtttaaagaaaatgttataacagtgcgagattcgactgttgaatcatttatgaaatcaattgcatctaggttcagtgattatcttcacaataaaaacaaaaggttaaacaaatatacacatttaacctctgatgatctaaaagacatttttctggaagagctaaatgataagttaacaggagctattagtgagaaaaaaagatacgggtgggtggcttattattcaaatattaacgacctttctcttcttcataaaatagattttataataagtgaaatgtttaagcgcttggatgattttgataattgtgcaccagaaggattgaaaaaggtagcgcgtgcttattatgaaatgaagtttagcccacatagaggttatatacgagattatgaccagattaaaactataaaacaaaaaactgaattcttgcaccgacgtggaaggattgctgaaggcgagaggttaactaaagaacaggttgaagagcgttatgaaagatataaagctaaaaatttagctagcatgcaagcagatgaaggtgaagtgtatcctaagtaa

SEQ ID NO: 271398 - DNA, 156 bp, Klebsiella pneumoniae
atggcttttttttggagcatgatgggtatcttgaaagcgaggacgttcgaaagcttaataacatcattaataatgagtcatcgtctgctgatgtatataaaacgctatcaattgctcaacaagagcgacatgcagcaaaaagaaatcaagttttga

SEQ ID NO: 271399 - DNA, 324 bp, Klebsiella pneumoniae
atgaccctggactatgtggcgctggccattctgatcgccgtggccttaatacttttttatggcgtgattgttattcacgatattccttatgaaatcgccaaagagcggcgtcatcctcatcaggatgcgattcattatgccggttgggtcagctatttaccctccacgcgctgtggcccttgttatggatctgggcgacgctgtggcgcgaagaccgcggatgggggatgcgccacattgccgacgagcagcaggcgctgcatcagcgtctggaaacggtggtccagcagctggaacaggtccagcgcgaggtggacgttctga

SEQ ID NO: 271400 - DNA, 669 bp, Klebsiella pneumoniae
atgaaccatccaactttatggggtcagtccactacgccttaccgggcctacattctccctgcgcgctcctgtaggccgggcaagcgcagcgccgcccggcaacaggcacaagagatgaacggaaccgtctggcagtcaccggcaatgggcacaagggatgaagggaaccgttcggcagccaccgacaatggacattctgcgcctctcccgcttcaatgcccggtggcggctgcgccttaccgggcctacattctccctgcgcgctcctgtaggccgggcaagcgcagcgccgcccggcaacaggcacaagagatgaacggaaccgtctggcagtcaccggcaatgggcacaagggatgaagggaaccgttcggcagccaccgacaatggacattctgcgcctctcccgcttcaatgcccggtggcggctgcgccttaccgggcctacattctccctgcacgctcctgtaggccgggcaagcgcagcgccgcccggcaatgggcacaagggatgaagggaaccgcccggcagccaccgacaatgggcattctgcgcctctcccgcttcaatgcccggtggcggctgcgccttaccgggcctacattctccctgcacgctcctgtaggccgggcaagcgcagcgccgcccggcaatgggcacaagggatga

SEQ ID NO: 271401 - DNA, 354 bp, Klebsiella pneumoniae
atgaaatatcaggttaaagagtttattaacgataaatattctaaagctgttaatattttaaaggataaccttaaagaacactaccatgttttttatggggtgagattgagtgagattcttttccctgccagtgaatacggctctgatgctttctttaatgagttcgaagcaataaacagtattacattgccattaattattttcgaaatgaatgaacgtaaacctgtagttatcattggctttgaacaaattgcaggtgctgtttttgttgaacaattagatattaaggttttggttattgacgacctgtctgaattgcttactaatgaaacgctggatttattatacaactga

SEQ ID NO: 271402 - DNA, 738 bp, Klebsiella pneumoniae
atgatgacagaatctgataaagaacgtttcaatgaacgtatatgtgttggtcatgtgcttgtcagtgctgacatttatgtaacgcctgttatgactgaaagcgcggctgaggtggagttaactgtccctaacgatgattatcaaaaggcaatggatttgtatgatcgtatttgccagtttgcattgcttcatggtgaagatttacaaggtctattccagactagcagatattactacatgtcatgtttcgtgcgtgatattgaagcatttaagaaagaatttgaaaaagaggaagagctaaagcctttatttaatcatgataagggcgatacggctgagtttgttatcagcttccccgaaaaggctaactatgatgataaggaaccagttaaaaaatcctttctggaaatcacacaaaaacatgtcgattcattagatgaacttagatggggtgattttgaacacagagcattcactggcgtaacggtaggctttgacgatgaacgtgacaacataataaaactatctcgtaaggatttcgtcgcctccaatctcactgattctttcgaagatgatttttatgtcaatcctttgttcaacaaagcagaaaaaattggtgagattgacggttatcccgtctgtttcaatcccgggggattttatttttactggaacaaagaaaccgaatatctgcttgaaagttggttgacgttccctgcttatccgtatggctggtaa

SEQ ID NO: 271403 - DNA, 417 bp, Klebsiella pneumoniae
atgctaagagaattaactggtgtgagccgtactttatggcgagctgcattttttagcctggttaaggctccagcaatggcgttgtttattggttttgtctttttgtccttcaataactccattgcggacacgttcctgacatcagccagagaacttaccgggaatgctccaccggataaggttcagacctgtgtctttaaaaaaaataaacaggaactatcaccttacgtacagcaagaaccatgcgtgaatacgctgactgatgcaaaggactggactcagacgttcgacagaaaaattcgtggtatttactggactattgccctgttcggtttttttacctggttttgttttgatggtatggctgctcagttaatgctgaaaattgatgacatgtgggagagaaggaaaaaatga

SEQ ID NO: 271404 - DNA, 324 bp, Klebsiella pneumoniae
atgaaagcaattaatacacctgatgcaagaagtgtgagagttgccggaattgaaattatcgatagtgtcaaaacggtcgcttctgtttttactgaaatcctgttgtttatggtctggtttccggcaattatctatgggctttatcgcgttatcatcgttttgtgggatgattccttaaaaccgcaatcactcatggattttattaatttcatggttgagttatacagctatgtgcttccttcgctggcagttatcgcagtggttttaatcgttgttttaagtttatttaaagtgttttctaaggtctggaggaaatcatgctaa

SEQ ID NO: 271405 - DNA, 198 bp, Klebsiella pneumoniae
atggatgataaacatttgaaagatactaatggctctgttctgttaagtaattcgtgtgtggataataaaaactctgggttgtatattccagaaggaattgcttattcaaaatcattgattgcctacaaccctacaggtgaagcgttacaaactcaatttttaactggctggatggaaaggagttgtaatgaacattaa

SEQ ID NO: 271406 - DNA, 339 bp, Klebsiella pneumoniae
atgaacacttatgttatcacttttcaggctttaaacgttaagaaagaaaaaatcatctgctccgcttttgtccattcagaaacgctcttcctcgcagttcattctttcgaagataaaaatcgcggtcgtggttatgtgatcacgtctgttaatgagttattgaccgatgaattgacagctaaaaactccctcaagaaaaatattaacttttggtttaacgaatgtggattaagtaaagaggagattattaaagaaattaatcactggaaaaattttgcatactctattaaagaactggaggaagccaaagaagaagcgataagagaactgcggagttaa

SEQ ID NO: 271407 - DNA, 171 bp, Klebsiella pneumoniae
atgggtatggtaagtaatttttttagtgagtacgggataatattattagcactagtgaatagttttgtgatttggaagttccttaatggttcaaagatgattctaggattatcagtaataataaacatagcaattattatcatagttttaatggatgtattcaccaggtaa

SEQ ID NO: 271408 - DNA, 357 bp, Klebsiella pneumoniae
atgacagccaccaaaaatgcgaagccacaggtgagcaaaaataactatccggcagccgttgatcataatgccgccatgattgaagaactacgtgctgatcctgaatatgcgaatgcttatctcgctaatgccctggaagaaattaacgagccaggcggtttaggtggttttcttgttgcgttacgacaagttatcgaggcgcgaggggggataacagaggcggccaaaaaatccggccttgctcgtcagagtatctaccgcgcattatccccgaacggaaacccgaccatcacaacacttgcacagcttgcagcagtagccgggttacagttcactctcagtaagcccaaccactaa

SEQ ID NO: 271409 - DNA, 336 bp, Klebsiella pneumoniae
atgccttacacggcgaaacgataccagacagaaagcggtgaggttccatacaccgactggatgaaaaaattaagacgtaaagaccagaccgcagcgttaaaagtagattccagaattgcccgcgctatgggggggaattttggtgatcataagtttgaaagggacggtgtatgggaattacgaattgattatggtcctggctacagggtttattattcaatcgaagatagcgaaataattctcctgcttattggcgggaacaaaaaaacacaaacagccgatttagaaaaagccgtcagttatctgcaagattttaaaaagaggtcaaaaaaatga

SEQ ID NO: 271410 - DNA, 828 bp, Klebsiella pneumoniae; identical to SEQ ID NO: 268243

SEQ ID NO: 271411 - DNA, 513 bp, Klebsiella pneumoniae
atgtttttcctcccatccgatagcctgaaacaggcccattttcgggtgataccaacgggccccgcgtggttcggcttctgccatcatttggcggaatgctttcataaaaggttcaaactccacgatcgcccgtcgagacagcagaccatcaggcgtcatgaattcgtgtgtatcggtggggatacggtatgcgttaacaaggtttcggcacttggcatcggtcatgccgctttttgcgactatctgacgataaccgacatacccggcccgcatatttccacgcttaatgttctcaacagcttctgcgacggtttcaacctgttcttctacctgatacagccggcgttcctgctcaagattcaaaagggccatttcggcgatcagctctgcctgcgattttggccgggagcgttcatcttccagttctttccagcgatctaccagcctggcggtaaactcggggctaagttgcgcgaccacaatgatgctgtcgcgttttccttcttcacctga

SEQ ID NO: 271412 - DNA, 1758 bp, Klebsiella pneumoniae
atggctaaagttgcagatggcatacgctacgctgagcgcgtcgtggcggggaatatcattgcctgcgaatttgttcgcctcgcttgccagcgcttccttgatgatctgaaattcggcgaggaacgtggcgtttacttcagcgaaccgcgtgcgcagcatattcttaatttttacaagtttgtgcctcacgttaaaggcgctcttgctggtcagccgattgaattaatggactggcatattttcattctgataaacatcttcggttttgttattccgctggtgaatgaagaaaccggcgaaatagtgcttcgtaatgatggcagcggaaggccggtaatggttcgccgcttccggacagcctataacgaagtggcgcgtaaaaacgccaaatcaaccttgtcttcaggcgttggcctgtatatgacgggcgctgatagcgagggtggtgcagaggtctattccgcagcaacgacgagagaccaggcgcggatcgtgtttgaagatgcaaaaaacatggtcaaaaaggcaaagccaacgctcgggaagttgtttgagtttaataaactggcaatttatcaggagcaaacagcctccaaatttgaaccgctatcctctgatgcaaacaaccttgacggcctgaatatccattgcgccattatcgacgaactgcatgcgcataaaacgcgtgatgtgtgggacgttctggagactgcaacgggggcacgcctgcaatctttgctgtttggcatcaccacagccggtttcaacaaggagggtatttgttacgaacagcgtgattacgccatcaaagtattacgtggctacaacagtgacgtagaaggtgcggtaaaggatgacacctattttgccattatctttaccctcgataatgatgatgatccgtttgatgaaacggtatggcagaaggcaaatcccggactgggtatctgtaagcgctgggatgaccttcgacgcctggctaagaaagcgaaagagcaggtttccgcaagggttaactttttcactaaacacatgaatatctgggtaacggctgagtctgcctggatggacatgatgaaatgggagaaatgcgagtatatagctccccggcatgagcttaaaacctaccccatgtgggctggcgttgacctggctcataaaattgatatttgcgcagctgtaaagctctggcgtgctgataacggacacgcccatgctgactttaaattctggctacctgaaggacggctggaaaaatgttctgcgcagatggcgcagatgtatcgcaaatgggccgagctaggaaaacttgagcttaccgatggtgacgttatctatcatgcccagattaaagcggattttctggaatggattaacggcgagaacctgaaagaaactggattcgacccgtggagcgcaacgcagttcagcctggcgctggcagaagaaggcataccgctggtggaggtccctcaaaccgtcagaaacttttctgaatccatgaaagaggttgaatcgctggtctacggggggcgtttccatcacagcaatcacccggtaatgaactggatgatgtcaaacgtcaccgttaagccggataaaaacgacaacattttccctaacaaatccacgcctgaagccaaaattgatggtcccgctgcgctatttaccgcaatgagtcgaatgctggttaatggcggggaacctgaggcaagcctttctgatcacctggaaagttacggcgtccgttcactttaa

SEQ ID NO: 271413 - DNA, 654 bp, Klebsiella pneumoniae
atgatccaaaaatggaacggtcaacaaaaaggtttaacgaatcgtaagtccataaaactaccggaaggtggcaaggacccaatcgaccgcatttgcgcagcgtatggcttcacatcaaggcaagctctatgcaggcatctcgacgtatcgcaaagcactatggctaatagagttatgcgaggaaacttcccttcagactgggttttaatatgcgcaatggagaccggtgcaccactcgactggttagtttatgggcgcggagaagcgcccgattttgccgccgatagtgaaaaaacccaaaatgaacacgatgcagataaaaaaactcatttgagatatacaaaaattcaaaatggagtcatccaccatcaaaagcagattgcagtctccaccgagctgatccctgtcggcacgacctcccctcagttcgtcagttctgacggtctgatctgggtagtcgatgatttctctggagagcttgtcgatggtttttggatggttgaaatggatggcgtgatcagtattcgtgaaatatatcgtcttcctggtgggcgtgtccgtgttgagaatgggaaggcctcttttgagtgcagcgcttctgatatgaaagttcttggtaaagtagttagtaaaacggaactgttaaatgcgtag

SEQ ID NO: 271414 - DNA, 201 bp, Klebsiella pneumoniae
atgttgaccaaccaaccatcaatggcatcgcttctcgttaagcaaagcccatcacctcatttcggacacggctggatcatggggactgatggcaagcgctggcatccgtgccgctcgcaggatgcgctgctggctgacctgtccactactaaccaggggaagccatggctattaaaggcgctgcggcaactgttccgttaa

SEQ ID NO: 271415 - DNA, 234 bp, Klebsiella pneumoniae
atgcgaaatattgaaacccgtaacaccaaaattggcccagatgatgttggccttaatttgctactgaccgaagcacgcaaggaagagcgccggggccgtgctgatgtgtttgctgcccgcctcgatacgctggcagcccgcatcacctcccgtcagctgaaccatgcagaagctgcagagctgctgcgtgaagaggccgtgaaaatccagaacgaagcgcaggagatccactga

SEQ ID NO: 271416 - DNA, 258 bp, Klebsiella pneumoniae
atggggaaacgtgactgcaagtatcagattgtttaccgggatgaggcgttggagtatttcatctcaggcggttgggtgttttttcaaaggccaaaggccagcggcggtggatactggcttggcagaacatttgacggtgtgtttctgctggagcttgaatacccggtttcgctccatgaggggatcgtgttcctcaatcagctaaccgaggttgcggataaattcatggattttgatgatgatttccagctgacctga

SEQ ID NO: 271417 - DNA, 2088 bp, Klebsiella pneumoniae
atgcaaaaatctgagtctgaggttttttccgagctggagtcattatgttcatctcatggttttattcatggtttggcgttattgagttgtattaataatattaccatctatgaagatgaactcggttctgaagatctgcaacatctgtacgaaaaagaacgattaataagaactgagatctctacagttgcaggattaatgttaaagtctgaaatcaatatcaattatccggggggggatgttctatcgaagttatgcgaaggtgtgaatgcatctttggctgctttgcatacggcaatgttttcggctgaaaaggatggtgattacgacaattcgatgataaaagaaagtatcttttatgcggctgaatctgcttatgattttcaatatttagacatggctgaggaaaaatattctttagatgacgtttggttcttggaaaacatgggctttacatgtgctgaaatggtatctgtcggtcggtgcatagagtctattatggggaggcaaattagtgcttttatacatagtggtctaggaattcttagcgatgaagcattgaaggcttataaacttccatttgatcaaatagcgactgaaacaggtttaaatgtcattaaagtaaaaaacattgttgatttattttcatcacacgagttttcaaatgaaaactttaaaggcatgagtgactttaatgtatttaatgctaggccgataatttgctctggaaatgaatattattgtttctctgcctattctttggctcagtctatatatgaagctccatttttttggatgaatgatgataagaaatacaggccgatatctgcgcaacatagaggacaatttgtagaagactatgtatacagaaagatggcttcggtttttggtgctgagaatgtattcaaaaatgtatatatagttaatagtaataatgaaactctaggcgaaatagatgtactggtgtccttttctgattcggtaataatttatcaggctaaatctaaaaagttaactattgaagcccggaagggaaatggcaatgctattcaaaaagattttaaaggtgctatacaagatgcctatgaccaaggtgtttcctgtgctcaatttatattatctggcgcaagtctagctgatcaaaacttcaatcaatttaatcttcgatcttcagtttctagatgttatattgttccaattatatctgaacattatccatctttaagttttcaagttcgtcagtacttaaatactacaattacaaatgaaatttacccaccatttacaatggatgtttttcttttagatgtattaactgagttcttaaatacgccactgtattttttatcttacattgatcgtcgttcgacatataacatgagagtgttttcttctcatgaattgactatcttttctttgcatctaaaacagaacttatggattaatgatgaatgtggcatgttcatgctgcatgacgatatatgtgttgatctcgatatcgcaatgttagttcgtaggagaggtatcaccgggaaacgtactcctgatggtattctaacataccatcaagatggttttgttagaaaaataattaaatcattagagtctgaaaatcataagttggcagtggaattaggttttcttttactttctttggatggtgataccattgaaggtattaaccaaatggcaaagaaaacgatatttctatcatcgattgacaagaagcatcatgatcttacaactgtaattggggatacaggttttactgttcattgtaattactatagtaaagatattgcggaaaaacaattgcatgaacattgtatgaaaagaaagtacataactaaatgtaaaaaatggattggcatacatgttcggccaaaaacatatgctgtaaattatggggttatgttagattttgaatgggagtatttacccgagattgaaaacatcattactccaagtcggcttcaaaatactttagttaatgttggtggtgttatgactcaagcgaaacagcccgggagaaatgaaccatgtttttgtgggagtggtaaaaaatataaaaaatgttgtttgcgttaa

SEQ ID NO: 271418 - DNA, 291 bp, Klebsiella pneumoniae
atgagcaaaaaacttgcggataaagtggcgttagtcaccggcggcagcgccgggattggcctggcgtcggcgaaagcactggcggagcagggcgcgaaggtgtacatcaccggccgccgtcaggaggagctggatgcggcggtaagattcatcgggcccgccgcccgcgggatccgcgccgacgccgccgtgttaagcgaccttgacgcggtatttgcgaccattgccgaagagtccggccggctggatgtgctgttcgcaatgccggcggcggagacatgctgccgctga

SEQ ID NO: 271419 - DNA, 2313 bp, Klebsiella pneumoniae
atgcatcttcactctctggtgtttaagaattttcgtaggttgaaagatgctcgtatcgagtttgcgaacgacctgaccatatttgttggagctaacaatagcggaaagacatcagcaactcacgcagtagacctgttcttgtccggctctaaagacaagttcactgtcaatgatttcagcgcagattgctggccggcctttgaaaatttcccgacggaagatgcggttgagcaagcccacgaattcccagtaataactcttgatgtgtggataagcgttgatccggataatctctaccgggtcgtggatctcctgcccagagccgcatgggaaggtgcactcgtcggtgttcggattgagtttaccgtgaaggacgcggcccaaacgctggccagctaccggaagatggcgaccgaggctgcgaagttcgcccagaataaggcggagcatggcgcagattacaaaccttggcctcgcaacatgcgcgactacctcgcgcgcgagctgaagaatgaatacggtctgcgctatttcattctcgacgaagcgtcgctatcccccgctaacgctggcgagacgtacacgccgaaagagatcctgggagacaccgagcgaacgggacactcaatcatcaattcgctgattaaggtggacttcctgagcgctcaacgacacttgagcgacggtaactcacaagctcgaaccgaggacttgtccaagcgactcagccgtttctacactcgcaaccagagcaagcgcgaagacgaccacaacgccctgcgcgcgttggcgctctctgaagaacaactgacgaagcatttttcggacgtgttcaaggacacgttcaaatcgctgcgcaagctcggttatcccggcctttccaaccctgcactggagatccgtgcagccctacggctggagcgactgatgggcgatcaacaggccaaagttcattacctactcgaagaagcgaccggtggcgtagaagccctgtctctccccgacagctacaacgggttgggttttaaaaacctcatctacatgggcgtcgaactcctcgacctccacgctgcgtggtcggtcacagaggaaggcgaggaaggaaaacgccagccaatccacctgatgtttatcgaggagccggaggcgcacatgcacgcgcaactccagcaggccttcattcgcaagctcaccgaactcatcccgtccgaaggggcggacggttacggcacgcagttcgtgatcacgacgcattccccgcacatcctgtacgagcggggcttcaaaccgatccgttatttccgccgttcggccgaaatcggttccaagcaatgctcttctgttttcaacctctcagccttctacgagagcaacaaggacgaccgggatttcctccagcgatatatgaagctgatgcattgcgacctcttcttcgctgacggtgcaatccttgttgagggcaacgtcgagcgcctcgtacttccgttgatgattggtcacggtgctaagaagctgaacgcggcttatctcagtattcttgaggtcggtggtgctttcgcctttcgtttccagaagctgattgagtttctcggcttgccgaccctgatcgtgacggatctcgacagcgtgtacccgcctaaacctaagaagactgctgacgccgctgcccaagatgataacgacgctggcgatgacgaggacgatgatctcgacgatgaggccgcggctgaaggggatgagccgaagccaagctcaaaatgccctgcaggaacggctggagctgttacggcaaaccagacccttcgccagtggctccccggcaagatactgattgaagaccttctggccgcaccgcctgaaagtaagctgcaagcgccgcaaaatggctcgggtgcgcatgtgatggtgacgtatcagtgccctgtaaccgtgaagtggggagaggagactgctgagctgaagagccgaactctcgaagaggccttcgcctatgaaaaccttgagtggtgccagaagaaggagcaccacgatctgaagctgagatggagcaaggcgggaacgatgccgctggccgaccttgcttcgaaaatccatactcgcgtcaaaggccagcatttcaagaaaaccaacttcgccttgggcctgttggctagcagcgacgcgacgtgggtcgtccctacttacatccagcagggcttagactggctgacgcagcacgtcacaatcgtagaaaaggtgtcggatggcacggctgaagtcgtcggtgtcgatgaagctcctgtccaacctcaaaatgttcaggtggctcaatga

SEQ ID NO: 271420 - DNA, 1890 bp, Klebsiella pneumoniae
atgaccagtcgtgcgggaaagccggatacgccggctgatatcgaactgagaaccctgctagacgatgatgcgtctaccgggttcgtgatggtttcaggtgcagggtcgggaaaaacgacctcgatcgtcaaagcgctcgatcatcttctcaaaacacgaggccctgctctacgagcgcagtccaaaaagattgcctgcattacttacacagaagttgcggtcggcgagatttggggtgatgttggcaacaaccagttgttccacgtgtccacaatccacagcttcctctgggcggccgtgaagccgtttcagagcgacatcgcagactgggtaggacgtcggctcgacaagaaaatcaccgacactgaaactgagattgaaggcttcacgaacaggacgcgggcaccgacgcgagaacgtaaacacgccgacctagagcgatatcgagcccaaaagctcacgatcggtgatgtgaagcgcttcacctacggtgtcgggagcgactacccgaagggcattctggggcatggcgacgttatcaagctttcgaccgagctgattcgggatctaccggttatcgccaaggtcgttgggcagaagtatcccttcatttttgtcgatgagagtcaggacaccgatccggatgttgttgcggcattaaaggcgatctcagctttgctcggtaataagttttgcctcgggttcattggcgatccgatgcaaaaaatttacatgtccggggccggcgtcatagcccctctagacggttggaaacttattgagaagcctgaaaattttcgctgccccgtcgcagtcctcgatgtgatcaatcaaatccgcgcgggcgctgacggtcttgctcagaccggaggcaaaacgaaagagatcggaggcgcacgcgttccggtccaaggttccgcgaagctgctcgtggtgtccaaggccgaccgtacccagagccttgccgaggcgcgacagtggctagcccatcacaacagcgaccccctttggcttagcgatgaagctgacgctgacgtaaaggtcttggtgattgcccatcgaatggcagccaaccgccttggcttcggctccctttacgaagccttccacgacaaaacgtctgacggtttcaaagatgggttcgatgacggcacacattggtctgtcgcccctttgttgaagctgctggcccccttgatgctggccaatgtcgatgacgatcaattcgaggttatgagccttctgcgtcgtcatgcgccttttttgcagcgcgagtacatgcaggcgaacgccgtgcccggcattttgaaggatatggacactcgagtgaaggcgctcgcgcagatctgcggagagtcttcagcaactcctgtattcgctgcgttcgaacacctgcgagatggaggcatgtttaagctggatgaacgcatcctagcggcaatggccgaatacgatgctgcggttccatcggctgagagcggcaaccatgccgctttggtgaagctccttcacacgccgatccggcaactatggggctatcgtcgctacatcgaggagcagtcgccgtttgaaacgcatcagggggtgaagggggcggagttcaaccgggtcctcgcgatcctcgatgacgaagaaggtcgccataaccagttccattacgggaagtatttcggaataacgcctctctccgacacggacgagcagaatatccgggatggcaacgaaacgacgattatgcgcacccgtcgacttctgtatgtctgctgttctagagctggcgaggatctgggagtcgtgttttttgcggatgatcctgcggaggcacatgctgccatcgtcgcgtcgggtctcttccccactcaggacgtgatcaatcttgccgcgccctag

SEQ ID NO: 271421 - DNA, 237 bp, Klebsiella pneumoniae
ttgggaagaaatgacctgcttattcgcaccttccttagttatatggggcgtgtctaccctgagctggaaaaagaaattgatttttgctggtcggggaattatgtcttccattatctgattggggatatttcactggcagcagagaggaatgaactctggtccctgtgggagcgtaattttatggagtatctctctatggggatttaccgggtaacggtaactgtggaaagttgttga

SEQ ID NO: 271422 - DNA, 819 bp, Klebsiella pneumoniae
atgaaaaaatgcccggttcttcttgttgtatcagggtttctgaccgaaaatgatatatcatggtttaaccgaattaaagcagggtgtggccttgatgtcagatactataaatgggaatcggcaaatctactatccatattaagttctgacatagcgaacaagtgggggttatatactctcttccccctgagaacatctcctttattgtcatcaatctccattccatttaaagcgcgtcaggcctggtataatgcaacgaaagcagcagttaataacagagaaaaattagcacacgtaataaacgagatatacgttaaagaaaagcgtaatgtgatcataatgggtcattctttagggactcgattaataaacaatacattaccctatattaaaaatgataatattctcttaacaatctctatggccggagccaccccaataacaagttatacagagaacataatgaaaatggcttacggttcaaaaatggggcatttaaatatctacagtgaacatgataaagtacttaacacgatataccctctcgtagagtcagtaacgccaattggggttcgggaggtgagattcagacctgctcggataatcaactggaagtggaatattggtcacactgaatatattacttcaaacaggattgattcattaacacactggttaaatgttacctgtgccgatttagctgatccagccctagaaatcactgacgacgacatgaaatcatttcatgatattattaatcttgcaaattcaacacatcataaaaacactgtcgcacctaaattaatatcatttgagtag

SEQ ID NO: 271423 - DNA, 903 bp, Klebsiella pneumoniae
atgggtaagcacgataaacttggatatcgactcggattgatattaactcgcctgaacaatggtgagtcactagccgtccgggagttatctgaggaatttaacgtttgcgaaaaaactatccgtcgtgatcttactcagcgcctgtcctatcttaatctgattcgacaaaatggtcgctatcgcctgtctgacggtgttctcggtcaacgcagcaatgctgatttacgtcatttcacgcgcatcctgggtattgaagggctgttccctcgctgggatgacagactactgagtattttgttaggtaacacgaaaaacaacccgtttctgataaaacaacgtccatacgaaaactgcggatcattcatgtcaattctgaatgtattatccgatgccatcctgtcacagaagaaagtaaattttaattacaaagataaagagtttcgggctgttgagccatacagactggttaatgacaacggattgtggtatctcgctgccgcccatgacagtacattaaaaagctttgttatctcatctgtcaaagacgtttgcatgagtaatatctctttcaggataatccccgaaattaatgaaaaaatagaaaagacagatggtatctggtatagcgaagaccttatcgaagctcttatttcagtttccgcacatgttgctccgtggtttacccaccgtcatctattgccaggacaggaaataattcatacttcccggtctggcgatttactggtgatatcacgtgtaacacacacagatcagataatgcctttaatgaaatactggataccggatgtcgaagtaatacaaccggcctcaatccgtcaacaacttgctgaagatatacaatccgcactgaaacgttacacccagccaagtaacgccccgtaa

SEQ ID NO: 271424 - DNA, 327 bp, Klebsiella pneumoniae; identical to SEQ ID NO: 27105

SEQ ID NO: 271425 - DNA, 2601 bp, Klebsiella pneumoniae
atgagcaataatttgcaggacatcctcgctgccgcctcggggtatcagtccgtgacttcagagccagcgctcaatcgtaaaagacctaaaacgcttgatgattatcctgtgataccacctgcatcaaaaaaagtatctgttatttcaagtgacctgacactccatatcggttttgataccgaatatgttttcaaccctgaaacacgacagaatgatattctgtcatatcagagttatgttgtcttacccgataatacaggtatatcgaacattatctatccacctgactcacagaaaaaatcccggctgtcttttaaggaatttctctgtcaaacgattacaccgcttcttgaaacgggtgtgattacaaaatggcccggtattattaatatatatgcgcatttcattcgtgcggatatcgcctcctttgccaatttctggtcagactacaaaattcttttgaaaggaatacgcggtactgtcagcagcttcaaaaatcgttacggtatcgattttgatgaacagcaggaacgtcgcgtaaagactgaacagataatgtttgacaaacgaacttcccctccgcgttgcagtaacgtagctttcatcgatacactgcttatcactcccggaggtatgggtctggctgaatgtggtgaattactgggtcttcccaaactcaccattcctgcaccttattccataaccaatatgcgtgaatatcttctgggcgacagagcagggtttgaagcctatgctctgcgggatgccgagattgcggttcgttatgctttacaggttcgcaatttttgcgcccgggagctgatgattgatcgtgtccccgccaccatcggggcgatggcagtttcacggttcaccaaaacacttaaagaaaacaatatgtctcctgaagtctgccttgggacacacattaaaacccgtgaactctggctcacggagaaacaggcattccggacgattaaaaaccccgccagtgttccttcaagagagttgtttgaaacgttcccgatcaactgttaccacggcggacgcaatgagtgttttatgatgggggttacaccgtctgatcactggtatgactacgatctggctggagcgtataccaccgggctattagatatcctcacacccgattacgggaacatccgcctcagtaaaaatccggacgattactgtgggcatgtaatgggatttgcgcttgtcacatttcggttcccggaatcagttccctatcccagcctgccggttcggaccgatcaatatgggttattctttccattaagtggcgaatcatgggcaacggcacctgaaatcgaacttgctctgtcgctcggggcagagatgacgatccataatgggatcatcgtcccctggatctgtgacacctccccacataacagcgaatcaacatcggtgtttcttccctttgttcaacaggtccgtgagaaccgtaatcgccatattaaaggttctctggaggagaaattctggaaagaaattggcaactcgctttatggtaaacttgctcagggccttcgcgccaaaaccgcctttgatacagcccgtggattaaacagatccctcccaccatcatcggttactcagccattctttgctgcgcatgtgacgggatttatccgggccgttgtcggggaactcatgaatgctttgccttctgattcatcggttgtcagcgtcacaaccgatggctttttgacaaattgcccacttgacaagataaacatgagcggtccactgtcttcccgcttccagtcgctgtgcgatattgttgatccgggttcatcaatgttgacatgtaagcatgaggtcagccagcttatcgccatgaaaacccgggggcagttaacctatagagctattcagggaaaaccggttgttcatgccagggctggcgtcaaacctcctgccgatattccacgcagtgactataacgactatatggtagatctttaccttaatcgtttacccggtcagacgttatcccgaagtacgttgatatcaacgcgtgagatgtggctctcggaaagcgatctggtatcccgggaacaggatatccgtcttaatctggaattcgatttcaaacgccagcccgtacggcccgccatgaatgaagggcatctactgatgttttcccgcccgtgggataatatggaagaggctctgcagcagcgctctcttttcgacgactggcggcaaacgcatacactgaagaccctggctgactgggatgactggtgtgattttctctattgccggacggtgttttctgatatgaaactaaaagtcggaagcaaacgtagtgatgatattttagtcagactatttctccgggcgctgactcagtgccaatgggggctgatgctgaaagataaaaaaagttattcctgtaaagaggttgctgaatggctgacgtcagaaggctattcagtaacggtgactgatgtaaaaaatgcggtaagagcaaaaataccccaaatggaatttagttctgtaacaccgcgaatgaagtcactgatggatatcatagcccgtaaatatccgacattctgtcttccagtctga

SEQ ID NO: 271426 - DNA, 639 bp, Klebsiella pneumoniae
atggttactaagaacacagcaaataatgctaataatgcactgaacattcttcctgaagcagcaaacacagctgtagacaacgatgaaaaatatctgtcctttgcattagttctcgctatcacgattatggacaacttagtaaagctcatcggcacagatggcttcgtactttatacctacaccctgcaggacacggctactgctcgtgctgtttttaatgaattagccaggcgtctcaaaaatttcaatcgtcaggaggaggtctacaccaccgattccctcacctttcgaatgaaatacatttacggtgttaccctgttcgaacatgatagtaaatctatccttaacctctttgataagaagggttatccggtattgagtgaatcaggagaacccggttctcttgatgatatgtatcttgacattcaagcccgattacatggcggctacgcctcaaaaaagtttcttcatttacatgaacattgtctgttatctgcacacgttaccccgtctgtggaaaagacgcaacgcggtatcctgattaaagtaggcaggaaactcgtttcctttatccatgtagatgatgaatcacacaaaaccgatattttcaaatctgtagtaaatgttattaaatcttga

SEQ ID NO: 271427 - DNA, 1128 bp, Klebsiella pneumoniae
atgcctattctggatctgcgtttcagcaacaaatcacttcaccaacttccacatcccctcacgggttgtcaggaataccgtgatattcactgccaaaacctgcgtgctctggtgtatcccaatcggatcacgctggcctttcgtgccactataaacaatcagcgtatatatgaaaccctgggtcagttccctcagctctgcgttgaggatgcccgtcagcatgtgatgaaactgcttgctgataaaaatcgtcttgcggttcagtcccgtcgattcactgtggaacaggccatcaatgacctgtggctaccggatttgcagttgtataaaaagagtcctcagtcagagttgtcaaaactcaacctctacgttcgcccgttctggggcaagcggcaacttcgcgacatcacggcaggagaactggaacaatatgctgctggcttacgggaaaaattacgtccgtcaacagtaaaccgtatcctcgcaatattgtccaaaatatgctctctggcagtacgtgctggatggatcacgcattccccgatgacacatgtccgctatctgaaagaaaataacattcgctatcgcacactgtcagcgacagaaatcccgcgctttattaacgcggcaacagcgctgcaaacaccggcagctgattctatattgcttgctctttatacggggatgcgtattggtgaggtatgtaccctgaaatgggagtactggcacccggatatgcatcaactcatactgcctgatacaaagtccggacaccctttcacctgcccacttgcacctccagccattgcagttgtccagtgccagcaggacctgatgctcagcaaaacttacatttttccgcgactaaccgacaatgcccgccctctggcatatccgcgtgcaacctttgcccgtatttgtcgggatgccaacattgataacctgcggatgcatgacctgcgccgtacctttgccacccgggtactacaggcgaccggggatattgcaatcgcttcccatctgctaaatcaccattcactcacggcgacccgtcgctacgcttttcacaatgcagcgacatcacacgtagtggtttctcaggtcatagaaagttatgacacaaaatga

SEQ ID NO: 271428 - DNA, 1131 bp, Klebsiella pneumoniae
atgttcgagaaaatgaaaaacaatgtaacccgtataccggggaatttaaccaaacttaatcaataccaaaaagacattgatcacctgtctaaactattttctgaacagcaattactggaactaatgacgactaccgaatccgatcaaatattgcaaatgaagcctgctgtagatattcttcatgtactatctccatcagcatctactgctaagcatatcaatttttttcagcacgtcccagtgctcgaacaatggttaaaaaaggagtgcactgcctttaatttactggcagtacatttctattcacagcaatcccgtaaaaatgtaattccgaaagaaatctgtatgctactggatgcatttattaaaactgaactttcatctgtggttaatggtaataataatgccgaactcctttcttgttttcaaaacacgctggataaaatgtgcaatacactaacatttatagaccacacagttacggaacaatcaggtcaagtagcaatgcttgatttcagcgcaaaaatgcatgaatatactgttgaaatcaggacctttttgaggtctgaatactggctaaacaaactacctaaggatattaacattccatccattgacctatcctggcttgtgttttgttacttttgctctgaatatctttttgtatttattcaaacaacgctcaatacaatgaaggcaggaaaaatcattcgtgataactacctttatcatcctaaaatgattgcattgatcattttatctatgctgccttatgaagtcattcataacgatggatcactgagtgagtttaaaacgcctttaaccagccctgatgagttcataatcaaatctatttgcattaaaggtaagcaaaacactacagggcataaaaaagatatagaacaattgcttcgtaagacatatatctatattgcattactcttaaaccctgagtgggcaccatcttccaaggagttgatttcctttttatcaggaaagtccacagtgataagtggttcactcaacttccagtcaacctccagtggtctgggtgttcaaacaaacaatatcactcttcttaagaatgaggtttacttcgaaaaaatagcgaacaagatcatgaaactgtag

SEQ ID NO: 271429 - DNA, 1167 bp, Klebsiella pneumoniae
atgagtattgccaactgcgctatcggcccactttatgatgagcaaataaaaaaaacacttatgtatgctgaccataaattcaagcggctaatgaatacacgaatgtcgttactcgaacatttatcaccccactatcacttatcttccatgttcagctatgagttggagggaagagtttttcggattaaattgatcaagcctgagattaaattatctcgccagcagttgatcttctcctcactctttttagagcaagattttctaaaagaatataaaaaacacatctcaaatactctacaaaaaacaatcaaacagtgcattaaaaaatacaaacaaaaaatcaaaatcgagccttctattttagattacatatcagcgtcaccccgcaatacgtcgagttatgtattacatgagatagtttctcaatgtgaacattgcgatgaaattcgcaatattaaaaatgatatattgcttgatgaactaacgttgaatggccggattactaacatttcaaaatacattaaaaatagtcaagataaaatcgtcgaacatatagagttctgcactcataaacttgtcaatataagtcgtaagaatcgtcacattttcaacagcaccacaatctctggcagaaaacccaacatcactggtgttttactttgcctttcagaattgataagcaatctgcatatttacccaactgcaattaataatataagtaacgccataattttaagcattgtatactctgtacttcaacatcttcaatccggaagagaaacagaaaaaaccaaaacctctccagcactggattttatccccaccatcatcgcacctcatgttttctacctggcgaaacgcgaaaaatcctctcaatataaatacattgaaaaagaatatcttctcggccagttacttatatttttgatgtataaaacagtttactactcgactcataacatcagggtaagccataagcacttctataacgatataaaaccaaaattaatggcattaaaaaaagaaagcttattaagcaccaatttcatgaaaaatcgaagtgagattagaggtgaagtctttggtgatgttggtagtattgaggctgatttgagggaaatcagcacactgattcatcggcggaaggcattatttatttccttttaa

SEQ ID NO: 271430 - DNA, 1233 bp, Klebsiella pneumoniae
atggtgcctaaggggtggacgcttctccaagtgtcagatatttgtaagttacaaaatggtaatagtttcaagccacatgagtgggatacacaaggtctccctatcattcgaattcaaaatttgaatggaagcgataattataactatttttcaggtgttcctcaggataaatggttggttgaaccagggcagttactattttcctgggcaggtacaaaaggtgtatccttcggtcctttcatttggaatgggccaaaaggtgttttgaatcagcatatctacaaggtatttgcaaatgaaaatgttcatggacactggctgtatttagctttattgcatataactcaaaaaattgaagcgcaggctcatggtttcaaatcaacattattacatgttcaaaaaaaagacattgataatcaatttgtgcttaccccgcctgttgctgaacaaaagaaaatggcccaaatcctgtcaacctgggataaggcgatttcggtgacggaaaagcttctcaccaacagtcagcagcagaaaaaagccctgatgcagcaattgcttaccgggaaaaagcgcttgggattgcccgctggtagctatgaatttaagattactcgctatggctcgatcccgaaagattgggattatccagccatcaaggaaatatgtactcaagttagcgagaagaattcagccgctgtagatcatccggtactctcatgctccaagtatgacggttttgtcgattctctgaaatactttaacaagaaagtttatagtgatgacttatctggctaccggttgatccatcgtggttgttttggttttccgtctaaccatatagaagaaggctcgattggcctacagaacctttatgatactggtatcgttagcccgatttatgtagtttttcgtgcatcgcctactaaagttgacaactcatatttgtacgcggtactcaaaacggaccactataagcaaatctttggtgcagcaactaatgcctctgttgaccgcagaggaagcctccgctggaaagaattcaaccagattcatgtgcccctaccaccattgaaagaacaacaaaaaatctccgccgtcctgtccgctgctgacgccgaaatcaccacgctggagaaaaaactcgcctgcctgaaagatgagaaaaaagccctgatgcagcagctactgactggcaaacgtcgtgttaaggtcgatgaggcggttgccgaatga

SEQ ID NO: 271431 - DNA, 264 bp, Klebsiella pneumoniae
atgcaaacccaatatgccttaaaacaggcaggattaactctgcctgttactaaagaatttcagcagcatattactactcttctggcaaatcaggttttacaaaaaataactgaggcagtggttattaatttccgtgatccggactacagtgcagaatccgggggctttcatcccgttgaaatacggtttgtccgtaagaataatgaatggtattttgattatgtcacagaatttagggaaggtgcgaacaagttcctgatatga

SEQ ID NO: 271432 - DNA, 534 bp, Klebsiella pneumoniae
atgagtaaatcaaaattagttaaaaataatgttgagtcagtttcgaaggagattaaaaatgaggcagaggttattcatgaaaatctcagtgcagatgaacaaacattatctgatgtaaaagactatcagttgctcattgaaacaggccaggcagaaaaaatcagtcctaaggcaagtggtatgctgacatggcaactggcgatatcagaggtggacaatgaactttatcttcgtctggtggcaaatggctgtggagggttgttctctaaggactggatctcactttcaaagattgcaaccgttctggaaacacaacctgctaccggcttctcatccggagtattcaggccgttattcaaaggggcaagcgccaacaatgcaggttttctggctgctgttttacgctccccggatatatgtctgctggaggcacatccagagaagttatttactcatgtattatacccggactggagggagcggttgaataaacttaatacgatcagtagccaggaaaagattacagaggattaa

SEQ ID NO: 271433 - DNA, 315 bp, Klebsiella pneumoniae; identical to SEQ ID NO: 86463

SEQ ID NO: 271434 - DNA, 546 bp, Klebsiella pneumoniae
gtggtccggtcaaaaagcggctttggatccttgagagcggcttcaccacgcaacctatcggcgtttcgcctcaggattcagaaattctggctgcgcgtaaatttcaggtcgccgaactggcgcgattttacggcgtgcctccacatctggtcggcgacgtggacaaaaccacctcctggggatcggggattgaacagcaaaacctgggctttctccagtataccctcaaaccctaccttgatcggtgggagtacagcattgagcgctggctggtcaaagagtcagaacagggcatcattcacgccgagcataacctcgacgggctgttgcgcggtgattcaacaagccgggcatcatttatgcaaatcatggtcaataccgggattcggaccgttaacgaggttcgaaggctcgataacctgccgccgctgcccggaggtgatgtggcgacacggcagtcgcagaacgtgcccattaccgatctcggaacaaacaaagagccccgcaatgccggggcttaatttttatgggggctatgatgcctga

SEQ ID NO: 271435 - DNA, 498 bp, Klebsiella pneumoniae
atgcagatgactggcatatgcgtatgtctgccctatgcagatgcgcggcatatggatatgctgtgcatatcctgctttctcatttttccaccgcagatccgaaaactcccagtcccggacgtctgcaaagttgacctgtttcccacagtcccggatgtctgtaaagttgacctgttttccacagtcctggccgtccgcggagttgacctgtttcccacagtcccggacgtctgcaaagttgacctgtttcccacagtcctggccgtccgcggagttgacctgtttcccacagtccgggccgtccgcggagttgacttgtttcccacactcccggccatccgtgaagttgacctgtttcccatagtccgggccgtccgtgaagttgacctgtttcccatagtccgggccgtccgcgaagttgacctgtttcccatagtcctgagcgtccataaagttgacctgtttcccacagaggatggaaaactcttcttgtgctga

SEQ ID NO: 271436 - DNA, 2751 bp, Klebsiella pneumoniae
atggattcaagtcttaaccgtcgaagaacagcgatggtgcttcatgaattagagcagtctttggggaattatatcttaaatactgaagtttcattggatgagtttcctgaggagatgataaaggctattactgctcgggaaaatcaaagaagccaacttagtaatttaaagaaagcttctgatgttatcgaagcaacttatatagatgagttgtttaatataattctagaaattactaaggatacttcggtaaactcatacctgctagatcttagagaattgtttattctctacggcatgtatcatgttcgtaatgtaatttcacatcctaatagaaagtttattgattcattttggtacaaaactgctgctatcgcatcagacccgctaattgatattcttggaatgactagtgtgcggaaatcattaatttctgcagagcgaaatgaattacttgatccgcctgatgaatggttgaataaaactctttgggagattccaaataacttacccgttgtttttgagcatgccataacaggtttagttggtagaaaacaagaagagaaaaaacttcttgagttattaaaaaataaaaggattgcaaacattgctctagtagcaccgggtggaattggaaaaacttcacttgctcttgagttactgtcctcaaaagttaaacaacctgaaactaaacaatatatagactgttgtattttctcaacattaaaaacagaaaagctgacttacgaaggcgttcagaagctcaattcaatagaatcattaatggaattgcgtaagttgattactattgaggccgagaaaatatacgatgtttcattagaatcttttgaagatttaatgaaaaagaaagaggatgaaagaattcttcttttcatagataacttagagacccttataactaattcaacaactgagtttcaagatttttgcaacactttaccagcggcttggcggttgttaattactagtcgtattactataaacaatgcaagcatcattactcttgagcccttgcaggaaagatttgcactaactctttctaaaatttatatgtcaagaaaaaatataagaacacttgatgataatgttcttgctaatttagttaagaattgtcactttaatcctttggctataagacttagtcttgatctttatttctctggtaaagagataccagattcaataaatgtcgcaaataaagaaattgcttctttctcctttagtaatcttattgatgctctgagtgaaaattcgataaacatacttgagtgtttgttcatttctaatgatttaaacagagctaccctttgcgagtttttaactttgtcgatggatgaggttgcagaaagtattgctcagcttagcaatacaagtttagtggtgagaaatgtaactcatgatggtgaaagctactccttaagtgagtccattcgtgaaatacttatcactaatcctagaaatgtaattttaaggtcacagcttcaatctgatttgcaaaaaagaaaaactattgcaaaacaaattgaacatgatcaaataaaaaatagcatccctccttatcactggaactatatacctaataatcttaatgaaggattaaaggtgttgattacatctttaaatcgttctttcaaaggctttacattatctaattcaaaagcaatagagctaatgaagaggtttaaagatgcagaacatgtatattcagagttcagtatttttaatagaagttatggtcgtttgtattctgcactcggggctccaggattagcaaaggataaatttgaactagctataaaacaagatcctgatgatgtgaatgctcaaatttttctcgcaatgcatttgcattctgaacaggattaccctggagctaataaaatttataaacaactcatcgattgtgggtgggtgaatgaggacgaatattcatcagaatttactcagagaatatttaatggatactacctctctttattgtatgatcataaatacccagaaattttagaaaatagcaaagaatggaaaaagcttaagcagtccagaggtttggtaggagtgttcagagcaactgcttataaaagagaagccgagggcattgcgacatctgaacctacccgtgctatagatttgttatcaagatcaatgagtataatggatgatgttattagagaggatggttatataaaaccagcgtgcgatcaaaccaaaaatatatttaacgaaatagcacatgctttaaataataaagaatgtatctctaatgaaaaattcctatcacaatctatagatttcatttcacgtcatttaagtaatgttgtacagtctgtggatataagtagtgatgacgagatttcaaaacttttgaataaactatccactatgccagcgagggataatccattctctaaaataaacactagttacttatttagaaactcatcatcagataagtttgactcagatgaactaagtgagagggggtatattatcgcacctatttcaaatatcccgaagaaaaaggaaagaaactcaccatatatattctgtagcaaagatggtcaggattacttcttgcattttgagcatcttaaaaatggggattggagtgaatggtgctcattaagtattgggcaaaatgttgcttttaaacctgtggatggcgtcagtcgtcagaatggaaaagcaataagtgcaagcgagatcaatttaattaatcaacaaggctag

SEQ ID NO: 271437 - DNA, 876 bp, Klebsiella pneumoniae
atggcgtccattaccagtctggtcgttgcacttttctttaccgtaaagctgtctgcaagaatattcaacccactgaatgacgttgcatacagcctgaaacaaatctctcagggaaaccttagtgccagagcatttaacagcagttctaagttgggagagatgaataggctcgtcaatgactttaatgagatggctgaaaagttacagacgctggatgcgcagcgaaatttatggaatgctgcaattgctcatgaactccggacgccggtgactatcttacgtgggaggcttcagggactggttgacggtgttttcgaaccagaaccgtcgttattcagaaaccttcttaaacaaactgaaggtctgaccaacttaattgaagatctccgcgtcgtgagttcttcaggaggcgcagggtactccttgatgctgagtgaagtcgatctcaaggccacgatttcaaatgcgcttgataccttttggccggactttgataaaaagcatttcaaaattgtcactgagattaaccagcagtattgcgtttgcgatcccttacgcattattcagtgcctcaccgttctttttgacaatgccttaaaatactccacatcacaaacgctgttaataaagaatggtattacaggaaacgataattttattatcgttcaggaccaaggacctggaattcctgaagaactccagaagtccttattccagccttttcagcgaggagaatacgccaaaaatattaatccagagggctgtggtttagggttgtcggtagttaaagccattatgtgcgcccacggtggagacgttagctatagtttaacaccagaaaatggctcacttttcaaactctcatggcctgtttaa

SEQ ID NO: 271438 - DNA, 1116 bp, Klebsiella pneumoniae
atggtcgacattacagtatattcttcattatttattttaatgatttatatgaattcatttttatgtaaaaaaataggagtcgagacaaacacatataaatataaaacattggatggacttagggggatatgtgctgcccttgttgtctttcaccatatattctggagatctggagataaaactgattcttattggtcacttgagcaccttggaaaaatagagaaaaatctagtgctattaattggtcaacttccagtgtcactatttttcatattatctggatttctctttttcttaatagcgtcaaaatctaaaaatgcgcttacttttttttatgggcgttttttacggatctacccacctgtcatattctctcttattattataatattttcctcaatcactgtatttggttacaagcctaattgtataaattttattgtttctcacatccccacgccatttggttttttagaaagtggttcagtatgtgatgtgggtatggggccgctaaactccggggttttatggacacttgtatgggaatggaaactttattttttagttcccgtattaatggtgctgatatctacatcaataaaaaacacacttgggttattaatgctatcattatttgtaatattatcttggctgactggtctggtagatgaatttacagcatcttgtgcatccctattcatagcgggttttataagtgcaaacttttcgcacatggaaataaaaaaagaatggctcgcgccgacattcatctccggcttggttttgtttttaacatctctattaattacacaaaaggtttacaatccaataacctcactgtcattgatcccagtttttatttccatcacaaatggatatagtatcttgggaattttgttgtcaaaaaaaattcaactcatgggagtaaccagctttagcatttatttaaatcatggtgctttccaatttatatccaagcatttcctctttgattatggttattatttatgggaggcggcatctgtaattttaatttcaacactgtcaccattcacatataaatacatagaatcttcattccaaaaaatcaagttaagaaagaaaaccaatatttaa

SEQ ID NO: 271439 - DNA, 615 bp, Klebsiella pneumoniae
atgatcgaaagttatgatctgaaggatcataatatatggaatactactaaaggcgatatagttgaggttcgaaaaacaataagagaattctatttaaaagagcaagggtacaaatgtgcttactgtagaatggaaaaaaaagagtcgcatggttacacttgggatatcgaacacgtcttgccaaaagcatcatatccagaatatttgcttgaaccagaaaatttagcgattgcttgtcgagaatgtaataatcctaaagatgaccacgaaatactatctgatccaaaatttcgtacaaaaatttatcctaatgataaggaatgcttcaagattatccaccctcattttgataagtattctgataatatggaggttgtaatcttaaacggcaagaggatttatcttcctttaaattcaggcaaaggtaaatacacacttatatcatgtgatttattccgtttttcatataagtttgctgaatgggaatcttttgatgatgcagcaataataagttttagtgagttcttggataactgtccagcagatgctactcctgatgaaattaaacgtatgcttggacatataaagtttaacctgaaaaaccttgatttttaa

SEQ ID NO: 271440 - DNA, 894 bp, Klebsiella pneumoniae
atgaaattgagagcgggaatgaaaatcacaaaaaaaaccaaaatccggcatagaaacgagttgaacaaaacactctcgcaattaccactgcaagctaaaagggtggtttatcttgcgctagcacctatcgacagtaaaaatccaatagaaaatgggaggatttttaaagtaaccgctagtgacctttcagaagctgctggaattagccttacgttagcttatcaacagttaaaagaaggggcgaaactgttaaaagatagtagcttgctattaactggaaatgatattgttttattgtcaaaagacttgggtttgccatatacagagaaaaatagaccaaatgaaatcgatttatcaattactgattattgcgcttattttaataattctggatatcttgaaattcgattttctagatctatggaaccgtatatatcgaatcttgtaggtgaaaaaaatagatatactacgaagtttctttcatcggcagttaaattaagcggtatgtattcatcttcattatatcagcttatcagaaagaattatttaatgaaatcttcttatgtaaagttcaaaataagtataaatgatttgaaagatgaacttttagcatatgaagtaggggagaatgaagaggttgtttataagtatccagaattccctatttttaagagagaggttttgaataaggcaataaaagagataactagtaaaacagaagtggttgatatacagatcacaatagtggaaaaagtaggaaaaaaagctagtaagctattgtttgagtgtcaagtaaaagatgaagttttaagtgatgatgtaaagaattctgtttgtggtttggaactagaggatattgcttttcttaagttattagatgagaaaggaatatag

SEQ ID NO: 271441 - DNA, 681 bp, Klebsiella pneumoniae
atgaccaagaaagagggtaaactgtctttgtcagaggtgcaagcccttatgccaacgattgaaacatatgtagaacaaccactaatccccgttgggggtggcattgttctagtaaaggatttgcaccatcgttttgttgcatccaacatggtgttcagccgcttctcaggaattaatccttataaattacagggtctttgtgattttgatatgccttgggctgaaaggagcgatatctataccaatcatgaagacgctattctatccggcgaaacttataacgtccttgaaccgttgccaggagttgttaaggcatttctgcatacatctaaggaaattatttatgatagaaaaggtattcctgctgggacgactgcaacagccattattatgaatggtgccgttgatttctctaatatcacaggaacagcaaagctagtaaaagtatcgccatataagggtgtaaacttgactgcgaacgaggccaaggtgttgttctttgtcctcaaaggaatgaaacgaagtaaaatagctgaggtgatgaatatgtcacttgctaactatgactactatttaaggaatatcaaattaaagtttcataccgactcaatagtaaagctgatagaaacttgcattgagcgcggttatcatgaaaactttccttttcagatagttacatga

SEQ ID NO: 271442 - DNA, 180 bp, Klebsiella pneumoniae
atggaaaatactatttttgatgaaagtattcacgataaaaaaggccactgtttagttatcggtaagccaggttccggcaaaacggtcatgcgggcggttcttgagcaatgcgttaccaaaatagaacttgatgacgtaacagaatttaaattaccaacggataaggggaagggaaagtaa

SEQ ID NO: 271443 - DNA, 711 bp, Klebsiella pneumoniae
atgctttccaccactgcttttctggcggtggccatgcagtgcgccgccaccgttcacccgtccacatcgcttgatgtggcaagggtggaatccggttttaacccctatgccatcgcggaaattgtgccaaagaacgagagggcacccggtgacaaaggttttattactcacctgccaaaaaccagagaggaggctatccgcatcaccagccagatagaggccaaaggtcgccgctattctgccgggctgatgcaaatcaccagtaccaattttcgtcgttacggcgtcactgccagcgatctgtttaatccctgcatcaacctttccgtcttcgaaaaaatcatcaccgactgctatcagcgtggcggcaccctgaaaagggcgctcagttgctactactccggcaattttgacacggggcagaaaaaggaggccgagctttcacaaacgagctacgtgcaacgcattggctacaccccgacgaccgcccgctatgccgttcccggaacccgtgaagacaaagcgtcttcgatggcaaccgtagaggcaatacctgtggcttcaccctcacgcccgcgtgtggtgtggccgggttctgttgtgcgcggcgttccgtcagggctacgccagaaacaggctaccgccgtttattaccccgcgcaggttgtgcgcggaaatcatgacgtctcaaaaaatgaggaagaaaaatga

SEQ ID NO: 271444 - DNA, 306 bp, Klebsiella pneumoniae
atgaattttttcagcaaggtaaaaggaactgtcagccgttttgttgcctttgtatcagcgttatttatgacggcattgacggcaagcccggcatttgcagacggattccagcgtgcgaataccgtcatgcagaaagtatcaaccgggcttcatggtctggccgccatcacgatcaccgtggcggtgatctggattggttataagacgctgtggaaaggtgaaagcctggggcagtgtggctatatcatcattggcggcattctgatcggcgggggcagtgagatcggcgccctgctgatgagctaa

SEQ ID NO: 271445 - DNA, 219 bp, Klebsiella pneumoniae
atgacggcacgagaagaattgcaatacttaatggagcagcacgcgctcaaaatgcgcgatgttgcgaggattgtgtgtcgagagacgcaaaagcccgtcagcatgagggcggtgcgctgctggctggcaccgccggagaaaacatccgcacgcccctgccccgctgaggttgtcgaggcggtcaaaacctatctgcaacaaagaggaagtctgaaatga

SEQ ID NO: 271446 - DNA, 711 bp, Klebsiella pneumoniae
atgaaaacgcacgttaaggcgctgctgttggcatgcgcgataatcagcccgctggcacaggcgggcggcatactggtgtttgacgccacggccaagctggaaaactttcagcagtggcaaaaggaggccaagcagtggctggagacggcgcaacactacaaagaccagatacaggcgtacaaggaacacatgttggccatatccggtgtgcgtgacgtggaggcgttcgttgaccaggccaaaagcctgaaatccgaccttgagaagttccgcaagccggggcaggcactgaatgatctgctgctgtccggcggcgcttccggtcagttcgacgcgctgtacaacaagtacaagattttcgacacctgcaacgcggagcagtcgaaaagctatgctgaggtgtgcaagcaggaggtgatcaacaaggcgatgcagatagagcagaccgatgaaatccagaagcaggtaacagagacgctgggcgacattaacaccctttccaggcgcgtgtctctgtcaaaagacccgaaagaatcgcaagacttggcaaacagtatccagttaaagtcagtgatgctgaacacgctcaccacccaatgggaaatgagcgtgaaggccgccgaaaagcgcgagcaactgttgaaggatgagcggattaaacgctggaaccaacaacaattgaatgcgccgacccctgatttaaatagctaa

SEQ ID NO: 271447 - DNA, 228 bp, Klebsiella pneumoniae
atgcgcttattaactgtaactctattctcactgtcttttttattaattagtgggtgtgaagaagaagcaaaaaccacacaatggtatcgtgcccaccctgatgaattgaataaggtttatgagaagtgtcaggagtctggtagtgcatccaaaaactgtaaaaatgctaacgaagcgcattatcaaattgaacaattgaatgcgccgacccccgatcttaattcataa

SEQ ID NO: 271448 - DNA, 1065 bp, Klebsiella pneumoniae
atgtccggtgggatttttatcggtgttgaaaaacacctgataggaggagtaaccaatgccaccaaaggattgatgatgaattactcacatatgatcatggggctggcggcaacgtcagccaccctgtatatcatgtggcgtggataccagacgttagctggaaagctgaccacgccgatggaagacacgatgtgggatatcatgaggatggctatcatcctctcctttgtggcaaacgtcagcggataccttgatggggtcattgatgccatcaagggtttaaaggagggcttttctgggagtgataacatatgggtgctgctggataccctgtgggataaagctaaatttttaggtaagacacttcacgaccttgataactcggaatttatcaaagatgagggctggactgctgagacttatgtctggctggggacgtttgctttaatggtagtgacggcattcgtgtctatggttgctgaaataatgattttgctactaagtattaccgcccctatatttattttttgcctgatgtatggtttcctccgcccgatgttcaataactggctgcaaaatatctttacagcgatactgaccatactattttctgcactttctctacggatcgtaatcatctatttaaaatcgagaatggatttagcagcatctgtagcaattaaagcaaatatagtggaactgggggcgcaggtttgccttgccgggatatgtgcggctgttctggtgtatttttccgcaaaactggcgggagcgcttgcgggcgcagcagcaacagcatcgatgcaagggctggccgcagtgggtgtaggtgcggcggtgtttggtgccaataagctgcttaatccaagacctacaaaagtaggttcacaaggaggaggaggtgcaccaggtggaacgtcgccgtcaagtccaggagggcagaagccgtatgatgcacgggaggcgcgtaaaaattccatcaggcaaatggaacagcgtaatgccatgcgcaaaggctcgccgccgattgtcgttaacccccgcgacaaaccgcctaaaccctga

SEQ ID NO: 271449 - DNA, 138 bp, Klebsiella pneumoniae
atgaaacgcttgattgcgttggctttgctgtgtgcgctttccggctgcgcacagcctcactttccgccggaagtcggcggcaaagcgaaaccagtcaacacccctcaaattatggcggagctgaacagtcatgaatga

SEQ ID NO: 271450 - DNA, 690 bp, Klebsiella pneumoniae
atgaatgaaaaggaaaagaaattaatcgcagagtcaaaaaactttgagcaacgcatgatcgaccgcgataaaaacgccacgcgagcggggtttgcggtcggcggtgtgggattgctcattgccgttctgtcgctggtcgccgtggtggtaatgctgccgctcaaacagacggacgttgagctgtataccgtggataaccacaccggacgggtagagcacgttacccgagtatccaagaccagcctgaccgcaaatgaagcgtatcaaaaggcgatgaccgccaactacgtgaatctgcgcgagcgctacgtttatcccgctttgcaggatgattatcagacggtgcaacgctataacgccccccaggtcaacgacgattacctggcgttgtacgccgggaaaaacgcacctgataaggtgtacaacaacggcgcaaacacggtgaaaatcgacattatttccaacgtgatcaccgatggtaccgacccggataaagtcgctaccgtccgctataaaaaaatcatccgccgcctcgcggataacagtattcgcaccgaatactgggatgcgcattttacgtttaactctgacccgaccagggagatgagcgacgaagaacgcgaatccaatccctttggcttcaccgttacgagctggcaggcagaccgtgaaatccggggaggcgaatga

SEQ ID NO: 271451 - DNA, 888 bp, Klebsiella pneumoniae
atgaaaaaaatcacgctaaccgcgctggcactgatgatgtgcggcgcggcatggggagccgcaaacccgcaagccagccgctatgacagccgggtgcagcaggtcatatacaacccgcaaaacgtgacggtggtcaacaccaaagccggattcatgacgacgctggtttttgatgatgatgaagccgttatcagcgcaaaaccgggcttcgaagaagcctgggaagccaagccggacgctaaccgggtttacatccgtccggttgcgctcacgcagggcgcaccgggtgaggacggcaacacggcgcaggtggtcattccccccaacgggcgggactggcataccaacctgtttgtagtcaccagtaagcgcgtctacaacgtggagctgaacgttatcgacgacaaatccgcgcagcaaccggctttccaggtgtcctaccgctatccgggcgaagcgcgggacaaggcgagccgtgaatcggctgcacgtcagcgggaatggacgcagaagcaggaacaggccagggtacaaaaaagcctggtcgcggcgcaggtgccgcgtaactgggactactggatgcggggaaatgccagcagtattgccccggattttgcctatgacgatggtcgctttacgttcctgggcttttcgccgcaaaaagacattccttccgtgttccgctacctcgacggcaaagagcaggtggtaaacagcagcgtccagaagaaaggcaactttactgtgctggtcattcaggaaacagctacccatcttgttctgcgttcaggatatgcggtgatcgggctggaaaatcgcggctttggcaaagtccaggcagccgatggttccacagtttccccgcaggtcgagagagtcgaaaagtaa

SEQ ID NO: 271452 - DNA, 1272 bp, Klebsiella pneumoniae
atgagtgaagaaaataaacagcctctgccggaggacgtaccccagacgccgcccgcttccccggcacagccggaggaaagcattgccgccctggaacgtgaagcccgcgcaaaacgcgaggccgagttgaacaaacagcaggaagacaaagaggcaaacccagtacaacccgccgtcaataagctgaagaagcgcaaacgcggtaaggctaccgcgtttctggcgattgtggccgtggcgctgatttttgccgcatggggcggtaactgggtttaccgcaatcttatctggcagcccaaggaggagaaaaaagcagcggacagcgggcagaccaataaaaccgattatcgccagcgcacggatttggggcaggacaatgataccgggcaagccgccccgcaggagggaggcagtacagccagcggcacaacgggcgggcagatcgctccgcccgctcccgcagaactcgacaaagcacagtttctggtacgccgggaaggttccgcttcatcagaaagccaggtgaaaacccggcgggaagaaatgacgatgaaagcgtcacaaaccgccgcgcaaacggacgacagcagcccgtcagcagcggcggataaggcaggtgccccggcgctgaaacaggccgaacccgtcagacgtatcccgtataacccggatttgtacgtaccggaaaatacggcgatcccctgctcgctggattaccggttcgtgtctgatcgggcgggtaaaatccgctgcaccatcaccaaagatatctggagcgccagcggtaacaccaagctcattgaaaagggcacgggcgctacaggattgtatgcaacaggtacggaagacggcatgaagcacgggcagggacgcgcgtttattatcatcacgaaactgcgtacccgtcaggctcctttcctcgatattccgctgattgataccaatgctgccggggaactgggtgaggcgggcgttgacggctggattgatagccactttggggagcgcttcggcaactcgttaatggttggcatgatccccgatattggtgcctgggcatccaacagcgccgggaaaaaagaccgcaacaccgattacaccgaaaacagccgtcaggcgatggcggaaatggcgaaaaccacgctggagaacagcatcaacattccgccaacgctctacaaaaaccagggcgaaatcatcaacctgatcaccgggcaggatattgatttttccaatatctacacgctgaaaatgaaaggaaatccacaatga

SEQ ID NO: 271453 - DNA, 192 bp, Klebsiella pneumoniae
atgaccagagaagaacagtttgattatttacagataatccagactggccatgagggggcaatcgccgggaacccgaatgaggccaacgccctgaatatctggcagcgtctaacggaaagcaaaaccgcattggccgttttgtcgcaatgcaccaccaaaatcacgctgaaaggagcaagcaatggccgttaa

SEQ ID NO: 271454 - DNA, 1026 bp, Klebsiella pneumoniae
atggccgttaagaatatttctctcgaccgctacaaacagcgcttctttggtgattttctggaactccccggcctgacggaaatcgccgtcaaccgtccaggggaactatggacgaagattgacggtgtgtgggagcagcacgccgtcacgctgacctatgaggactgctacgacttcgcccgctgtctggcaaagcaccagggcgacaacgtggaagacattaagccggggctgtcggccacactggaatccggcgaacgttgccaggtggttgttcccccggctagtgagcgaaatacggtatcgatcaccatccgcaagccgtcaacggtacaaatcccgcatcaggcgtatatcgacgcgggtttttataaccgcgtgacgggagcggagaaggtctggacgcacgatgatgaattaattgaattgtacaatacaaaaaatattccgcgcttcatggaaaagtgcgtcgagtacggcaagacgatcgccgttgctggcgaaaccagcaccgggaaaaccacctatatgaagacgttgataggctacattcccgtctatctgcgcatcgtcaccatcgaagacaacccggagatcaccttcttcatccacaagaactacgtgcacctgttctacccgtctgaatctgccgatgaaaaaggggctatcgtcaccccggccagtctgttgcgctggaattaccgtatgaaccctgaccgtatcctgctgacggaagtccggggcggagaagcctgggacttcatcaaaatcacgggttccggccatgaaggaagcatgacctccattcatgccggttccgcaatggaagcggtggacggttttatcactcgctgcaaggaaaatccgcagtgtaccgggctgccatacagctttttgctccgcaaaattctggacagcctggatgtgatcgtgagtatcgatctcgatggcaacgtgcgccggatgaacgacatttatttccgcccgctgcaccgcaaccagtattttgaggagatgaaagcatga

SEQ ID NO: 271455 - DNA, 405 bp, Klebsiella pneumoniae
atgagaaatttgtcagctatcgcgcctgttgtgcttgtactcctgctggccgggtgttcatcacctccgccaccgccccccgtcgaatgggataaacccgctgcaccgatgaacggaacgttgccgcagtggagcgataataacgtcactgtcaccgccccggcggtaacaggacgatggtcaacggtactctacgctttcaatggcagtgaaacggtctacaccccggaggtgtattacgccgtcgcacactctccgcgcattgtggtagcaacaccaggcggcgcgtcattcttcacggctaaaaactggctgcgaaaacacggtgcgaaaggggttattcagtaccagcccaaaatccattgcctgacgtgtaatgaaacagacgtgtatttagcgcgttaa

SEQ ID NO: 271456 - DNA, 318 bp, Klebsiella pneumoniae
atgctggtttacccatgcaggaaaaatagcgctacgaacgaaactgacgctctgcaaatcaccatgacgcatgacaagatggttgaaataaacctgcttctcaccgaagccggggtagccagaaaacctaaaatcacattaccgggtgaaaatgtcatgctggttgttctggatgcaagtaaattcctttatatcgccgctcgcctggtactgacgctggatgatgaattattaaaaggctggtttgcagaattacaggacaaaggcattaaaaaagtcatagtgagaacgaacgatacccgaacaaagccagagtaa

SEQ ID NO: 271457 - DNA, 306 bp, Klebsiella pneumoniae
atgaaaagaaccgcaatcgcggcaggcatcatctgcctggccgctggattctccgccccggtatttgcagccgacccgtgcgaagttgttttgtgtatgtacggaaaagccacgggtaacagcggcggcagtgaatgcagcagcgcggagaaagcgttttttaaaatcaatgcatttaaaaaacatcaccgatttaatccggggaaaacattcgatatgcgcaaagaatttttaggcgaatgcaaagcggcagacccggaagcaatcagcaaaattatgtctaagttcggacgcataaggggatga

SEQ ID NO: 271458 - DNA, 558 bp, Klebsiella pneumoniae
atgttacctattattttgttccctgtcatcgcgtgggctgtcattgttattattctgcgcaatgataaaagtagcgctatcatccctgtcagggtagaaagagggaatagcatcacgcaaacatcaatatcccataaagacctgtcacatattcattaccgtgcactgacgtccagacctttttatagatttgtcgccactctgatttatcaatggttgcgtagcctgacaaacgtcatttatctgttgccacgggcaattgtgtatatagcttttatctactgtatctatgacccttccgttataacccggattaatctttccaccgtgcaattggtgtttgagacgttatcgaagaatatagagtcagttataagtctgattctggctatctcggtacttgagctggtttatcgtgaagggttttattgtctttcttccagttcaataaatgaaattggcgagtatagaacccaccttatccgacagcatttgaatttcccggaagacgcaaaaatcgtcattcaacgcagcaaaaggaaaaaatcggaggggtaa

SEQ ID NO: 271459 - DNA, 303 bp, Klebsiella pneumoniae
atggctgatgatattttcatccagaatattaaatcgaaaaataaagacagaatatcggcggcggtcatatacgatttgatagaaaaagaagcacatcgcggttgcgggcttcattatgaaatctatgaaagtagattgatcggcggtttgcttgaacatatcgcgcttctgaatgaaaaagacgccgccacgttaagggaatatgccgaacgaaagggaaccagaattgacgatgatacctatcgtgacgcactggaagctgaaaggcaatgctggacagaaatataccgcgatcagatttaa

SEQ ID NO: 271460 - DNA, 1746 bp, Klebsiella pneumoniae
atgagtcctcaccttatgcaaagactgaatggctttgctgacgccttttcattttttcttttatggttacaaaacagcccggtgatattgtcgttacttgccgggctaacactgccgtttatctttcaccttccacgagaagaaagagaaaatgcgccgttctggttaaaaagcgtggcatgtatatctatcttcttttttatttttggcacgctatcgccgttaaccatacaggggttgagttacttttttgattcgctcaacaatcattctttagtaagtattcctttgtggattttaactttactgtttactgccgccgggttgatattccatttaatagcgcgaagactacttgccggagaaattgatagtttgaaacacaggcttatcaaaaaaagtaaactggaaagaaacacccgaaccgatgtaagagacgtaaaggaaatgctgccggatagtgtgtcatatgatccgcttgaatacatcgacctgaaaaaaggcatttttattggactcgataaagatgatcagccgcaatacatcaccataaaagaatttcagtcacaacatgcggctattatcggaaccacaggttcaggcaaaggggtaagtgcaactgttttactataccaggctatcatgctggacgaggctgtttttgtcgaagacccaaaaaatgacgaatgggcaccgcatgtattaagagaagcctgccggatggcggggaagaaatttgttcttattgatttaaacaaccttaatttccagcttgatttattggctgacatatcacatgagcaattagaggaactgtttaacgcagggtttagcctggcgaaaaaaggggaaggttcggatttttatcgcatcgctgatcgccgggctgcaagaaatacagcagcgactcaccaacccggaatgacattacgcgatttatttaatactgactttgtaaagtcattgcaagaaaacgtcccggcattttatggtgaactggaagaaatagcgttagtcaattctattaatgccaatgacggtttttctctgaaacaaatatttgacgagggaggatgctgctatatcgttggctctatgcgtaaccaaaaaatcatatctgcacaacgaatgattttaacccgtttgattcagatagcagaaacccgcgacagaataaacagtaaaccccggacagtcgctatattccttgatgaattgaaataccacctttcccgccctgcactggaaggactcggcgcagccagggataaaggcgtgcatatatttatggcattccaggcaatcgatgatttacgcgattgcccatcagatttaaatgcggagtccgttattggcgcagtcgttgagaacgctaaatttaaactggtatatcaactacagaatccagagactgccgagtgggtggcaagaatgacgggttcaattcttgtagatgatgaaatgagaaaagtaaaaacggatatcgcattaacggagaaaatggaaacagacaggatgatccgccaggcggaaaggtattatatagactgtaatatgctgttaaacctgccgccttttgtaggttttgttttcacgcctaccgaccttgccaaggcaacaaaactttcccatattgccgttaaaaagtcgcagatcaatacgctttcatttaaatgtaatggccgcgacacatctgaatccacggatgaaatagccgaagaaaacaaaccgactgttaatttatga

SEQ ID NO: 271461 - DNA, 753 bp, Klebsiella pneumoniae
atgcttattcacgatgtagcaaagaggaaggaagcagcggcaaacaggatgctattactgctgaattttctcaaagaggaaacttactctgatttccgaacgttaaaaagggtcgtcggttataaaggcaaacatgttcatgctatgtataacctactcaataaagctattttcatggggttcataatcaagcatgaataccctgtattgaccgggaaaaaatcgctgtggggaattaccatgcaagggctggcgatggtggttatgcctgacgatgaggttttccctggctactttgaacccggtaaactcaaatactggtcactggagcaccgcctgttaaatcagcgggtacggctcacccttgaggaaaaaggtgccagtcattggataaacggcgaccggggcgaatttatggcgcgttatcctggcataaaacacaggccggatgggattatcactatggacaacggcgcaatcatcgcggttgaaacagaacgctctatgaagacccgcgcccgctatatcaacatcatcaacagccatctttcggccagcgatgccggacactggcactatgccatgtacgttatgccggatgaacaaagcaagatgtctcttatcaagctgtttgacggaataaaaacagtgatcaggaaaaatgtccccgttccgttcgatgccaaaaatcgggaaatgtttcttttcagaaccatagatgaacttgaacagaactcatcacataccgattaa

SEQ ID NO: 271462 - DNA, 474 bp, Klebsiella pneumoniae
atgttgcgtaatttccgtttgatggttgtctttcccctgctgcttccttccctctgcctggctgatttttccgggcgtgtggttcgcgtcgtggatggggatactgtccaggtactggcagatggcaaaatgcagaaagttcgtcttaacggcattgatgccccggagtcggggcaaccgttcggccagcgctcaaagcagaacctgcttaaactggccgcacagaaacaaacggaagttatcgccagtagcacagatcgctatggtcgctggctgggaacgctgatgattaacggtatcaatgtcaatgctgaacaggttaaagcgggcatggcctgggcttaccgctatcgtggtcatgctaccgatagcaatatgctcaggctcgaaaccatcgcaaagaaaaataaggtggggctatggtcagcccctaatcctgttgaaccgtggaaatggagggaaaagcagagatag

SEQ ID NO: 271463 - DNA, 267 bp, Klebsiella pneumoniae
gtgaagaaaaaacctgatttgaccaattttaaagacccaacaagttttctggaaggcggggcggcggatctcgctgaaaaagggagagcaccacaaaggcaggacaaagttgataagccggtttcgcagcaaaaaatattcaggctgtccgtcgaagttgtgaacgaattaaagttgcatgtcgccaggcagcaagcggaaaccggggtcaggacaacggaaacggagatagtagaaaaattacttcgggattacttaaagatataa

SEQ ID NO: 271464 - DNA, 630 bp, Klebsiella pneumoniae
atgatttatgctgtagtgaataccaagggcggtgtaggaaaaaccacgacggccgttcatctggctacaatgttatcccgcacaggaacggcattgcttatcgatggtgatccacaggccagcgctgccagttgggcagcctggcgtcgtgacaatccggcttacaatccaagtccgacaactacctgcctgacgggtaaagcaatttttaatgagggaaaggcactatccggcggattcgacaacgttgttgtcgatgtgggggggagagatgctaccgggctgcgttcagcacttttgttagcccacagagccattattcctgttggtgcatccaaccttgacgcagccgcaatgaccgacctgttagaggtcgtggagcttgcgcgtgactacaatcctgagctggacgtcaaagtgcttttaacccgtgtagattcgcggacaaaagacgctgccgacatgctggaatttctcaccgagcaaaaccttcctgttctgaacagtcaggtttgtgagcgggttgcgtaccgacgagcgataggggagggggctactgtgttggagttcggcaaagacaatgccgcgattgctgaaattgagagtgttttccgggaggttacagcgtga

SEQ ID NO: 271465 - DNA, 783 bp, Klebsiella pneumoniae
atggatacgatcaaacccgcaatcaaagcctacagcgagcttcaacaagcgtatgactggtttaatgtcgtcctgtttgaaaaggcgttgccggatctcctgatcacgttacaacgtggaagaaataccttcggttattttgcccctgaacggtttacaggcgaatcaagtatttcagagctggcgatgaaccctgattacttcggtggccgttctctggctgacatgctgtcaacattggttcatgagatggtgcatgtgtggcaacactatacccccgtcaaaaagtgccggggcggatatcacgatcgggtctggggggcaaaaatggaggacgtgggtctgatgccgtcaaatactggccgaccgggtggaaaaaagacagggcagcaaatgacgcattacatcattcgcggtggcaggtttcagaaagccgtgtatgacctgctaaaaaacggcttttccatttcctggtatgaccgctggacaacgggaacaagcgtcacctcgaagaccaacagcgatattctggaggattggcttgcggctacagacaaaaatgacactgacctgattaatcggttaacgctgacaataagtaagtctcgtcccggacaaacttctgacgaagacgatgctgttaacgggattaaacccccggtgaaaggcaccggaacccgcacaaaatttagctgcccggagtgcgggctgaatgcctgggcgaaaccctccgccgttctcatttgtggtgaatgccagtgccagctagatccgcaggagtaa

SEQ ID NO: 271466 - DNA, 750 bp, Klebsiella pneumoniae; identical to SEQ ID NO: 158237

SEQ ID NO: 271467 - DNA, 225 bp, Klebsiella pneumoniae
atgatttggcgctgggagtccgcaacccgttggtatgaggccgagctaataagtgacctgtttggtgactggctggttgttcgtcgatggggaggactttatagcgaacgttacggcacaaaaacggatgttgtgcctgatttgttttctggcgtagcgctgctgtttgaaattgaccaggaacggcagcgccgtaatcctccttacaccctgcgcaacaaatag

SEQ ID NO: 271468 - DNA, 243 bp, Klebsiella pneumoniae
atggtctcccggcttcacgctggtcacgccttcaccgacctccacgacgacaccggctccttcgtggccgagaaccaccgggaaaacgccctcaggatcgttcccggagagggtaaaggcatcggtgtggcagacaccggtgtgggtatttttaatcagcacctcgccctttttaggtggtgcaacatcaatttcaacaatctccaggggcttccctggtgcaaatgcaacggcagcacgtga

SEQ ID NO: 271469 - DNA, 276 bp, Klebsiella pneumoniae; identical to SEQ ID NO: 238374

SEQ ID NO: 271470 - DNA, 807 bp, Klebsiella pneumoniae
atgaatattcacgaaaagttaaagcgttggatgtgtattactcaagaagatagtgctattcttgattatcttaatgctgagttaaaaaaagctcaatccttgagattgaataatgaatcaaacagattgtttttatacaaaacaattttactagcccatttaaaatatattcaagtcattaatttacttacaagaggtgatttttatgaagcatgggtagaacttgaaaggatagaaatagatttaatacatattaaagaaaataaagagtttctgcctgaggttgatttctatggtgttaacttcttagcgagaatggtatgtaattggcaggcgttattcccatataaaatcttcggtagttctcgtgaaataataaaagaagtgaaatgttcagtatgtaatacaacccgtagttttattaatgattgtggtcatgttaaaaataaactttataatggagttctttgctttgatgaagtgatcgattttgaattaattacttatgacatagttagtaatcccgttaacaaatgtagtgtttttttctccaatgatggtgatcattataactattcaactttaattagtgttgtcaaatacatacaatccccacatcaaattttcaatattacgacctggagatttaaggcgaaagaacatgatggagtattatcgccagaaaatatttgtccatgtggggattctttaaaaaaatatgcagattgttgtttgccacgtaatggtatttataaaaaacatatagatatttggtttcccttcccgttgaatgtagaacctatttag

SEQ ID NO: 271471 - DNA, 1242 bp, Klebsiella pneumoniae
atgctacagctgatgcctacaattgcgattatcgggagtggtcctgcaggctgctacagtgctcagttcctgaaaaaagggctcccgggcgccgaaataacagtgtttgaggcactaccagtgccttacggacttctccggtatggtgtggccccggatcatcagggaaccaaaaacatctcctcacaatttgaacgcatgttcaccaccagtaatgttcggtttgtaggaaatgtagaaataggaaaagacattcctttaaccgagctgatcgatgcatttgacgtggttgttgtggctactgggttatatgtcgatagaaaactcggaattcccggtgatagtctgagctacgtctgcggtgcaggggaaattctccggtcgctgaacggatacccacagtcagacagcaatagtatgggacaccggtcacaagccctgggggaacggattgccgtgatcggtaatggcaatgtggcaatggatgtggtccggttgattgcgaaaagcgaagaagaactggcgggttcagacatcaacgatattgccagaaaaaacctctgcacagataaagtcagatgcattgatgtcataggtcgctctcctatcgagcaggcaaagtttgatctggcgatgctacgcgaaatatgccaactgaaaaatgcaaccattcgctggccggacaaacatgacggttcccatggacttgcagcagatctgttatcaagcaccgatgaggcatcagtgggtaagaaaggctctttagagattaattttcgctttaattccaaccccttgctaatcaccgctcgtaacatgtccgcggtactgactcttaacaacaaaagtgttggcagtattcaggactatcactacgacacaattattactgctgtgggcttttgccataaccctgaggggagttttgcctccgttgccggagtttattctgttggctgggctcgccgcggacctactggtactgtcgccgctaacagaagagaggccgcggaagtcagcgcgacgatactgaaagacctggaatgcggtcgtattgctactggtaaagccggtctgaaaacagtcgaagacaaaattacacataaagctgtgacatttgaacagtggcaatgccttgaccgatacgaaattaattctgctccctccgggcgatgcaggaaaaaagcaatctccatcgcagaaatgctttccgtgatggaaacaggaacgtcattaccgtaa

SEQ ID NO: 271472 - DNA, 522 bp, Klebsiella pneumoniae
atgacctggaccaccttttgttacaccaacaggtttgcggagtgcaatgtaaagcaacgttttaaaatgctgaggtttaagatgttaaagattatttttggtacagaaagtggcaacgctgagatggcggcagaggatatggctgccgtattaacagaagcaggtatcgaagcaaaggctgttgcgatggatgactatgatgttaatggactgactgatgaagaacatgtgatcctcatgacttctacatatggtgagggtgaactgccgatgacaaccctaccattttacgaaagtctaaaaacactttcccccaaccttagcggtatcaaattctcggcctttggattgggtgacagtacctatgaaacctacaatcaggccattaaaacactcatagcattgatgacagaactgggtgcctgccaggttggtgaaacaggcctccatgatgctgcgctgccttataccgtcagtgatatggccgtttgctgggccagccgccagtttattattgcctga

SEQ ID NO: 271473 - DNA, 1188 bp, Klebsiella pneumoniae
atgttttcacatccggaaaagcaagacagatatttcccgtgggctgaccgcctgttccgtattaatccgtatccatggtatgacaaggctcgtgcggaacatcccgtttaccgtatggagaatggagagatcgtactgacccgttatcacgatgtaatgaaatggctgaaagcaccactaggcgccacccatttcgggaatgggccatggaataactttgataacacagtactgaacatcgatccgcctgaacacaccacactgcgtcgatattccaataaatggtttactcctaaactggttaaccaatatatcacaaccgcaaaagagctggctgagaatgcactggatcgttatagcgacggcagcgtgatggatgcattttatgaacttgcggttgttcctccgcatgccaccatgtgccgtgctctgggtgtacctgatgatgatgcaggtttgatatatcggcattttttaacctgtactgatgcacttggccatggagttgggagagatgatactgaaaaagcaactcagtctttcgattatctatttgaacggtgtaagaaatatatagaggaaaagcgccacaatcccggagtgggtcctcatggacttgttgatgattttcttaagcttgcagatgaaggaaagatgagcgagcgtactgttctggaaacactggtgctcttttatggttctggctctcctaatccggctaccgtcattgcgtcaggacttaaccacttcgcgagagaaccggaaaccttcgagttatacaggacacaaacgggggaacgtgatgcgattattaatgaactgttacgcctctatccggcagagatttctatgatccgttatgccacagaggatactgaaattggcggtattcccgtcagtaaaggtaccccggtgcgctcagtcattgcggccgcgaaccgcgaccccgatttctttgataatccacacgaatttaatcataagcgaccaccggagaccagcatgaacctgacctttggcgtaggccaccacgcatgtgctggtcagttgattagccgagcagctattagagccgttttcgatgctgtggctaaaaaagcaacacgtatcctcagcgcaggtgaggcggggctggctcatacggatcgtgtacgtggttatctctctctaccgttacgtatttactga

SEQ ID NO: 271474 - DNA, 1050 bp, Klebsiella pneumoniae
atgattagtgcctacgctattggcgctataattggggccccgttgcttactttgttgggtgccagtatgactagacgtaagctgttgttagtaactttgatgctggtaatcatgggtaacctggcgacagttttttcaaccggttttaacgaactttttgtagcgcgcttactgagtggtattcctcacggaacttacttcggtgtagcaggatttgtcgttgcgtctgcagttccactacaggaacgtgcaagagctattagccggtttatgcttggggtcaccctgtccattgttgttggcacgccgctggccaccttcatcgggcaactctttggatggtactgggcattcgtacaggtctgtctgcttgcgtttatcacactggtgatgatcgtttatcttttaccagtaaatcctcatgaaaagcgcagcgctccccgaactgaacttaatgccatggtgaacatccaggtctggctgacactgggtatagcggcgataggttttgctggtatgttctgcatatatagctatctggccccggcactagttaacatcactcatctaccccctcacggaataccgccaatgctcgtgttgtttggcgtcggaactgttataggaaacgttattggtggccgcttgtgtactcgcttccggtttgattcggtgggaataattctggcattaagcgctattttcatgcttgtctatccattagccatgcataacattctatctgctgctgcaggcgtgtttctggttggttgcctgatggctctggcccccgcgctccaggtaaggctgcttgaagtagccagtaacgccccctctcttgccgccgcatccaatcacgcagcctttaatattgccaatgcgattggtccctggttaggtggcatggcagtcgctgctggctacggctggacatctacaggttatattggtgcggtaatggcctttggcgggttagggatatggtttatagcaaaacgtcttgagagatgtaaatcatcatcgtctgaagagagtactgatactttgtaa

SEQ ID NO: 271475 - DNA, 645 bp, Klebsiella pneumoniae
atgtctaacctcacaacgaccaaaatgatgctacaccgattagactcatatctgacttcatttgaatgggaaagccttactaaaagcaaacgttccattcttcaggcttttctcaaactcgctacaaaagaggggtatgactctgtttcaatgcgaggcttagctaacgccgttaaccttaagccacccacgatgtattcacatttcccagatggaaaagatcaaatcgtctcttcagcgcttcgctggcactaccatacatttgcaactgccgtgaaggaagggctgggcccgtgcaggagacctgaagaatactggtcggcactgatccgcgtgcatataactcaacagattaaacatcctgaaaatgatcttttcgatatgctgatggcaaccgatcgccttgggagtgtactgccaaatgcactccgtactgaaatggtcgagtggatggcattttgtgattttatgtatgaatcaatcgcaacagacctcggcgccgatgatgcaaaaagaaagtctcggcttatccgggtatcactcgacggtgcaaacagttggtggtcctggaatggtactgaggaagatctcgaagagtgtattggctatgcacagaaagtggcaacaggaattctaaaactctga

SEQ ID NO: 271476 - DNA, 1461 bp, Klebsiella pneumoniae
atgagcctgcaaactaaagaatttatcgatctaccggcacctgtcgggaagcataagcttaccggacaaatgggggcaatcagtctggcacttacggtactggcattttctgccccactcacaacggtttctggctatattccagttgcaatgatgtttgggggcgtatccgccccgctcatgttccttatgacaacagctatcattcttctatttgctgcaggttatatttcagttattgcaatggctaaacgtccgggtgatttttattcttttatcagcttcagtttaggtaaatctgtagggcttggagcaggacttatggcttccgtatcttattttctcattctggcaggtgttgcatcattctttggtgtttctgccgctgagttaatgaaatcgatcgctggcatacaacttccctggtacttttatgcgctcatctgctgggctgttgttgcactatttggctatctgcatgtagaactatccgcaaaggtattgtcatgggtgatgctggctgaggtgataatctgcctgggattttctggcagtgttattggtagtggtcacattgcgatccccgtgttctctccattcgccgcatctggtttgaccgctgatggtgtaaatgccccctttgcaatcctgtttgctgtttccttttttattggctttgaagcgacatccttgtttcgtgatgaagttcgttctccggaaaagacaataccccgtgctacttatggcgctattatttttattggtgtcatttacaccatttgtgcctacgcattgattgccgcctatggtcctgatgtccagacgatcgcgcaaaatgcaccggctacgatgttttccgatgctctctcaaagtttatcagccccagaatcagtctgcttgttacgcttttggttctgacttcatcacttgcaagtgtattgtcagtacataacgtgttgtcacgatatttgtataatctgggaactgatggtgctttacctcgagctctgcgcaaagtacacccgcatcattcctctccgtttgtcgcttcactcagtgtttctggtttaactctgctggtgatgttgccatttatcctcacgggagttcagccggatgttctctacggccagctatctggtgtgggtacggcgggtattatcatgttgatgacggtggtatgtattgcttcactgtcctggtactttcgctatgggcgtccctctaacctcagcgtgtttaagctttttgttgccccgcttatttccggtatcttcttcgttggattaaccgtgttagtaactaaaaactttgaccttcttgttggtggaaagccgggtgagcgccagtggatgctgttttgcctgttaggagcgatgttcattggcatggctctggcgctttactataaggccagacgccctgatgtttttgcgcgactgggacgttcacaatattaa

SEQ ID NO: 271477 - DNA, 1272 bp, Klebsiella pneumoniae
atgtttggagccttcgctgatggaattagcaatgattcattatatatccaaagagcagttgattactatgacggtctctactccactaacgaccgtgctccaagaggagagatttactttcccgctggtatctattgtattggagacacaatcactgtccgaaatgggcccataagttggcgtggggatggaatatggaatacgatctttgttccacttcaaaatgatagccgctatgacaatacatttttgtttaagttcgaaaatgaaaagtggagcagcaatcagtcaagatatttacatgaaataatgctatgtaaatttagtgttaaaggaaattatataaataggtcagctttttatttggggggatgtggttgggattgtattattgatgctgtgcacatatggggagttggtcaagccgcgtttgtttgttatgatttgatggatacaacttttagagatgtcaggattaatttgtgtggaatgctcgtcgatgcaagtaaagcggcggaaaattacactcatcctataatgttactaagtaggtatgattgttgcaatgccataagatttgatgcatgccattttgaaggaaatttcactggtgtgttatatattaatggaagagctaataatatatcttttgttaatatgtgtaagtttgaagagaatggtattggttcaaaatttggcttttcttatccagttatttttattgatagttcgctagcagaatctattcgttttaatgacatgtttgtgtctcatacatctaaaataaaaaattactttgttaaaagtaattcgaaacatcttattctcaatggtggttcttatattagcccctcagatgaatatgggtttaccggggcgaagtggtttcatattcaccgcaaagattggaatgataatactcgttgtataggagcaattatcaatatagatttgatatatgtaaattataaagataatgaggtgccattcaagttcgaaaaccaggtaatagttaatatcaatgcgttaagagtagctaaacctcgaaacttagctgttatatcgtattcttgtcagatttatataaagaacattacattccttgatgctgctgaacttagcaatgacacatcgttattcgagataggtaataaagcagataaagtggttttaaaagttgattcttttgaagggaatgctaaatatttgcggtgggtaaatgattcttccccaagaaaattaaatgcttcggagtttagttttccagaataa

SEQ ID NO: 271478 - DNA, 852 bp, Klebsiella pneumoniae
atgagacagaggctgatggaactcatcgagcagcatgccagcgctggcggctggcaaaacgtataccgccataattcacaaacacttaattgtgagatgaatttcggtgtttatcttccccccaaagcagcaacagaaaaactgccggtgctgtactggctctcgggtctgacctgtacggagcagaatttcatcaccaaatcgggtatgcagcattatgccgccaggaacaacatcatcgtcgttgttcctgataccagtccccgtggagagcatgtcgcagatgctgacagctacgatctgggccagggtgccggattttatctgaacgcgacggaacatccgtggaacatccattacaggatgtatgactatattctccatgagcttccggatgttgtcatggagcatttacctgtaacatcaaggaaatcaatatccggtcactccatgggggggctgggagcgctggttctgtcgctgcgaaatcctgatgaatatgtgagtgtatcggcattttcaccaatagtgtcaccttctcaggtgccatggggacaacaggcattcaccgcgtacctgggtgaaaataaaaaaacgtgggagcactacgatcccgtcagtctcattttacagggtgcgaaattaccagaaatttttgttgaccagggattaagtgacgccttttatgaagatcagttacgcactaaaagtcttgaaagagtgtgcaacgagatgaacatcaacacatcattccgatatcatactggttacgaccacagctattatttcatttccagctttattggtgagcatattgcttaccatgccaacaggctcaggctgtcagcatga

SEQ ID NO: 271479 - DNA, 150 bp, Klebsiella pneumoniae
atgctgcagccgggccagacattccggggcgaggccggtcagtttcgccaccagcgacaggtcgagtccgttagcaagcatcgcccgggcgatacgctccgcggtctgctgctcaccttgctcgataccttgttcgataccttgctgtag

SEQ ID NO: 271480 - DNA, 579 bp, Klebsiella pneumoniae
atgatttcaggtgcaagtcctaatgcgggaaaaacatttgttagtacaaacttggctgcagttattgcacaaacgggtaaaaaagttctcctcgttgatacggatatgaggaaaggttatacccataagttatttagtgtttcaaatgaaaatggcttgtctgatttcttatctggaaaagtagaactgtctaaaacagtaaagaatatttcgcaggtagattttgattttatttcacgaggcatttctccaccgaaccctgcagaactacttatgcaccgtagatttggagaactaataacctgggcgagtcagaattatgatatcgttattctcgatactcctccgatcctggcagtaactgatgctgcgattattggccactatactggaacaacgcttttaatagctcggtttgaacagaatacggctaaagaactagaggtgagtgtcaaaaggttcgagcaaagtggagtaattgttaaaggttgtattctcaatggggttgtgaaaaaagcgagcagttattacggctatggttatagccactatggttattcatataccgacgataaataa

SEQ ID NO: 271481 - DNA, 249 bp, Klebsiella pneumoniae
atgaataatttcgacctgcataccccaacccgcattctgtttggcaaaggcgcgattgaaaagctgcgtgaacagatcccggcggaagcccgcgtactgatcacctacggcggcggcagcgtcaaaaaaacaggcgtcctggatcaggtcctcaccgctctgaatggcctggatgtccttgaatttggcggcatcgagccgaacccgtcttacgaaaccctgatgaatgcggtgaaactcgcccggtaa

SEQ ID NO: 271482 - DNA, 1401 bp, Klebsiella pneumoniae
atggcaagtgattataataatgttagtgatttaactgatgagtttaaaactgtaagcagttttaggcaagatataaaaaaaccagtgtttcatgcgtttttatctcttccaaaagatgaaaaattaacagatgaaaaatggcaggagatagcaaaagactatttgaaagaaatgaatatcgatatagaaaaacatcaatatatttgtgtgcgccataaagatacagatcaagaccatattcatattgtagcaaatagggttggcttagatggttctgtatggcacggtcagcactcagcatttaatacaatagcagcttgtgaacgtttagaagtaaagcacagcttaaccattacacaaagtctcataggccaaaaatcagacgtatcagcaccaaccaaagcagagatcgagcaagccttgaggacaggtgagaaaccagcccgtttagtgctacagaacgcactacaagcggctttagtcggtaagcctgatttgtctacgttcttggaacgtctgcaggctgtaggcatcgagccggcatttaacgttgcttctaatggcaacgtcgccggagtatcatttggtatcaaaaataatgaaaaaaatattttcttcaagggatcatctcttggtaaaaaattcagttggaacactataaaaaacaaggtgaaatatgacaaaaatagagatgatgaactcattagaagattcgcagcaagaaaaacacatgacgaaaatagtattagacgatcatttgttgaaccaaatatcaatgacgatagaaccattatcagaaacgatgatgatattatcggagtcagtcagcacagctttaaaccagacacaacagacactaacaagagtgaacaactcattagaggcaacaacaaccgctttaaactcagcgaaaaatacaatagaccaacaaacccaaaagttagaagaacaacacaaaaagctgcacaagtactcaacagagttaaaaaacaataccataaagaaccaatcaaaacttataataaaagtatcttcaatagtaggggttctaaacttagcagcggttctattggtaggatacttgatcatgcagaaacagcaaacgcagccacaaataaatttagactcaagagcggtagccgtgtcaatagtagagcaactaagaacgaagaaataagagaacgtttaggtattaaaaaatcagttattcagcctaagaataaagaaactctggtcaaagaagaaataaagaaaaagcccttagggttgagtatgggtgaaaatagatttaaatcgaagctaaaagaagctctaaaaaaagaaaatcccaaaaatgaaacaacaccacttcagcaggaagatgatcagcatttaaaaccaagaggctttaaaccgagataa

SEQ ID NO: 271483 - DNA, 1254 bp, Klebsiella pneumoniae
atggcgaaccataaacttacagcaggaaagcaactgatagaagggatcgtccagttaggttgggttcttgggtatcatgtcgaacaagagtttcctgttgatgaggcttcatatggagagtctccagcagttgacgttgcatggttttcacaaaaaggtaaccggtttccgctctttatctttgaagttgagagtaaagctactaacgggatgacaaataatccattgaagatttatgctcaagagaacagagcatttgaaaaaccactttttttcttccatgttgttgctcagggtggtgatcattctgcacgcccaagaaatttggaagctctgcatggaaaacataactatagaatttatcttttgggtagtaacgcagcgaatgatcttattaaagacattcttatgcaacatgctagagtaaaaaatgaagtaagttatctgatgttgcataagttacttaaatcagaattatggaaagaaaaagttgattactctcagtcgcttatggatgccgtccacttaggtttatcgaaagaagacatcatttcttcatatattaaaataggtcgttgcgattcaagtatttttcctgacttggttaagttgattacagaggattctaaaaaaaatttcaccgacacaattttagattcgtaccttggttctcaatggtgtgttccgattatttctgctcttttatgcggtttaagtaaggatactgaagaatctaaatattggtcttctttactgcttaattggcagaaatacagctctcacatgccaatgatcacccctgcattcggcttagcaagagattatgatgaattcattttaggatgcgcaccacaattgattacgctttgtattgcaatatcgggtaaagataaagatatatatcttgagttcgtaggggttctcagtgatatactgaccaatattggggtatgttgggaggggttaaatactgcgatatatttactccatattagctcttcaataaaattaagtgagttatttgaaaaagctagagcatatatagtggatggtgagtttgaagattatttccagcgaggagagataactgattttttaggaatggaagaattcgcggaacaatgcagagcaagatatcaaaaagaaaaaattaatacagtggttataacacttcgagcacttgatgatgactcatatatttatgagtggtcaactgatttgcttacaactctttggtctactaacttatattag

SEQ ID NO: 271484 - DNA, 651 bp, Klebsiella pneumoniae
atgaattctatctattggggtattttcattggactgctgataaacataccatcactggttccggtgctgtttctacataaggtattaaagaaggttaaggtatcgatggcgttgaggctttttctgcttaacgctttcttagtaatatctctggtgacggtatcgcagaatataacacaaaaatacggactgttccctatatggctggttgttgctgctattggactgtttgtggtcattctactaccaacagtgaaatttgtgcgtaaacatttaactgttggtaaaagcagaaccgttatcctttcatcgttcctgattgtctatgcggtcaggtttaatggcgtgttttcagatgtgaatggaagtggatatacgattaacggctataatacagtatggacattctttttcctgtttgcctgcctgttggcttacatcggttgttctatgaatgggaaacactatgggacatatatccccacagccacttcacagcctaatggttataaggcctatgctccccaatcagagattgatgccgatattgctgtgaaaggatcaagtgtgttatttgatccaaatctggatgttgtggaacaacagcgttatcgtgatgcaattgaaaagcgaaataatgatagctggtaa

SEQ ID NO: 271485 - DNA, 351 bp, Klebsiella pneumoniae
atgaaagagattatatttaataaaagagaaaaagaaaaaaacgaacttattgctaacatcttacaaggatactgtgatgagatatatgctatttatgaaaaacatcctgaaacagcaatcgatatcttgaatgatggttttctttcaggcgtcatatatgatattttgataactcgtgagatgaagaaatactctatcaaaaatgatatatctgatatagatagaagagatttaaaagccacaatattatattggcatcaagaacacattattgaacttgttatgagaaatctaaagcaggataaaaatcaagatcctatttattggaagttaaagttcacagtgttttga

SEQ ID NO: 271486 - DNA, 138 bp, Klebsiella pneumoniae
atggtacagtttttaatacaacatcagatttgtcttggtgtcgagttgatgctggcaagcaccttatcgagccagagtggtatggttgtgttggtgatggaatcacagatgattctgtatcttttatcaaaatgctag

SEQ ID NO: 271487 - DNA, 792 bp, Klebsiella pneumoniae; identical to SEQ ID NO: 110638

SEQ ID NO: 271488 - DNA, 252 bp, Klebsiella pneumoniae
atgaaatcactacttattacttcattggtcatggggtttattacagtgaatgccgcatctgccgctcaggaaattaaccatgcagatgggaaagaaaagatcggtgtagtctcagctagcaatgcctatacgcttgatgatttatcgaatgcgctctctcgtaaggctgatgagagaggggcaacgtcattcaaaatcctgtcgacaacgggggataacagactacacggggttgcggagatctataggtaa

SEQ ID NO: 271489 - DNA, 4476 bp, Klebsiella pneumoniae; identical to SEQ ID NO: 110751

SEQ ID NO: 271490 - DNA, 501 bp, Klebsiella pneumoniae; identical to SEQ ID NO: 110642

SEQ ID NO: 271491 - DNA, 1173 bp, Klebsiella pneumoniae
atgcctatcgcacttttcgccctcgccgtgggcgcatttggtatcggcctgacggaatttgtcatcgccgggatcctgccacaaatcgcagcagaatttagcgtcagtatcccgaaggcgggaatgatggcgacgtcatacgcgctgggcgtatttattggtgcaccgctgttaacgattattggcgcgaggatcccccgcaaggccatgctgattacgctggcgggtatttttacggtcggtaatatcattacggccatcgcgccgacgatggcgatagcaattgtcggtcgtattattacctcttttaatcacggtgccttttttggtatcggctcgattattgccgcatcgctggtggcacccggacgccaggcaagcgccattgcctttatgttttcggggctgacgttagccaatctgcttggcgttccggtgggtacgtggcttgcgcaaacctttagctggcggctggtattctggatcattgctggtatcggggtgctgacgatggcaagcatagccgtgctggttccgcatattgcgaaaggcaaagctattgctttacgcaacgaactgagagcctttgttgacccgcaggtgctgctggtcatggggatcacgattttcggtccggccgcctttttcacctcgattacctatattgcgccaatgatggtgcaggaggccggtttctcctcaggcggcgtggcagggttaatggtgctgtttggtctgggacttgctgtcggtaactggattggtggacgcttcgctgaccgctctctgtttggcacgctgttcgttaccctcgcggctcaggggttggtgctgctggtcttctgggcgggtgttgaaagccagtgggttgccggcatctcagtcttcctgatggcggccttcggcttcgcgacggtctcaccgattcagaaactggttatggagcgcgccagccatgcgggagccccgacaatggcggcctcggtcaatatcggcatgtttaatctgggaaatgcgctgggggcatgggccggtggggtaaccattgctgcgggttttggactggcttctccgaactgggcgggcgcaattctgtccttcattgcgttgggcctcgctgttcttgcatggcaaagtgcgcgtaaaggttatattttgccggtacttgaataa

SEQ ID NO: 271492 - DNA, 393 bp, Klebsiella pneumoniae; identical to SEQ ID NO: 110644

SEQ ID NO: 271493 - DNA, 570 bp, Klebsiella pneumoniae
atgaagaaattactggctacgacagcactggcagtaagtctctgcaccggtgctgctttcccggctgtcgctgaaaacgccgtgggtacagttaaggcctggtcttatatgcaagcggatggctggaaatcgagcgatgacatggataataacaccctgcacaacctgctctatcaggctaaggtgatcgataattatccttggacaaaacagttcctgcttcgtcagcgtggaggcggtgcctattttctcgccgacaaaaaaacgcacactatacgcaagctgaatgtaaaaccggccagcggctactactcggatctgatctctgtctatcagggcgagaatcaagggaagggatgttattttaccatcatcgacacccagtatcagctggagctggcaaatgagccgcaccatccccaggtgcttgccgcaattccggaaaactgtgtcaataaacagcagcaggctgcactggcggcgaagcgttctgcatcagaacagaaactgcagcagtgggtagctcaacagagtctggcagagttgtgtcgacgcaccggcaactgctga

SEQ ID NO: 271494 - DNA, 981 bp, Klebsiella pneumoniae
atgtcgttagcaatgattattagccagccgggtggacctgaggttcttaaagcggtggaaagagagctagtcagtcccggtcccgatgaagtcagtatcagacacgaaataatcggcgtgaattttgttgacatctattttcgctcagggctctaccctcagccctatccccaggcggtgcctggttttgaaggggccggagtcgtcatagcaacgggcagtaacgtcagatcctttgctgcaggagaccgcgttgcctatacgggaaatccgatgggcgcttatgctgaatgtcgcaatatacctgccagccgccttatcaggatcccggatggtgtggacactcgtacagccggtagttcgatgcttcggggccttaccgcgcatatgttgctcaacaaagtaagggaagtcagggctggcgactggatactggttcattctgctgccggagggctggggcagatagtgacccgctgggcaacgatgaaaggtgccagggttatcggtacaacgggttcaccggaaaaagtagcaacggcccgccttgctggtgcgagtgaagttttgctccataccgacgctgcatggccggacaaagtccgcgacatcacggaagggtatggcgtacatctggccatcgacggtatcggaggaacaatgctctccagaacgctcggcgtggtccgcccttttggcactgtcgccagtcttggacagcctgccggccccatacctcccgtgtgggtggaagaactgggatttgcccgatctatagcactgatgcgaccaagttcactcgcctattcagatgatgctgctctatacaggaaaggggcctccgaccttatgtcagcactgtcggcaggacttgaaaatcacattggggctgaatttacccttaccgacgcagcagaagcacaccgggttctggaggcgggtcatacaacaggaagcgtcattctcacggttcaggcttaa

SEQ ID NO: 271495 - DNA, 867 bp, Klebsiella pneumoniae
atggactggcaggatttacatttttttttcgcccttgcccggtgtggttccctgtcggccgcagccagggaacttggcgtagaccatgccactgtgggccgtcggattgcggcccttgaaagttctctgggcctgaggctcacagagcgcttgccacgccgtaccacgcttaccgggcatgggcggattatcgcctccggcgctgacgaaatgtaccgtattgcagaccgtattcgaatccaggcgaggtcattgtgtgccgaaccggccgtgcctataaatatcagcgcgtcacctgccgttgcagcacatctcattgctcctgctatagcaggattcacccggaaacatccgggtatcacgttgtcattatccggcgtttcgcaccatgttcttctgaataaaagtgaggctgacattgcggttcgcctggaaaggcctgacgatccagacctgatgacaaggcgtataggtaccatgcgctttggtctttatgcttctcagttttggcaagaaattccgcaagaagactgggtatttattgcttatgacagcacgcttgcacatgtcacgcagcagcaatggctggaatcactgttgaacgggaggcgagttatctttcgggcaagcgatctgatggcgcagcaacaggctgcccggaaaggattgggcatcgttactttaccctgctttatgggtgataatgacagcgaactggtaaggctgccggaaaatctgccttcgcccgtgaggaacatctggctggttgcctaccctgaaattaagcgcgatcacgctgctgtcgtggtgatggatttcctggctgaaatcattggccggtcctgcccacctgccaaggatatctga

SEQ ID NO: 271496 - DNA, 372 bp, Klebsiella pneumoniae
atgttctggaaccctgaagtattaacaagaatagatgcggccgacgacctgaaaatcgctccgtatcatcccgatatgaatacgaccggtacgccgacatggatttgggaagtgaaggtggagaacagacttttcgtccgagcctatagtggtacccgttcaaaatggtatcaggctgcattgtcccagcaggcgggtaagatactggctattggacaagagttcgacgtactgttcgcaaaaccatcagaccctgagcttgaaagtaaaattgatcaggcttatcagaaaaagtactccagcagcagctatgtttcagcaatgacagggacacgcgccagagcggccacgattgagattttaccttcgtga

SEQ ID NO: 271497 - DNA, 1149 bp, Klebsiella pneumoniae
gtgaaagagtttactttctacaacccaacccgaatcgaattcggttccggaaaagaggatactatcggtgcacacattgccagtgctggcgcacgtaacgtcctgctgtgctacggaagcgaacgtattaaacgagaaggcctgttcgctacggtcagccagaatcttgccgataacgacatcgagtatatagaacttggcggtatcgtaagtaacccggtgatatccaaagtccgtgaaggggtggaactggcgaaacaccataacgtggacgctattctgagcgttggcggcggctccgtccttgacagcgctaaggcaatcgcggccggtgcacattataatggcgacgtctgggatttattcgctggtaaaggcgagcttatctctgctttacctttgtttgccattctgaccctggccgcaacgggaagcgaaatgaacccgcatgccgttgtcaccaacgaagcaacccatgaaaaattatcgatcggtaacgactacacgcgtccggtggtatccgtactgagtcctgcgctgatgacgggcgtctcccgagattacctggtctattctgccgctgatatcatttcacaccttatcgaagtgtacttcaccgcaaccgttcagcctgcaattcagtcgcgactggttgaagcgctactaaatacggtaattgaaaccacacaaatactcattgccagtccggatgatgaggctgcgcgtggggaatttgcctgggcagcaacccttgctcaaaacggtttgatcctgtcaggctgtgccggattcagctatccgaatcatgcaatcgagcacgctttatccgcacttttcaacgttccgcatggggcagggttgtccgttgttatgcccgcctggatgaaatggtacaaaaaccaaaatacaccgcagtttgagcgtttcgcaaaatatgtgttcggactcagttcggcagacgacggcatcgcagcgcttgagaagtggttcgaagaaattggtacgccaacacgtcttgaacagctgaacatcagggaagcagatctgcccgctatcgttgagaacgtccagattaatgtcaaagcgtttggtatcgccagtgattacccggcggaagttgtaactgaaatactcatgcatgctgtctga

SEQ ID NO: 271498 - DNA, 135 bp, Klebsiella pneumoniae
atgcaaagcaaatacggcctgacaaggaaagagcttaaacagcccttcgttcatcataacgcgtgccccggcgccgccttcttcccctggctgaaaaatcagatgaatggtcccatcaaaatctcgattagctga

SEQ ID NO: 271499 - DNA, 384 bp, Klebsiella pneumoniae
atgcataccgggaccaaaaaacgttttcgcctgtttcacgtactgcgtgttcagaattccctcggctttaacgaaagccgcgtaacgctccacacctgcgaggatttccgccgtagtggttccatccctgattcgggcattccaggctttgaaggcatcggatttgctgttaccccctgcccgcttgggataaaccgaccagacctgctcgaactcattcgggtaaattttttggggatcaggtttatcgccttcgtcctggttctgaacgtctgggggtgtggcgaagccatgccccgaactatcttcttcctgatcctgttcctgctcctgatcctgttcctggttaaggaacggttcaagaaccctttcggaaccctttag

SEQ ID NO: 271500 - DNA, 906 bp, Klebsiella pneumoniae
atggacagactggatgccatgcagttgtatgttgcggttgtggatgcccacagcttcgcccgggcggcggaggcgctggggcagccgcgctcaacggtgtcgcgggtagtgaaggagctggaagcctggcttggggcgcagcttcttcagcgcaccacccgcaagctcagcgtgacggcggaggggcgtcggtattacgaggagtgtaaaaggctgctggccgaaatgacggcgatggaagcctcctttcccggccgctcggcgcagcccgccgggcggttcaaggtggggatgccgcaatctctcgcccggcactgcgttttgccgaggatcggcgagtttctgcagcagtatcccgacctggagctgatcctctgctcaagcgacaacgtggaagatatcatccaggagggattcgactgcgtgatccgtaccgggcaaatagaagattccaccaccctggtggcgcgccctctggcccgctaccgctggatggtcctcgcctcgccggcctggatagcggcccacggccggccgcagagcatcgacgatctgcaccagcaccgggcggtgggatacctgaaccaccgtaccgggcggaccatcgactggcttttctccctcgatgacggcgactgcgcgatccgcatgcaggagacgttggtggtcgacgataccgatgcctatatccaggccggcattcaggggctgggcctgatccgcgtcgccagctatctggcgcaaccctggctgcagagcggcgcgctggtcgcctgtctggagcaggccgcgtctgatcttcccctgtcgctggtctatccgcaaaaccgctatctgccgccggcggtgcgcgcgttttacgactggagcaggcgcgttctgcaacccccgctcagcgaggcctga

SEQ ID NO: 271501 - DNA, 1773 bp, Klebsiella pneumoniae
atgaccgttgccattaccgatgtcgtcctgcgcgacgcccaccagtccctgttcgccacccgtctgcgtctcgacgatatgctccccgtcgccgctcagcttgacgacgtcggctaccgctcgctggagtgctggggtggcgccaccttcgacgcctgcatccgcttcctcggcgaggacccgtgggtccgcctgcgcgagctgaaaaaggcgatgccgaaaaccccgctgcagatgctgctccgcggccagaacctgctcggctaccgtcactacgccgacgacgtggtcgaacgcttcgtggagcgcgccgtcaaaaacggcatggacgtgttccgcgtcttcgacgccatgaacgacccgcgcaacatgaaagccgccctgcaggcggtccgcagccacggcgcacacgcccagggcacgctctcctacaccaccagcccggcccacaccctgcagacctggctcgacctcaccgaacagctgctggagaccggcgtcgactccatcgcgattaaagacatgtccggcattctcacccccggcgccgcctttgagctggtcagcgaaatcaaaaaacgctttgccgtcaccctgcacctgcactgccacgccaccaccggcatggcggagatggccctgctgaaggccattgaagccggcgtcgacggcgtcgataccgccatctcctcgatgagcgccgcctacggccacccggccaccgaagcgctggtggccaccctcgcgggtactgagcacgacaccgggctggatatccacaagctggagagcatcgcggcgtacttccgcgaggtgcgtaagaagtaccatgccttcgagggccagctgaaaggcaccgacagccgtatcctcgtcgcccaggtgccgggcgggatgctcaccaacctcgaaagccagctgaagcagcagagcgccgcccaccgtctggatgaagtgctggcggaaatcccccgcgtgcgcgaggacctcggcttcatcccgctggtcaccccgacctcgcagattgtcggcacccaggcggtgctcaacgtcctgaccggcgagcgctacaaaaccatcgcgaaggagaccgccgggattctgaaaggtgagtacggccgcacgccggcgccggtgaacgccgccctgcaggcccgggtgctcgacggcgccgacccggtgacctgccgcccggcggacctgctgaagccggagctggcgcagctggaagccgatgtgaagcgccaggcgcgggagaagaatattcagctggcggagaacgccatcgacgacgtgctcaccgtggccctgttcccccagcccggcctgaagttcctcgaaaaccgccataacccggcggcctttgaaccggtgccgcaggtggaagacgccaggcctgccgcgccggccaaagccgccgcctccggcgtctacaccgtggaagtggaaggcaaagcctttgtggtgaaggtcagcgacggcggcgatgtcagccagctgacggcggccgtacctgctgcctcttccgcaccggttccggccgccgccccggccggcgccggcaccccggtcaccgcgccgctggcgggcactatctggaaagtgattgccggcgagggccagagcgtggccgaaggcgacgtgctgctgattctggaagccatgaagatggagaccgaaatccgcgccgctcatgccgggaccgtccgcggtatcgcggtgaaagccggcgatgcggtggcggtcggcgacatcctgctgcagctggcgtaa

SEQ ID NO: 271502 - DNA, 216 bp, Klebsiella pneumoniae
atgatcaatgatttcaatattgagggcgtttttgtacccggtctgttggtaattgccctcattgcactgacatgtacgctatttatcgtacatatcttgtcattcagcaagggttaccgccgcttgccctttagaccgatgatcgatttttccgtcttcattattactttttacctgctgctgcaggggctgaccgaactggggttttttaaatga

SEQ ID NO: 271503 - DNA, 999 bp, Klebsiella pneumoniae
atgctagaaggtcaactaattttctgctcggactcaatactacgctttcgctctgattacgatgaaacaacagcacttccgttgctatcaatccagaaaactatttcagataccgatcccttttttcttctcaggttctttcgccataccgtgatgaatgaagaaggaacaacgttggcgaatatcttttttgccattgagccttggaaggaactgttaaccgcttatttggatcggaacgttggagcctatattgacgaagtaagaaaaccatccaaacccaccacatgggatcttgagtggattggcattgatcgccgaagctctgtttaccgcgcatatcagcatcagggtatgggagacggtgaggattttacagcttggctcaatcgtgaacgggtccctactgaagaatttgatatagaaagtagttgcgatgcttccggttttatcaaaggagataaagaacgctggagccttagcgaaaatatccacgaaattaaaaatctgccagtgatcctctacaacaagcaaacgctgatgaccttacagaaggatgagctgctaaaagaaagtgtctctggggtgaatagtacaggtcgaagtcgttttgtttatggggatacctctttttccttctatgaagtgatggaagcgattttcattagtggtttgtttttccatacgccacgtgctgctgcaagttgttttgacggggtaaaaaatattctcgatggactggaaaacgaggtattgaaggaggctgaatctaatttcgctgacagtggagaagataaacagctaaaaatagaagttgccgatggggcctttgattccctgattacccacatggactctgaaactgagaactggcagcttatcaagaaacaatgccaaaaagaggactctttgcctgtcaggattggggttattacaccggcaaagccgccggagttgcgcttgtgtggagtgatttgccgggatagcagcggcgtttaa

SEQ ID NO: 271504 - DNA, 171 bp, Klebsiella pneumoniae
atgaccctggcccaaattcagtgcagtgctaaatcagagatcttcgtctttctgaccctgggtttacaccagggttgctttcctcggaggccgatgcacttaaattccatgttcttatcgctgagccagggcatcaaaactaccgtcactgtagagcgagaagccccatag

SEQ ID NO: 271505 - DNA, 1041 bp, Klebsiella pneumoniae
gtgacctctgagtcaaaccgaatttccgccgcaagcatcgcctatatcaatgcagtttgtcgtgcttgggggtggtcatggcaagagataggacaggccgatgatgacggttttgatgggctagtgtacctgcgaagcaaaaggatcaatgaagaccgtccaaatgatcgccgatcatggaaacatgaatttactggggggctaatccaagtccaggttaagagtggggcaagctacgtggtcgatacgggtgaagactatctcgaaattaaaatttcaaatcttgaggtaaagcgagatctttggaacaagtcaccgctgcctgttgcgctggtttatgtaaaggaagcatccccgggaaaacttgtaagccaagcttggtgggccgatctaaagcgagctgactcctatactaaacagggcactgtgatcgtccagctaaaaaatagattccaatcgggcctggagtgcattcgaccattttcacgacttgctaccggtcagcatcgagcgctggggctcgtggaaattgatatgacgcagcagagtagtttacctacacgtattaattcgttttctaaaccaaccaagtttgcagcctgggaattttataaattgtggaaggccaaaggtgccacgcatcccacacttggtaatgtcatagtgaatagaacgggttggtcacacattacgcgtgtaaaacgaccacttgcacgaatctttgcaagctttgagttgttacctaccgccgcacgtattattgagacagtcgatacatggcacaggcttcgaagaggtctaaagactcgaaagtttcctgatggctcatgggcggaatacgactatctgggggtctctgcgttagtaaagtggcctgcgcgggaagcatctgaggtagtcgtgatacttaagcgtgagactaccctaagtgaagatcatatagccaaaggctctagcgcaaagagcggtattagagttaaagaaataaaaacttggttctattccgtgtacgaacccggtaggcgtaagggaaaaatttga

SEQ ID NO: 271506 - DNA, 162 bp, Klebsiella pneumoniae
atggctgacaaggggggcattggctcccctgattccattctgctggctaatgccccacgcctggatgatctcagcctggcgctgcagcgtcgccctatcccggacaaccctcgccctgaagagcctgacttcatcgccagcgggccggttcgccggtgttaa

SEQ ID NO: 271507 - DNA, 1518 bp, Klebsiella pneumoniae
atgcaactaacaccgggccctcagagaattcgtggcttggccggaacaggtaagacgatagttctttcattaaaagctgcgataacgcacaaaaaatttccagattataaaatattatatttatttaatacacaaagcttatatcaaaatgtgcagagttcaatcgccagatattatactttagaagccaaaaaagcgccagattttgaatcgaatctaaatgtcttccatgcgtggggtggtaggcagaaaccgggactgtattcacatatttgccaacagtatggattaactccactaacattaggagatgtgcgtggagcaagtgatgctttagctgtcatatatgcagaacttctcaaaaaaatcggtagtgatataaagcctgaatatgatcttattttaatagatgaagcccaagattttcctaaagagttgtttgaagtggtctttaaactagcaaagggcaaacctcatgaaaaaaggattgtttgggcttatgatgaattccagtcattgaaagacactcagattaaaggtccatctgagctatttggtttggccaaagatggcactccaaatatgagtgatgatgttttagacggattctatcctggtgacataaaaaaagatattgttttatccaattgctataggactcctcgtcctgctcttatgactgctcacggagtagcattaggactctatactaataagccgaatgaaatgttttataaccatgatgaatggaaagctattggctataaagttttaaatcctcagacaaaaatcattgcaaaaggcaatgatgttcaaatcgagagacctaatgaaaatagtctaaatctgttggaaggaattatgacagagcagggtaagagggcccttaatcttatccagactaaggtggaaaatgatagggaaagtcaatatgaatatattgcaagtaacatcaagcgcttaattgatgaagaaaatgtctcgcctgaagaaatagtcataattaatttaaagtcctctagtaacaaagatgagatgctacgtattcaattcatcttaaataattacggtattcactctgtaattcccggttacgttgaaagctcagatgtctttaaacccaaggggttcgttacaatcacaacccctttcagggctaaagggaatgaagctaatattgtatttattttaaatggccagttagttgttaatgatttttcattaaggatgcgtaatgcattttttgtagcagtaactcgaacaagaggatggtgttatattgttggttatggagaaaaaatgcaaatgcttgtggacgaaatttcaggaatcaaaagagattttcctatattcaatttcatttgtccagacccagatgatgttaaagcacgaaaaagttatctccacaaatcagactctgagatcaatgagatgcaaagagtactggatttagttaataataacgaagagttaagacgactgctacaggagcagctcattgataagaaaggagattga

SEQ ID NO: 271508 - DNA, 672 bp, Klebsiella pneumoniae
ttgaatttctcattagtgcagcaaagcttaaaccatgtcgaagcacttttaaaacctgtaactcaacaaaaattaatagagcttaaagaaagagagaaggtcgtaagttggacaaataggaagccaggaatttacaatgaagtctactatcctattgaatatcaatgtgtaattgatgcaaggcagtactcattattgcttagagatggcgatttttttcaatttttttatgagtttgatgcgaaaactggcaatctgaaaaaagctaagttggctttctatccctcaccaattgattgtagaaattcgttggatgatctcaatgaagccgctgaatttgcttttgaccataatgaagagctctataatcatcttgataattggattgcgctattggaaataaaaaactattttccagcaaatacatctcaagttagatttgattatgatagtacggttactacacatgagaaagcacatctgcagtttagtagtgtaaataagcttagacttccggctgacttttttcctttgccatatgcatttgtattaatggtttctgatcttattaatggatgctcaaaggtagacgctaaacatataagctttactaagagatacagcctaaaatcgaacgtttctaatagaattatcaccttgaaatcacagtga

SEQ ID NO: 271509 - DNA, 603 bp, Klebsiella pneumoniae
atgaaaagaagaatgttctcatacaaaatagttagggattttgggttcgccccaaaccctttccatgattactgtacgcttgcaacatgcaagccaaaaataagaaatgctgcccagcccggcgatttgatttttggatgtgggagctctcatctgaacttggaagataaactcatttatgtgatgctagtagaagaaaaaatgttattccaagaatattgggaagacccgcgatttaaatataaaaaaccacacttttatagtaataaacagaatgcttttggagacaatatttatcatgttgatggccatggtaactggactcaagaggactctcatcatagttttagagatggacagattaatcaagctaatatggatagagacttatcgagccaccatgttttgataagtagaaattttatttattttggtgataattttattgatgtacctgtctttccaataacaagtgagaagatctatcccaactcacgagattatattactaattttagtgatgaaatggtgaaccaagcttatgattggttgataaattacccccataaaggttgtattggaagccctatatcttggatataa

SEQ ID NO: 271510 - DNA, 678 bp, Klebsiella pneumoniae
atgagaataaaaaaagaacatgtagccatacttaagttactatcacaacttagggattttactagtgataatgttttcaatccttatagcgatatgtgtattattcatgacattgaaggagcacctactcttcgactaagcaatctggagatgtacctaacggccagtttaagtctaggaattgatgcgatctgggttgggcgagatctagggtaccggggagggcgtcgaactgggctagcattaacagatgagtttcatcttaatcttgcagctaaaagtctcagtaccgatgccttttacaaaacgaccaaaactatttgtgtcaaggaaagaactgcatccgaggtttggagtctaattaatcttttagatagacctccttttttatggaatatattcccatttcatccccataaaaaaaatgattccatgtcaaacagatgccatactaaaaaggaatttcaccaagcttcctctttttttgtagagttgatgaacatttacaaattcaataaagtatttgccttagggagggatgcctcaaatgaactaaattatttaggggtgaaacatagcatcgtcagacaccctagctatggtggacaaactgaatttagaaacacaatccttttatcttctggagtgagtacagaagagagaacaaaaaaattatag

SEQ ID NO: 271511 - DNA, 1143 bp, Klebsiella pneumoniae
atgattacctatagcgattatcaagaaagtgtttttaagtctgataaactaccttccgacaatcctcattttatagtattgggtttagtgggcgaagtcggtgacttagtaagtctagtaaaaaaagagcaaagagattcattaaaagcaaatacaattgaagagcatctccatgaagaattaggtgatgtcttatggtatgtcacatcgataataaacagagaaaaattcagcattgataacatagtaaataatgcaatccagaaaataaatgcaaaagaaaataacattcaaccatctacacttacaaacttaagtttaattgattccttctcgacaaacaacaaattagagttaagcacagtagaaatatcacttcaactaactatttctcttggtagctttgtttctctttactcatcaaaaaatacaaacaaccttaatgaaaaagaaattactatttctacttttgtaagtaatctgctactgttctgcttttcaaaaaaaataagcatatcaagagcaatagactacaatttaagaaaaataaaaagcagatggcctgataaatacacatatccagtatcatttgatattaattatgccgattatgaacgattcccaccaaagatggtttttgttttcaaggaaattggtataaataataaaaaatatgttatacagcaatgtcagggtgttaatattggcgatcgactaacagacaataaaaaggataaggatgattacagatttcatgacgtttttcatatatgttatgctgttcacttaggttggtcaccagttttaagagctttattacatctgaagagaaaaagcatttcatcaatagatgaaaatcaggatggcgcaagagcaataattatagaagaagggatttcaaccttcattttcagcagagcaataaaacagtcattatttgagaatgtgacacgcctcgattatgatattttaaagttcattcaagaatttgttaaaggctatgaagttgataaagcttatttatggcaatgggaaaaagcaatattagatggatacagtatattcagaagtttgaaagaaaaaaggaatggtaaaatcactgctgattttgaaaatcacattgttttttttgaagagatttaa

SEQ ID NO: 271512 - DNA, 2574 bp, Klebsiella pneumoniae
atgaaattcactctcaaggactaccagcgtgatgcggtgcgcgattcgctggtgaatctcagaaaggctcgccgttactggcataacgaaaatgacaagagcgccttctctttaacagctgtgaccggtgcgggtaagactgtcatggctgccgctgcgtttgaagcattatttcatggcgacgacgaatttaacttcgatgccgatcccggcgcggtagtgatctggtttagtgacgccccagcactgaacgagcaaactcgttttcgcctgatggaagccagtgaccgtattaactataacgatatggtagtcgttgaacaccctttcagtcggcgcaagtttcaggccggaaaaatctatttcctcaatacgcagaagtttggcaaaaaaagcctgctggtgcgcgggttcgatgataaaggcggacttttcgaagcagcccctgatgcacaggcttatacgctgtgggataccatccagaacaccatcgaagaccctgatctgaccctctatctggtactggacgaagcgcacagaggtatgggttcgtcaacggcttccagtgaagcggctaagagtactattgtgcaacggctcatcaatggttcggctggagtgaagggtattccagtagtgtggggtatttccgccacagttgaacgtttcgacaatgctattgccaatgccggtcatcatgtcaaactgccgaacgtggtggttgactcggctaaagtacaggaatcgggacttatcaaggacgacatcattcttgatgtgccggatgaagccggtgacttcgatactgtatgggtacgccgtgctgccgacagactcaaggaagtgaccgatgcttgggcagagtatgcaacgcagcaggaacctgtgcgcgaagtagtgccgctgatggtattccaggtacccaatactcctgaccctaacgaagtggggcgttggctggatacgctattctctcgttaccccgaattgcccgaaaactgtgttgctcatgttttcggtgaacatactacccagcgtttcggccaataccaaataccttatattgaaccgcagcgggtgcaggaatcaacttgggtgcgtgtactgattgctaaagatgccatcagcactggctgggattgcccgcgtgccgaagtaatggtttccttccgcgctgccagcgacaggacgcatattacgcaattgttggggcgtatggtgcgtactccactggcaagacgtattccgggtaatgatcgcttaaactcagtagaatgtctgctgcccaagtttaatactaataccgtgagagatgtcgttaataccttgtttaagggcgatgatacatctcctccgagcgggcgtatcctggttaaccctgtagagatgaaacctaacccggcggcttcagctgccatatgggaagtatttgaagcgctaccttcgcaaacccgaccacagaaaggagccagacccgtcagacgtctaactgcgctggcacaggaactggttgatgacggtattcttgatggggcagtcaggaaagcccatgctgctttgcacgctgccctggacaatttccagacagaaaatgctggaaaaatcaaaaacaaacgcaatgcagtgctcgttgtagatggtaaggcggtggttgccagcctgaagaacaaaacaatgaccttcaacgaattctgggaagaggcggacgtagcggtgattgatgacgcctaccggcgtgcagcccgaattttaagtccggatgtttcacgtacctatgtggaatatctggccgataaggtcgcggatcgagaagaggatgcagaggagtacctggaagcaatcatggaagctcgtgtaaccgttgctggcctaggtttagttatggaggtgcaggattacttcgatggcgaggccgataaactggcgaaggcatggctggccgagtacacaccgcagatcaagtctttgaaagatgagcgtaaagaggcctatcgtcaaatcgtcgaaatgagtaccgaaccgcaggacgttgatttagttaggccagaaaacaagtttgaaatgacccgggctcgtgaaggagagaaggaaactgaccttccaacctggaaacaccatctgttgtgtgatgaaagcgggaactatccggctcagttgaaccattgggaaaccacggttttcgagaccgaaaccaagcgtgaaggatttgctttctggtatcgtaacccacaatatacagggcagtcgtcactaggcatcgcctatgttgaaaccgaacaatacaaaattgttcgtcccgattttctgttctttgccgaacagaatagcgaagtggttgtggatctagtagatccacatagcctacatctggctgatgctttgcccaaactgaaagggctggcgttgtatgccaagcatcatcgcaatgctttcagacgaatccaatccgtcgctgaagtgaagggtaaattgcgggttttggatttgaaacggcaggatgttcaggatgctgtggctgcggctgaaagtgcggaatcattatttagcagccaacttgcggattattatcagtaa

SEQ ID NO: 271513 - DNA, 2103 bp, Klebsiella pneumoniae
atgtccaggctgactgatttaatagctaaagcgaaggccaaagacccacagttgggcgctgacctggatcgagaaatcaagatcctgtcatcacgtcttccgtttggtcttaatttcgaacgacatagccctgaagttgttgagttgccattgcgacctattcgcaagggagataaggttcgcgttcttccagagcgtgggacccctaagaaaggtgatcaacggttgtggcaagttaaagccattcacaaggtgatgaggaccgctgatattgaattgctaggcacggctgatgtcgagactcagacagtagcgttggtcgaccttgtagttatagctgaatttcgtgacaccatctggccgggtctggtcagtacgggaaaagtccagcgcggtggtgagaagcctttccactcagttatcaatggcgaaaactatcatgtgttgaaagcattgacttacacgcatagaggcaaggtggatgccatctatatcgacccgccgtataactcaggcgcaaaggactggaagtacaataacgactacgtcgaaggtgacgacatctatcgacacagcaaatggttggcaatgatggagcgtcgcctgttggtggccaaggaattgctaaatcctaacgactcggttttgattgtcaccatcgatgaaaaggagtatctacggctcggtctattgctggaacaagtatatccagaaggaaaaattcagatgatttctacgattatcaatcggaaaggaattgtccgggcaaatgaatttaggcggactaatgaattcatatttttcgtgatgtttggttcggccaagttaaatccaatgagatccgatactggaaaagcagttagatgggctagtttgagaagaacagatattgaatcacggcgtggaacaaaaaaaggtggaacatcgcagtttttcccagtttatgtaaataaaatgtctgctcaaatcgaagctattggtgagccaattccaccagatgtagatcgcaactctattcctgatcgtgaaggatgtttcaccatctggccaatccgcccaaatggaacggagatgaactggggattgacgccaaagactgtcatggcattaatgaaagatggctacgttaaggctgtcaacggacgagcaaataaggaaccaaccctctactatttaactagtggtcaagttaaagatatcgctaatgggaacttgaaagttacaggaagagaagctagcggtgcagcaattgttgagtttgaaacaggtaaagcaacgatgcctgctacacagtgggattatgagtctcacagtgcgcaagaacacggcaaatctataataaaagcgctaatcccgggacgagatttcgattttccgaaatctctttatgcagtagaggatgcgctacgtttttttgtaatcaataaacctgatgcaataattctcgatttcttctctggctccggcactaccactcatgctgtgatgcgcttgaataaacaggacggtggtcgtcgtcagtgcatctcagtcactaacaacgaagtcgccgctgacgagcagaaacagttgcgcgaaaaaggtttacgccccggagatgccgaatgggagaaatggggaatttgtgactacattaccaaaccacgtatacaagccgccatcacaggtaagacacctgaaggtgagtcaattaaaagcgattacaaatttaccgacgagttctccatgtctgaaggattcgaggaaaacgccgagttcttcaccctcacctatgaagctgaaaagtcggttagccacaacttggcctatgcacgcattgcgccgttgctgtggttacgagcaggggctcgtggcaaacgtattgacaaactgcctgctgatggatgggcggtgactgatgcttatggcctgctatcggcggtagatcaagccacaccgtttattaaagccgttagccacgacaggaacatacgagtagcctttatcgtcaccgacgatgatcgtcatttccagtctgtcaccaagcgtctgccaaaaggtgttgagccggtgcgtttgtacgaatcgtacctgaccaatttcagcttcaccagcggggaataa

SEQ ID NO: 271514 - DNA, 207 bp, Klebsiella pneumoniae
atggatcgcttcttgctcagtctgaaaacaaaatgggtacccgtgaatggttacgcaggtaaagacgaggcccggcagcaaattaatgtttatatattgaactactacacaagcgtaataactcacgattatgacagtggactgacgccggaagagtcagagaatagataccgtttttactgtaaaaccgttgccaatattacttga

SEQ ID NO: 271515 - DNA, 738 bp, Klebsiella pneumoniae
atgcagcattacgcgagcctacagtacggtgatcatatggggttcctaattggagctctagatggcgatccatcaagtgttacagcacctaccttacccccactgccctcaaccgttaatgaagcactggtcaaagcagccatagaatttctatgtcgcactagcttgcctattgaaccccgcaagaagtggcctgatggcggaatgcctaagtatgacgttagaggagtcatcgctcctgcatatcgagctaattcgggtaaagcactttgtgtatggggggatgctgggtggggacgtattgtaagagaaaatcgctataaagatgaatatttttctgaacaattggttcaggcatgtgctgagatgtttcatcaatgggggcccacaccagcccctgaatgggtcacagctatcccatctttgaagcatccagatattgttccgagttttgctaaaagacttgccgctgccgtagggctgccttttcatcaagtgctcgtaaaaactgaagataggccagagcaaaagactatggcgaactcctctcagcaggcacgtaaccttgatggctctcttgcattagccaatgagcctattcctagtggaccagtgttacttgttgatgacattgttaattctcgatggacgctaacagtggcagcatggctcctccgaaaggctgggagcggtgaggtttggccaatagctctttcacaaactgggcacgatgactga

SEQ ID NO: 271516 - DNA, 558 bp, Klebsiella pneumoniae
gtgaccggcaaattaaccagagagcaacgcttaaacgaagtgaaagagctaatcgctaatgctgaggaatgggctggatattatgaacatccgattcatgacaagcctcaaagagaaatgtttgagggtatggcgagggttatggctgagcatttggcagcgctaatcgccgagtctgtggagccgggaccagcgctcgtagtgtcagagatagaccggcgtgctattacaggcaaggtatacagacagtgctgtcgcatacctggagcaacgttttacaacgccgccgaatttacgattgatgaagtggaagccctgctcaaggctggcaactctctggtaattccggatggttacgtgattgtgccaaagcagccgaccgagcgcatggtcattgatggttttgagtctgaacctgatgaaacattcagtgagccggaggtatgggaggcatttcagaagatgagcggatgtgaacaggccgcgtaccgcgctcgtttgtgctgggccgccatgcttgcagccgccccaccagcaccgaaacaggagaatatttaa

SEQ ID NO: 271517 - DNA, 285 bp, Klebsiella pneumoniae
gtgaacatcgaaatcatcgggtgggggcttcgcaaaccggcggttgtagtcagccatgaactcttcggcaaaggcgtttgctgcctcgggtgtactgataccgcgaagccgcagctccttgacgaggcgatcctgcaacgtcaggtgagcccgctcaaaacggcccttggcagaactggtattggcacagataccagtgatgttcagctcgttcatggcacggtcaaactgcgtctggccatctccgccgttggcctgcttgttgtggcactgttgcaaagttag

SEQ ID NO: 271518 - DNA, 228 bp, Klebsiella pneumoniae
atgacaaatatcattctgtgtgatgtaactgccagcgtcagcgaacttaaaaacgatccggtggccagcgccggtgccggctgcggctacccgtcgctattattgacagcaaccggcctgtttttttattgtgtgcccgcggttctgtatgaaaaaatgctcgatcttctggacgaaaaagacctggcgcaattgataacagaacgtcaaaaccaatatattttgtga

SEQ ID NO: 271519 - DNA, 303 bp, Klebsiella pneumoniae
atgcacatcagagaaccgggcatcgtcggactgctcttttttggtaaacagcgccgtgacgcgggcaaacagggacggcttgtcctcctggatttcttccagttcgatcaccgtttcctctgcggcggtaaagagattggcgggattctgcttgcggtttgccagcgggttatgggctgcactggcgctgaatgtcagcatttccgtacccagactggctggatcatcagtggcagccaggccaaccaggtaggctttgcccgtatcagcgaacttcgggctgacttccatagaagtgaataa

SEQ ID NO: 271520 - DNA, 663 bp, Klebsiella pneumoniae
atggaggctgaagaatttgactttgaagaacttattaaaggacataaaaatcctcatactattactttggatcaagcaatatcgatagctacatatgaaaagtgtagtataacttcagtggacttagttgataaagagttactagatgatatcgcttggatgaaagatcttagaaattcaattgagcattacgaattctcgtttactattaaatatgttcgtctggcaatggggcgtttggtcagagggttagctgagttttctgatatatttggtttatacgatctagataaagaaatctctaaggaaatatctaattcctataatatactttctgacgaatatgagcataatattcatgaaggttatcttgatgtagctgatgctagaaaagcagcatttcttggtgttagaccaaagttttttgagctagttaattggaaagaatatatctgcgattactgtggtcatgagacaatgattcaaaataacgattctacttcaggatatcgttgtacgtattgcggggctgaagactctggctcaattgaagtcacatgtgatgtttgtggttctgaatggcctgaagaggaaatgagttcttggcttggggaggggactcacacttgccctgattgtagagatattagcaacaaaccatga

SEQ ID NO: 271521 - DNA, 507 bp, Klebsiella pneumoniae
atgccagttagccgtaatctctgcattttcttaaacgttggtttgggagaaacgataaataaagcctccggagctatgcagaaatcggctaatggatctgatatttctgatgtatcagccttccgaaatgcgctccagttagggaccgccgcaacacgagatgttggagcagataatgcctcgaagttactggatttagacagcttcaggtcaatgatgtcagggaatggctacatctacattccatgcattgcgacgacaggaaacccggtgaaacttatgttgcagtggggaacggtggcaacacaaaagggagctgatgctggatatgccttaccatttgcttttccctatgcaggcttatttgcgaccggaaaccgtggaacatctggctacaatgccgcgatgaatgtgcgtattgccagcagaacgcatatcagtattcagaactggtcgccatccggagagggcaccgaagattgttgttttatcgcgctggggtattaa

SEQ ID NO: 271522 - DNA, 453 bp, Klebsiella pneumoniae
gtggctgaactgcagaaagtggacgactggctgagtgccttgctggcgaatctggagccagccgcaagaagccgcatgatgcgccagctggcgcaggaactacgccggacacagcagcaaaatatcagaatgcagcgcaatccagatggcagcagttatgaaccgcgacgggtaacagcacgcagtaaaaaaggccgtatcaaacgtcagatgtttgcaaagctgcgcaccacaaaatacctgaaaacttccgccagcgccgactctgccagcgtgcagtttgaaggcaaggtacagtgcattgcccgtgttcaccactacggattgagagagcggataggtaaaagaagcaaaagtattaaatacccagctcgcagattgctgggacaaacccaagagagtaaccagataattctaaacactctcttgaggtggatgacaaaagataactaa

SEQ ID NO: 271523 - DNA, 1521 bp, Klebsiella pneumoniae
atgagttgcttagatcaattatcttcagaaaataaaaaatccctattatcatcagtattttcaaagagttatttcctctggattggttctggattttcgtacaatttcggatatccaagttggggggccgtacttgaagaaatagcaaagcgaatagagtacccgttaaaattagattcatcacagcctctgcgtgctgcagaattacttttaagttatgcgataagtgaatcatcaataaaagaatatgatttcaattcgctcgttgccaggacgattatagatttaaaaacagaaactaaagaaccaagatggcttaaaagattcaaactcttcgctcccaatacaattgtaacaactaactgggatgaggtgcttgaagaaacatttgagcatatggcaaataaaatcatcagaaaggatccattccctaaagtatcaacaaaagggaaaaatatcttcaaaattcatggtgacgtcggaaaacctgattcgattgttataacacaaagtcaatacttttcttttcagcgcgaagacacttatcttagccgaaaaatttacacattgttttcagaaatgtcccctatattcatcggttacagcttaaccgacccaaatataggtttcctttatgaagaagcattagcacatctgcatggaaaaaacccgccagcattcatggtaattcacccagatgcaaaccctttaactttcgaggagacaaagtatttatttaaatcaaaaaatatacacctgattaaagcaaccatagaagacttccttgcagatttatctcaggaatataaatcctttaaagaatcacctcatcgtttcaaccttgagcacgaacatgttcttcccaaaataaaaactgtaatggataccgttacgaaaggaaaaaaaaataaaaaagcggaactagaagccttatgtcctcaaagagctgcaagctgggccgtgacaaaagccataattgacattctaaagaaaccaatattgtacattcaattcggcggaaaacttctttctccagacaatattatcccctacagagagttcgatgctttagttaatgtagtcataacacttagcaacaatcacggttaccctgacgagcttatacgtcaagattttcatgcttctgttgtcaaaatgtgcatcgaaacagaaggggtttgggacttcaactatgctgaagtacctttctctaacattttaagaataagccctagccccggcactgaaagtttcgacaaaaaaatatcccatataatagaaattatgcgatggtcgtccccatctgaaatagggaagtgctgggcaacatggaatgtatttaaagaaaaacaagattggattagccacagtgatattgttggcattctttcgaaacttgaaaccgatggtgacttagaataccaacccagagataaaaaatggctaaacatcctgaaaaaatgccctcacgcaacggctgcagatatcaagagaattgatactctgataaccccagcttag

SEQ ID NO: 271524 - DNA, 579 bp, Klebsiella pneumoniae; identical to SEQ ID NO: 10927

SEQ ID NO: 271525 - DNA, 360 bp, Klebsiella pneumoniae
atgacgctttatatcgggatgaacaataccagcggtaaagtcattactgatattgaccatctgcgccagtcggtgcgggacattctgctgacaccgcagggtagccgtattgcccgtcgggaatatggttctctgctgtcggcactgatagaccagccacaaaatccggcattacgcctgcaggtcatgtcggcagtgtatgtggcgctgagtcgctgggagccacggctgacgctggattccatcaccattaacagcaattttgacggttcaatggtggtggagctgaccgggcggcgtaataacggtgtgcctgtttccctttccgtatcaacaggagcagagaatggcagtgattga

SEQ ID NO: 271526 - DNA, 1026 bp, Klebsiella pneumoniae
atgccgaattttgatgaattaataagcaaagttaagaacattcaaaatggaataacattatcacttgaaagttttttatcaggtgatatcaagtcagcatatgaccactttgataaaacattctctgataactcaacaatccaacacatacatcgcatcactactccactcagtagcatttgcaatcataaaaaaccattatttcgagttagaaaaagtgaaaatcctctaacgtcaagagatgaaattttccatattccattctccaatagacattttgttagtgcacaaagatattcagtcgctggcttaccatgtttatatcttggcacttcggtttatgtttgttggcaggagatggaaaaaccagattttgacaagctttttatttcatcatttactaccagtgaaactgaatataaagtcttaaactttgcatcacagcttttgttacatccctcaccagattacgctgacgaaaataaactagccgaaacaaatagagtaaaggcctcttatctcattttctggcctttaattattgcatgtaattatttaaaaaatcatcgttctgcaacattcatacaagagtacattatccctaatttgttgatgcaatggattagtagaaaaacttactcgaaaattgtcggtgtagcttacttctctacaaaaatgcctaattcacgattaagtaaccgctcaataaatgttgtatttccacccaaagttacatatgaacaaacggtaaaacaaaatttttgccctaaactctccacattattcgactttacgccacctatttcgtggcaggtcttaaaaacattagatcattcatcaataacagaaaattcaatagaattgatgatgtcaaagagatatcttcaaagtcaagaaaaactgtctggaattaaaaacttcgaagaggacattgtaaaactataccccttaactgatttttacaaactcgaaagaagtattgatatgctatttgaatataaaaagatagataaccccacactataa

SEQ ID NO: 271527 - DNA, 615 bp, Klebsiella pneumoniae
atggtggacagctgggaagtctggaccgactttcatgcactggccctgcgcccgtttggctggcgcgaagtgtggatcggttatgacccggcaaaaggtacgcaaaacggcgacagcgccgggtgcgtggtggtggcaccgccagccgtgccgggcggtaagttccgcattcttgagcgtcaccagtggcgcgggatggacttccgcgcccaggctgacgccatcaaaaaactgactgaacagtacaacgtgacatacatcggtatcgactcaaccggcgtcggtcacggggtttacgagaacgtgaaagcgttttttcctgccgtcagggagtttgtctacaaccccaacgttaaaaacgccctggtactcaaggcctacgacattatcagccaccgccgtctggagtttgacgccgggcacaccgacattgcgcagtcatttatggcaatccgtcgcgctaccactgccagtggcaaccgcccgacctatgaagccagccgcagcgaagaagccagccatgccgatctggcctgggcaacaatgcacgcactgtttaacgaaccgctgcagggcgagtccgccaataccagcaatattgtggagattttttga

SEQ ID NO: 271528 - DNA, 1032 bp, Klebsiella pneumoniae
atgggaaggagtaagaagaaccgcgctgcgtcgacgaaacagatccagcataaaagccagacttcagccgaagcattcagcttcggtgatcccgttcctgttctggaccgccgcgaactgctggactatgtggaatgcgtacagatggatcgttggtatgagccgcctgtgagtttcgacggactggcgcgaaccttccgcgccgccgtgcatcacagctcaccgattgcagtgaagtgcaacattctgaccagcacctacatccctcacccgctgctcagccagcaggctttttcgcgttttgtgcaggactatctggtttttggtaacgcctacctggagaaacgcacgaaccgcttcggtgaagttatcgcccttgagcctgcactggcaaaatacacccgacgcgggttagacctggatacctactggtttgtgcaatacggtatgacaacccagccgtatcagttcacgaaaggcagcatttttcatctgatggaaccggacattaaccaggagatctacggcctgcccggttatctttctgccattccgtcagctctgctcaacgagtccgccacgctgttccgccgcaagtattacattaacggcagtcatgcaggcttcatcatgtacatgaccgatgctgcgcagaaccaggaggatgtgaacaacctccgcaatgcgatgaaaagcgccaaaggtcctggtaacttccgtaacctgtttatgtactcgcctaacggtaaaaaggacgggcttcagattatcccgttgtcagaagtggcggcgaaggatgagtttttaaacatcaagaacgtgagccgggacgacatgatggcggcgcatcgtgtgccgccacaaatgatggggataatgcctaataatgtcggggggtttggggatatcgaaaaggcaagcaccgtatttgtacgaaatgagctactgcctctacaaaaaatgtttctagaaataaataattggttaaacgatagaattataaatttttcaacctacgaactaaaaatttaa

SEQ ID NO: 271529 - DNA, 123 bp, Klebsiella pneumoniae
atgtgctatcgctggcgtatcatattgctctgcagagatatagttttctacccattgaagcattacatcctgaatgagatactcatcatcataaccaagatctttgtttttcttaccaattaa

SEQ ID NO: 271530 - DNA, 429 bp, Klebsiella pneumoniae
atgacaaatttctattcaccgtcagaaaacatcgcatacccggatgggcttatggcatcgtataaagaggcgggaacattacccgacgatctcattgagatcacggataatgcatttcaggagtacttcattgagcttccccctgcggggaagtaccgaaccgccaacaatcggggtttaccagagtgggccgatataccatccccaaccaaagagtccttggtggcgatggctgaatcagaacggcagagccgtatgtcagtagcgactgccattattgatccattaaaggatgcagtagaaatggatatggcaaccgatgaagaaaagagccgctatgatgcctggcgaaaataccgcgtattgctgacgcgcgtggataccgcgttagccccagatattgactggcctgaacctcccaaagattaa

SEQ ID NO: 271531 - DNA, 1110 bp, Klebsiella pneumoniae
atgaatattttgattagtcatctcaagactaatattaaagaaataaagttaccagaaatcgatattatagaagtcagccgtctggctaccttcgcgccgtctctacaagaaattagcataaaagagatgatgcgtgtttggaatttatatagcacacagtccattagctctttattcaagacccttaacgttgcccctgaaacattccagagtttcatcgacaaatatgggattcctgcagatgaacagatccaatatccatggcaggacagccgtattcagcaactttttgacgactcgggtttcaaagagacgctctggcagcatgtgatgcagcaaagagctcttttgaagaactattttgcgacaaaaggtctaactgatgatatcaatgcgcgtatttgcgtagtcgatgtcggctggcgtggcaccattcacgataatattgctcttctttatcctgatattcattttaccggcatatatctgggcctgcagaaatttctcaacgagcaaccatcaaacacatcaaaagttgcttttggcccagatttgaatcaccaactggagtatcctcattttcttgattccgttgctcctattgaaatgattaccaactccccttcaggtagcgtaacaggctatgggctggagaatggtaagatagtcgctattcgcagtgttaacgacgacgaaaacagcgcgtggcataatttcacaaaaacatttcaagaagggatcctggccggtatggaatccttctccgctgcagtgttgagttatggcattactcacgacgttgtacgtggctacgccctaaatatttgggatgtgctaattagtggtagtaataaatctctaactgacgcttttaataatttaaatcataacgaaacattcggcttaggtggatacgttaagaaaaaccatgtaccctcgaccttcgagatattaagctctttatggaataaaaacaaccgtgcagcattgattgaatttattaaagcaaatcaatggagcgatggcatacgtaaaagagacaatctgccctcgctaaataaatacattttagggaaggtgcgaataagcggggaaattcttctcggctga

SEQ ID NO: 271532 - DNA, 1044 bp, Klebsiella pneumoniae
atgtttatgaatccactggcagcactgcgcggtggactggctgccacaggcacggtgctgcgagtactggcatctggtccactggcgatgttgcgcgttgccctgtatgccgtatctggtctgttaggtgctctgctcagtccgataggtcttgtggttgctgcactggcgggtgtggcactggttgtctggaaatactggcaacccatcaccgcatttctcggtggcgtggtggaaggattcaaagcggcggcaggtcccatcagtgcagcgttcgaaccgcttaagcctgtgttccagtggattggcgacaaagtgcaggcgctgtggggctggtttactgatctgctgacgtccgttaagtcgacctctgccgaactgcagagtgcagcggcaatggggcggagattcggggaggcactggcggaagggctgaatatggtcatgcatccgctggactccctgaaatctggcgtttcctggttgctggagaaactcggcattgtcagtaaagaggctgcaaaggcgaaactgccggaaagagtgacgcgtcagcaacctgcgacggtgaatgcagacggtaaagtgatgatgccatcgggtggttttccgtcatggggatatggctttgcggggatgtatgacagcggcggctatatcccgcgcgggcagtttggcatcgtcggtgaaaacgggccggaaattgttaacggcccggcaaatgtgaccagccggagaaatacagctgcactggctgccgttgttgccggaatgatgggtgttgctgccgcgcctgcagagcttccaccgttgcatccgttggcacttcccgcgaaaggcggcgaagcgatgttgagtcgtgcagccactgtgccgcccgttcaacggattgaggcaccgacgcagatcatcattcagacgcagccaggacaaagtgcgcaggatattgcgcgggaggtggcccgccagcttgatgaacgtgaacgcaggctgaaggcaaaagccaggagtaactacagcgatcaggggggatacgacgcatga

SEQ ID NO: 271533 - DNA, 126 bp, Klebsiella pneumoniae
atgctgctccacctgcataatgtcgagtgcataggaattgtcagagtatatattaggattattaggttcgagttcttgcaggaaactaaggatactttttttttcattttgaataatactgaatga

SEQ ID NO: 271534 - DNA, 201 bp, Klebsiella pneumoniae
atgctgacgaaagaaccatcatttgcatcgctgctggtaaaacaaagcccggcaatgcactacggtcacggctggataatgggtaaggatggtaaacgctggcatccgtgccgttcacaagatgaattgctggcagaactatcaacgaaaaaacgggggaacaaatggctattgaaggcgctgcggcgactgttccattaa

SEQ ID NO: 271535 - DNA, 348 bp, Klebsiella pneumoniae
atgaacaggatgagcatcgttatcctctgggcgctggcgctgctggtgctccagccggcgctggccgccgaaccgcgacagcagccaaccgcgcgcgagcaggcacgcacggtcacgattttccaccaacctgtcgtcatgttgcaggttacctttggccagaccacgcccgaagagcgcgttttgcgcacccgcagcgccctgcgcgccttcaccgaagatgatattcgccagccgctgcgggtcgtgccggttatccgctatggtcagccaggcagactgtttctgatgaacggcaaaccggtgctgctgctgagccaggcggatctcgacgagggcgatgattaa

SEQ ID NO: 271536 - DNA, 165 bp, Klebsiella pneumoniae
atggctggcatgagaagaggcgaggaacagaatggtattggcgatctcctgcgggcgggcgattttacccagcgggatgccgagcttaaactgctcgccgaagccgcggatccgctgctgctctgcatcgtcgctgacccacagggtgcgctgcatcgtcgctga

SEQ ID NO: 271537 - DNA, 1269 bp, Klebsiella pneumoniae
atgagcgagttgagttatctggaaaaattgatggatggggttgaggttgagtggttgccactctcaaaagtattcaacttaaggaatggttatacaccgtctaaaactaaaaaagaattttgggcgaatggtgatataccttggttcagaatggatgacatacgtgaaaatggtagaattctagggaattcacttcaaaaaatttcatcctgcgccgtaaaaggggggaaactatttcctgaaaattcaatattaatatcaacgtcggcaacaattggtgagcatgctttaatcactgtacctcatctagccaatcaaaggtttacatgtttggctttaaaagagtcttatgctgattgctttgatattaaatttttattttactactgtttttctttagctgagtggtgccgaaaaaacacaacgatgtccagttttgcgtctgttgatatggatggattcaaaaaatttttaatccctcgcccctgcccggataatccggaaaaatcccttgctatccagtctgaaatcgtccggattctggataagtttactgcacttacagctgaacttacagctgaacttaccatgcgcaaaaagcagtacaactactatcgcgatcaattactgagtttcaaagagggtaacgttgcgtggaaaacattgggggaaatttcgagaaagatttcatccggaggaaccccaaaaactggggtgactgaatattatgatggcactatcccttggctgagaacccaagaagtggattttagggagatatgggacacggagataaaaatcaccgaagaaggtttgaaaacctcaagcgcgaaatggataccaaaggattgcatcataattgctatgtatggagcaactgttggtaaaattggcattaataaaatcccaatgacaactaatcaagcatgcgcaaatattcaacttgacgaagaaattgtacattacagatatgtgtttcatttcttatgcagtcagtatgcatatattaagtcacttgggactggctcccagacgaacataaatgcgcagattgttaaaaatataaaaatcccggtcccttttgcagaaaaccctgaaaaatcgcttaatgaacaattacgtatcgtcaatatactcgataaattcgacacattaacaagctctatcaccgaaggcttaccccgtgaaatagaactacgccagaagcagtacgagtactatcgcgacttgttgttcagcttcccgaagcacgaaacaactagcaactga

SEQ ID NO: 271538 - DNA, 141 bp, Klebsiella pneumoniae
atgaatcagctcgccatagagcgcatccgggagcgctggcaaaagctccgcctctgccggcaccgcggaacggtgatgaccgactatcgaatactgaaaaacttcgtccgcatctatcagaccctgggagagaatacatga

SEQ ID NO: 271539 - DNA, 801 bp, Klebsiella pneumoniae
atgacaagaaaccagcaatatcacatacttgcagatttttttgttgatatctatgcgtctattttaatattcaaaggaatccatgaagcacggggttcgaaggaaacaattgattttctagatgattggcatgaaagaatgtcattattagtaatgacatattgcgtattatcaaaagatattgaaaaaattgaaaaattatacttccttactgccaccttactaaaacaaaaccctaaagcaacccaaccccatcggaagatgattctttcaacttttcctgattttgaggaagccctaacagaaatagagaatcatgttatccgtcttgacagtcaaaaagatttttatgatcttacaactgaagagcaaaaagaatacttcttgagtatggccaaaaatctaggaatggatcctgatgacccacaaggagaatatcatgaattccttaaaattggatttgctaattatgaccccacaaatataatgaaaaattgtgagtatttatttgttcattatcgccctggtggagtatttgcccaatcattaagaatgcattctctaggtggtatgcatcttttgatctgcttaaaacaccgacatgcacaaggaaccggaaatttattaagtcaattatatgatagtactggtagctatgatttcggtaatagtttcaaacaatcaaattgtgataactgcacggattgtaaacccagagaggatggctggtcatggagtctcaaatggtattcaaaagaagtcgaacgttataaagatcttcttaataagtataaattttaa

SEQ ID NO: 271540 - DNA, 615 bp, Klebsiella pneumoniae
atggacgctcaggactatgggaaacaggtcaacttcgcggacggcccggactatgggaaacaggtcaacttcacggacggcccggactatgggaaacaggtcaacttcacggatggccgggagtgtgggaaacaagtcaactccgcggacggcccggactgtgggaaacaggtcaactttgcagacggcccggactgtgggaaacaggtcaactttgcagacgtccgggactgtgggaaacaggtcaactccgcggacggccaggactgtgggaaacaggtcaactttgcagacggcccggactgtgggaaacaggtcaactttgcagacgtccgggactgtgggaaacaggtcaactttgcagacgtccgggactgtgggaaacaggtcaactccgcggacggccaggactgtgggaaacaggtcaactccgcggacggccaggactgtggaaaacaggtcaactttacagacatccgggactgtgggaaacaggtcaactacgcggacagccgggattgcgggaaacaggtcaagttaggcaagcactatgggaaatacagcaattttagtatccccccatatgtcagcaacaaactaagggggaggaaataa

SEQ ID NO: 271541 - DNA, 672 bp, Klebsiella pneumoniae; identical to SEQ ID NO: 146323

SEQ ID NO: 271542 - DNA, 498 bp, Klebsiella pneumoniae; identical to SEQ ID NO: 146054

SEQ ID NO: 271543 - DNA, 141 bp, Klebsiella pneumoniae
atgatgatctcatatcaggaacttgttcgcaccttccttagtaatttgcttcacatgttacaaggcaaaaaaaacaatgagttgaatgctttacagctcaactcatttatcttcactcgagtccgtaatataaaagagtaa

SEQ ID NO: 271544 - DNA, 1467 bp, Klebsiella pneumoniae
atggctacagattcaaatggtcaccaacaggttggcagcattactcatgaggtttatatagtgttaagacacaatgtgaaatgggtatcactgtctcagtgctttaagatatcttgtcagcttttaggtttggttgtttttgctcgctacctaacacctgaagagattggggttatgtcgttgactcttgtcgttgtgaactttgtaaatatattacgcgatatggggtcttcagcggcaattatacagagagtgtatattgacgataggttgaaaaattctgtttttgtatttaatgtgctcattggttgttttttattttttattttttattttttatctaatgatatatctagtttttttaagaaagtggagttggcaggcacaataaaagcaatatcctttgcatttatatttaacagtgtaacgtcagtgcaccttgcattactggagagggcgtcaaaattcaaagttgttgcgattatagaatcattctcatcaattatttcacttctttttggcattgcattagcaattaaaggttttggtgtatatagtttagttgggcaaacattgatgtattctctgctgacatcaattatgtttcatatgttctcaggatggaaaccggcatttacatttgactttagggatataaagtcaatatttaattttagttcaaatattgtcgcatttaattttgtgaattttttttctagaaacagtgatcaaataataataggtaagtttttttcagcttcaatacttgggcaatattcaatggcttataaagtaatgctattcccaattcaaagcgtaactgcggttttaacaagatcattgtatcctgtgcttagtcgcttgcaggaatcaaaacaagatgcattatcagcataccttaatgtattaaaagtaatttcattagttgttactcctatgatgcttggtctttcatcagttagtcatgaattagttaatatcgcttttggtaaacaatgggtgctcctgccaaatttactgacgtggttatccatagtaggtattttacaggcaatggtaagcactacaggttctgtatttatgtctcaaggggatgctagaacattatttataatatcagtatttaactctattttgcaggttggctcatttattattggtgttaattacaatatagaaacactggttattttatacatgatagctaatttcattatgtttttacctaatatgtatttatccgtaaaaactcttaatggtagcattcttgatgtgttgcgctgtgtttacaagcctgttttttcaggggttattatgtttatttcaataaaggttctgtcttgcttttctttacatttttccaatgtgagttttttacttatcaaaataggttttggttttcttgtctatacgtcacttattctttttttggatagaaagttagtgaagatgatatttaaaatgtaa

SEQ ID NO: 271545 - DNA, 501 bp, Klebsiella pneumoniae
atgacctgcttattcgcaccttccttaatacattatccattatgtaatgataaagtgtataatgcagacattccatatacttttaatgtcaatgataaaattatttcaattgggtctgggttagttatttataaaagtcttgttgaatgtttcaggaaagataatctaaaactttttgatgagcgttatgctctctacggagtcgattacagtttttttcgtaggattcaaaggataaaaaaacagtatgatattcgggtccaaatctttagcacattggaacactctctttcaaaaacaaatacatccttctccgaatggcggcatcgtgaacatttatatgattatgcaatttcgtgtcgcttttattctaaatctggtattcatatggttttgggaatgacaagatgttttcttagagagataataagctgtaggtttaacaatttgaagttgcttactttaacttttattaaagggcatcatccccgaagtcattaa

SEQ ID NO: 271546 - DNA, 723 bp, Klebsiella pneumoniae
atgcgtgatctgatccttcaactcagcaaaagttcgatttattcaacaaagcctaatcaaagtaaaaataatggcgtgaggataagtgatatattaaattgggcaaataatgcagataaaatacgaaataaaattataatacttgactgttgtcaatcaggtgcagccggacaaatcaggaatttaagaggtggtgaatctctaatttcagatggaagcactattttaaccgcatgtcaaagagatgagtttgccatggaggaaaatggtcatggtatatttactacattaatgttagaagccttgtacggtgccggagctaatatattaggatatgttactccggggagtttatacagctttgttgaccaagctttgggtgagtgggagcaacgacctgtatttaaaactaatgtttctaggtttgttatcttgagagaaacaggtccacggatttccttagacacgctcagaatgttaccagtatggttcaaatcagaatcggatatttttgcattagatcctgatttcgaacctgattcaccgactccatcggatgaaaaaactgcaattttcaaacagcttcaaaactgtaatcgacacggaattatagagccggttgatagcgaccatatgtattttgcagcaatgaattctaaaggttgtcgcttaacagctttaggcgtttactatcgtaagttagcagaaaaacagcgaatttaa

SEQ ID NO: 271547 - DNA, 1068 bp, Klebsiella pneumoniae
gtgattcggactctgacagcgactcggattctgacagcgattcggactctgacagtgactccgattcggacagcgactctgactccgacagcgactccgattctgactccgactctgattccgacagcgattcggattccgacagtgactccgactccgacagcgacagtgattcggattctgacagcgactcagactccgacagcgactccgactctgacagcgactccgactctgacagcgactccgactccgacagcgattcggactccgacagtgattcggattctgacagcgattcggattcggactccgactccgactctgacagcgattcggattccgacagtgattccgactctgacagcgactctgactccgacagcgattcggattccgacagtgactccgactccgacagcgacagtgattcggattctgacagcgactcagactccgacagcgactccgactctgacagcgattcggactccgacagcgactcggattctgacagcgactcggattctgacagcgactcggatgctgacagcgattcggattccgacagtgactcggactccgacagcgactcggactctgacagtgactccgactcggacagcgattccgattccgacagcgactcggattctgacagtgattcggactcggacagcgactccgactccgactccgacagcgactcggactctgacagtgattcggactcggacagcgactcggattctgacagcgactccgactctgacagtgattccgactccgacagcgactccgattccgacagcgattccgattccgacagtgactcggactccgacagcgactccgacagcgactccgactctgattccgacagtgattcggactctgacagcgactccgactcggacagcgattccgactccgacagcgattcggattctgacagtgattcggactctgacagcgattccgactccgacagcgactcggattccgacagcgactctgactcggacagcgattcggattctggtaagcgttaaccggacgccgtattga

SEQ ID NO: 271548 - DNA, 216 bp, Klebsiella pneumoniae
atgagcgacttcgagtttactgatgatctgtgtgctgatgaggttttcgttcctacccaagtagagcttcccaccattgagatctatgcgacttgcgataatgtgtatgtgctggccatcgtcgtcatgaagcacatagcaacggagatgggtatcactgaatcccattcgtttcatatagtcatctgcgatactagaccactgttcattcgttag

SEQ ID NO: 271549 - DNA, 441 bp, Klebsiella pneumoniae
atggataaacaaacaacaatgtcttgcattgctaataacatcacacctttatcaaatgaatcttcaaattttaccagtctaatgccaaaaacacttagaactcattgtgtaagtgttcggcttaatgacacagaacttcaactgctcaacgctaaacgcggtcctacgtctaaaggccaatggttaagaatagcttcacttcagaaactccccactatcgtgcctactgtaaacatcgatacatggaagactctgggtgagatcaatcagaagctaaaccgtattgctctccatatcgacagtaagagtaaagatagccagcttactcatacagaacttttcgctgtgaagcgacaactggaagagcttcgcacgaatcttttaagtgacagtatatggagcctcccgaatgaagggtatgcgaaagattcgcaggggtaa

SEQ ID NO: 271550 - DNA, 2157 bp, Klebsiella pneumoniae
atgacagcagaaatgacaaataaaaattcatcccaagaagcggatgagatggatttagggcgtctgattggtgagctaattgactatcgcaaattaatatttgcgataactgtcggtttcactgggataggtattttgtatgcgttctttgctactcctatatatcaagcaaacgcacttattcaagtagaacaaaaacaaggcaatgcaattttaagcagtctaagtcagatgctgcctgatagccaacctcaatcggcacctgaaattgctttattacagtctcgtatgattttaggcaagactgtagatgatttaaatcttcagacgaaaattgaacaagattactttccactgttaggaaaaggtttttcaagaatattaggccacaaagaaggtaaggtttcgataggtaatatttctttgccagaaagaaatgaagaaattactgaattagagctgactgtggttaacgacaaaacatatgaaatatctggtaatgatttctctgcaatcggaaaagttggggaaacattacaaaaacaaggctatgagattcttataaatgagattaatgcagaacctggcactcgtttttcaatctcatacttatctagactcaaagcaatcaataatctccaagaagcgtttaatgtcgcagaccaagggaaagatacaggcgtcttaaatttaaccttgacaggtgaaaatcctatattagttgcaaaaatccttgatagtattagtcaaaattatcttgctcaaaacgttgcaaggcaagccgcacaagatgcaaaaagtttagaatttttagatcaacaattaccaaaagttcgaagcgatctagatattgctgaagataagcttaatgcttatcgtaagcagaaagattctgttgatttaactatggaagctaaaactgttcttgatcagattgttaatgtagataatcaacttaatgagctaactttcaaagaagctgagatctcacagctttatacacaagagcatccaacatacaaagctttgatggagaaaaggaagacgctgcagcaagaaaaatcaaagttaaataaaagagttagttcaatgccttcgactcaacaagaggtattgagactaagtcgtgatgttgaatcgggacgtgctgtttatttacaattattaaatagacaacaagagctcaatatagctaaatctagtgcaattgggaatgttagaataattgatgatgcagtgcctcagcctaagccagttaaacctaaaaaaatagtagttgtccttgtaagttttattcttggtttattcttttcattatcatttgtattgttacgtgtcttcttacgtcgtggaatagagtcgccggagcagttggaagatataggaataagtgtatacgcaggtattcctgtatcggaatccttaagtaaggataacaagcgctctggcagtaagcgtaaacaagaaagttcagtcttgcttgcacttgaaaaccctgctgatttagcaattgaggcaataagaagtctaaggacaagtctgcatttcgctatgatggaagccaagaataatgtattaatgatttctggtgccagtcctaatgcaggcaagacttttgtgagtagcaatctagctgtcatcatggctcatgcaggaagtaaagttctgtatattgatgctgatatgagaaaaggatatgcgcacaagctctttggatcagaaaaaaacaaaggcttatccgatattctctcaggaaaaagttcagtgaaggatgctattaccaacctaccgaatgctggtttcgattatatttctcgtggtcaagtaccaccaaacccagctgaactattaatgcatcctcggtttgaagctctgcttggtgaagtatcaaaaaattatgatttaataattgttgatactcctccaatattagcggttactgatgctgcagtcattggtcgctacgcgggtacaacactcattgttgctcgattcgaaaaagatacagtaaaagagatatctgtaagtatgaaacgtttccaacaatctggcactattgttaaaggttgcatactgaatggaatagttaaaaaagcaagtagttattatgggtatggatacaactattatggttattcatattctgacaagaaatag

SEQ ID NO: 271551 - DNA, 195 bp, Klebsiella pneumoniae
atggcagtaaccagcaaaaagccgattcttgtcgatcagccgattcttgtcgatcagccgattctcgaaggtttacagcgccttcgggatgatgaatgccgacgttctgccgttggcgcagccccaagcattcaggagctggcgcgtcaccttttacgtcaggggattagtagacatgaaacaaataaaaagtaa

SEQ ID NO: 271552 - DNA, 495 bp, Klebsiella pneumoniae
atgaactttcagcacctcaacaagcagcaacctgatgcgcatgcatatggcttttccgggcgccgtatgcagcgtatgcaccagcttcagcaatcgcttgaagaagaggaactccctgaatgcccccattctgatgcgcatctgatagcggtgagcaaagcggcaaaacaaaatccgatacaggcatttcatcttatcgcggaagggatcccacatcagaaggctattgccagactacagggtagtgttcgccagttaagtctgtttacccggagaaccatggagaaattttaccctggctgggaacttcttgatgccgaagatcagaatatggttgcgttccaatacagcatgattaatggagacattaatggatatctgtcgggttttaatgctgctttattagcgctggaaaattatgtagagccagtaaatctggaggatatgctttctttacagcgcagataccaatcaaaggatattcaaaatgcgtaa

SEQ ID NO: 271553 - DNA, 831 bp, Klebsiella pneumoniae
atgcgtaagattagctcggtaacagatactgcggatagcaatggtgaattcactgacggtaatgttgctaatggtatatctccaacaatactttccgcgggtatttttaatacttggcaaagggaacttgtgaatatagttgagagtgcgggaataacgctcagcaatgaagacgatggtcaaattttaaaagcaattcaggatatgtttggcgccgggcgttttctcggtcagaaagtgtttactgctaatggggtttatatcccttctcctttagttaagagtgtgcgggtgattcttacgggcggtggtggcggtggcggtggatgccaggccagtaataataatgaaacattttcgggggcgggcggcggcgctggtggaactgttatttcttgggtcaatctggatacctccaattcctatattattacagttggtgctggtggtgatggcgcttctggtgctgatagtggtcgagatggtggtacatcgtcatttgccaatttattttcagcaccaggaggcaaaggaggaagcaaagctgctgtatctaatacagcgggcggtgctggaggagctccatctacgggagatataaaaattaacggtggtgcaggctctgatggacaggccagtactgtgatgttaacagggaacggagggggatcttacttcggtggtggtggtcgtgctggttccggcggcggagtgagaggtacagcgccggggtctggtggaggtggtgcatatgatcttggttacagttcgataaagatgatggggggaggtggcgcttcaggaattgttattattgaagaatattcctga

SEQ ID NO: 271554 - DNA, 168 bp, Klebsiella pneumoniae
atggataccattactgtaccgttccacggcagcgcactctatgttgttaaccacaatggtgagctttataccccaatgaagcccattgttaaggggatggggatggggatggaatggatggtacgcgcaggccgaagccgaaacagcgcgctcctaagctgctggtga

SEQ ID NO: 271555 - DNA, 180 bp, Klebsiella pneumoniae
atgccgggtagcgactcgccatacccggcctggacgatgcatgctgtcggtagcggtttgataccgccaacccggtcaggcgacgcgccgccggggatgcgcttacttacgggtgagtttttccagatcggcttcgatttcgctgatcttattggtgaccacgctttccagatggcgtaa

SEQ ID NO: 271556 - DNA, 201 bp, Klebsiella pneumoniae
atgatcatcgatcgtgaaaataaaccgaagtatctctacaacctgaagaccgatcgttacgaaacgctcaatcagattggcaaacggccggatattgagaaacaactgtacgataagttcctgaagtataaagcagacatcgataacgattcgttaatgaaagcccgtggcgataagccgacaccggtcacctggggctaa

SEQ ID NO: 271557 - DNA, 525 bp, Klebsiella pneumoniae
atgcccggtggcggctgcgccttaccgggcctacgagctgtctctgcccgctccgcaacgatccgggccgggcaagcgcagcgccgcccggcaacgggcagccggctctgttgccggcttaatgcccggtggcggctgcgccttaccgggcctacggctgtctctccccgctccgtaacgatccaggccgggcaagcgcagcgccgcccggcaatgggcatcagcccggcaatgggcagccggctctgttgccggcttactgcccggtggcggctgcgccttaccgggcctacgggttgtttctgcctgctccgtaacgatccaggccgggcaagcgtagcaccgcccggcaatgggcatccggatttagctgccgcggtaggtcgaccacccgcccggggctatcagaaacggcagatggaaatggtcatctgtcgcctcgccaatgacaaaatcaatctgcgcccgggtaaaaacgctctcgcgcccgatgcgggcaaaccacgcccccgtttccgcggttaa

SEQ ID NO: 271558 - DNA, 837 bp, Klebsiella pneumoniae
atggaaatagtaggcgattttagtgatgttaccgcacttcaaaaatatatgagttttgcaaaattcatggacctgattgaaacaaataaaatattcctttcgaaagcatctggttttgaagataagaatgaaggtggtttaagtttagaattcaggtttttgaatgatggtagtgcaatgatgttagatgttgcaatgaatcatatatttccgagtgttagaaaattatctccagaagaaagggttgaacatgaaaagaaaacagagcaattatttgaagtaatagaaaaaagaattaatagtactgtctttggagactttcctaataacgaatttagctatgatgatattaacaagcaatataaagaatggattgatgtgagctgctggcatgcaaacatgcatgagagcatggcgatgtggaaaatttatggtgaatcggaaagttcggtatgcatagttaccaatcttgaaaaaataaaatcaagttttatcccgcctgacggatataagatgattatcgctaaagtcgaatacatatcgcacgatactgattcgtttaaaattgagcacaagttagctcctttcatgcacaaatcgaacttttatacatatgaacaagaagtcagaattattggttataactctttttgtaagtttaaagaaatgagagctgattttggtacaaagataaaactagatatcacaaatttaatacaggagataaaagtatcgccttatgcacctaactggttttttgaattggtaaaatcagtatgtaaaaaatatgacttagatataccagttaaccgttcaaaaatatatgggagtttataa

SEQ ID NO: 271559 - DNA, 402 bp, Klebsiella pneumoniae
atggacagtacgcagaaaagaaatatcaaaaaggttatgcaagctcttcatataacatccaacgaggatttcgagcttgtaatggactatctggcatcagaactgcaaccagagccaacagaaagcagagctgagaaggaggaaacgttaagatacactgattctcgtaagccgccttctgagcgtgaaaaacatttgtacaacatcaatgcgctagctattcactatgaatttatttacagcgtctggcgccggcagctctatccgtcccttaaagccatagattcgccgctagcaagcaaactgtatgatcggttcaccgacggtagcgtcttccttatgaatataaaaaaaatggcagagaaacaactccttccaggtgaagaagcacgaatagactga

SEQ ID NO: 271560 - DNA, 498 bp, Klebsiella pneumoniae
atggatatgaaagaaccatcagagcaagaattgcgagattttctcattagaaaatatcttgatgaaaaaatagatcctgatctcgaaccacattatgcgtacatgaccgagatgatgcatagatacaaacaggaattaatggagattaatgctgatactttttttaaatttttgtcagaaaaaggtgttgcaaggaaatgcgcggcatgtggttccgaaaaactaacagttcctgaggtgaaggagcttaaagctaaagatactcctgaaagctttgatcagctcaatccatttgagcaagggttcttaatgggctttaagggtacaacttatgtgcaatatgtttctttagaaagaaatgatcatcccgctaacattgagaaatcttactacatggtacactgtcaaaattgtggaaacttgaccatgtatagaaccaaggtggtgcttgattggttcaggtccctgcaagataaatccgggggatctaatgcgtga

SEQ ID NO: 271561 - DNA, 567 bp, Klebsiella pneumoniae
atgagcgccgaaagaataccgacagcaacaggcacaacgacactaccccatttccagcgagccttatcctcaagcttgtcaaaacgtttatctattgctgcaataaattcgcttttgagattggcgatatctaatttaagttcgctctttgtattagatattcctgatcggagatcaaaaatatcagccttcagatcacctttaagttctgatatatcagcttttgtgacaaactgctctgaacgctctgtcaatcgcacaaggtcaagtttgactgcagacatgccgtcttcgagtttgtctactcgtttttctagattatcagtcacgttacctccacctccacctccgcgcttatcaatactatcaggccactctttatcggtggtagaggaaaataaatcttggacgttagtgtcacgcattagatcccccggatttatcttgcagggacctgaaccaatcaagcaccaccttggttctatacatggtcaagtttccacaattttgacagtgtaccatgtagtaagatttctcaatgttagcgggatgatcatttctttctaa

SEQ ID NO: 271562 - DNA, 741 bp, Klebsiella pneumoniae
atgctatccgtagccagcgggggcaatctcactactcgctatgggtcctatatcgacaccgatggccagttagccgtgtccgccgtcaatatcgataacggcggctcaatcctgggcgatgtcacaaacattgctttcagcggcaatacgcttaacgtcaccggcaacatccgggctcactccagcctgaccgtgcaagctataaaggatgacaacatcacttcggggaagatatataacaaaggtcgcattgaaggtaatgatgtatccatagtgactaacggtaatctggatcaggaggggaatattgttggtcaacattccctgtcgattaaaggcgatgtgatcgataatacttattatatttacggcgacacgctgagcatcgagagtaactacctgcggaacagggcaacgatcgacgggaatgctgtcaacatcaccgcgaataacggcatacttaatgagggtcaaatgatgagtagcggggacatgactctgtatacgcaacaaaccgctgacatcaccaactataaaacgattaaggcgaatggttccctgatgatgaccacccggtatgtcaaaaatggtggctaccgctgcggtttcctgaacctttcaatttgtaatgcaggttctctttctgctgataagttagtggtcaattcttaccataactacgcctctgacatgggtggtcgccagcagtataaacaggcagaaataaatactattcgttga

SEQ ID NO: 271563 - DNA, 126 bp, Klebsiella pneumoniae
atgacggcgctgggacgggtgggcgttcccgaggatattgggcctatgatcgccagcctgctgcgcgacgataaccgctgggtgaccgcccagcggatcgaggtatcgggcggacaaaccatctga

SEQ ID NO: 271564 - DNA, 528 bp, Klebsiella pneumoniae
atgactattaagaaactcgatgatggtcgatatgaagtggacatcaggcctgctggtcgcaatggaaagcgtatccgcaggaagtttgataagaaaagtgaagcggtagctttcgagaagcatacccagttcaaccaccacaccaaagaatggttatcaaagccgacggataagcggcatctgtctgaactgatacagctttggtggaatttgaaaggcaagcatgaggagcacggtcggataaaccgcaacaagttagatattttttgcaggattaccgacgatccttgtgcttttcagattacaaaagcgctgattagtcagtattacgcggcaagaagaagccagggcattaaagcttccaccattaaccgtgatctcaacagcatcagtggtatgttcacagcgcttatcgaggccgagttgttttcgggtgaacatccgatcagagggcggaagaagttgaaagaagatgtcccccgaaactggctatctgacagaggacgaaatcaagcacttgctctttaa

SEQ ID NO: 271565 - DNA, 1149 bp, Klebsiella pneumoniae
atgtcaaaaaaagatgatttctcattttttgtggatatgttcttttcatgtccgcatcatttacaggatggtatactttctttagatacttctgaccttccaataagcgtagaatcgtttatcgagttattgctagaaaatggtgtggttaccgaaatacacgagggtaaaaacgagctaacttttgcaataggcaatggcgctctatctaaggattcaactatttttccaagaatagaggcattttggcgaagggctcttgctgaaaggacaactcctgagaattatatcattctgaatgagaagattgcatccacaactaagtcagatatcattgagaaaattaagttatatcttaaatggaaagcggtaataacttcattatctgtacatgatattcccggcaaatcgatatggtatttacctgatgaaaatggcggaaaagaggtcgttatagctattacagattcgcttcaacaaattaaagagtacgctgttgacgaacgatcgttacaaagcgcaattaagattgagaacgttcttatgcttaatgacgctcagtcaactgaaagaacatcaatattaaaaaaagccataagtgatttttctggtaaagagtgctcatttgaaaacatagttaatgcaggtgaaagagtccttaatcgatataatgacttactagacttatatactaaaagattctcggtagataaaatattaaatgaaatcgagtcaaaaaacttggagtatacgacaaaaatcaatgactatatatcaagtagccaatctaaagctttcaccattcccggagctttaattgctgttggtgcacttgttaaggttagtggtttttgggatggcgtacttattcttattggcctgtatatgattttttttatagctaaaacagccaatgatgcgcaaagagaatcctacgacaatttagaacgaggtcttaaagagtcgttcgagcgttatcatcaatttgatgaaggaacagaggttcgtaaagctgcaaaaaatactcttcaagctttaagtggtaagataaaaaaagcaacgaatagactggatggaattgactcactcggacgatggatgttttttattgctttgggttacatccttctccagtggatttttcgttga

SEQ ID NO: 271566 - DNA, 1185 bp, Klebsiella pneumoniae
atggaagctaatgttctgatctgccccgcttgcggaagagaaaatagagttgaagaaggcacttgtgaatgtggttatgacgaagccttggaacaaggcgtggttcgttacgcccctcaaaatgcattaacagcaactctggatgttgttcagggagaagctgggccaaaatttgaagcaaacaccggcttgccttggacacttgatgttgatgatgtaaaagctttcctcgctcaaattgaacgtaaattcaaactgaaaagaaaaaaccatagttttattagtaagaatgttctcccacttagcacggcaactttacttggaaagtataataaaggaacaataacatttcctaagtttgttgaatcttttatgggcaatcttaaaaatgaagcagcattaagtaaaaccagaccagctggtggtgctgtaatttttattcactatcataaagacaacgaagaggatagtctgggtagagtatttgttattatggttaataacaacagtgttttcaatttcgatgatgacttagttccgagaaaacttccctctattgatatcgatgcattaagacaggctgctttaattgatttgaccctttttgatacattatatccagaaacaaatggcgaaccttatgtacagtttattactggtaagtctagtagtaatttctttaaggttgccttgggttgtactgaggaacttgataacaataaaagtattgaagaggtaaaacgtgctttattagatttttcaggccatatgaatctctcccctattattaaggttagacttcttcaagatttttctcagcttatggtggaaaaaaacaagagtacaacaaacaaaaccataaccctgaaagagcttgagcatatagttgataaggtattacctgaagcatcaaaagccaaaggtaagtttgaacagtttgctttacttggtgaatataaaattaatgaacatttcgagccaagcagagtttcacaaaagcaattcgagaaagttactctaaaagatactgaaaatgagtattcttgtaatatatccgttggtgttatcagcgaagatgtaaattccgaatcaaaagtaatttataataaagaagaagggaaattaataatacgtttatcagagtctgatataaaaagcatgaacgatgtctttggttcaaaataa

SEQ ID NO: 271567 - DNA, 654 bp, Klebsiella pneumoniae
atgaagaaagaagatggcatctcaaaatataagctcaacaaaatagccaccgaatcgttaagaaatactatacgacttcattttgactctattttactctatagaaatggatcatatcccagcgcatttcagctttccgtgttagctcttgaagagttttcaaaggctaactgggtggatcactatatctggacatctgaaacaaatgaaggctatccaaaagcaaattttgagcaggaatggcttaagctcctatatcaacatcctaaaaaacaatggaattttgtagcaagagaaacaaatgattattcaccaaaatttatatcattaatacaaagtagaaaactggaagaaaaaaaacaaaactctatatatgttggactatctcgtagcaaggggaaaatagatacagacagtagaatatccactccttggagaataaaacaaggagatgcaaaggaaattatttcaataatcaatgatgagttaataaaaatatgtaaaagaattgaagaagatgaattctactttgaaggagggaaaaacatggacgatgtattcgattacaaaatttataacaacctattaaaatggccacacaaaagtggaataaaaaacgaagggtggagaaatagaaaattcccacaaaaataa

SEQ ID NO: 271568 - DNA, 384 bp, Klebsiella pneumoniae
  misc_feature (195)..(204): n is a, c, g, or t
atggggatgacgcccctggaggggctgatgatgggcacccgcagcggcgatgtcgacttcggcgccatggcgtggattgccgcggaaacccggcagaccctcagcgacctggagcgggtggccaacaccgcttccggcctgctggggatctccggcctttcctccgacctgcgggtactggagcaggcctggcannnnnnnnnngtctttggccttgagatggacgctgcccgcaaccagcagcctaattcggccggcgagcgcctgatctccgccgacggcagccgggtgcgctgcgcggttatccccaccaatgaagagcgcatgattgccctcgatgcgatccgcttaggccggatccacaccgcggcggcgctggcctga

SEQ ID NO: 271569 - DNA, 645 bp, Klebsiella pneumoniae
gtggtgatcgaagtagtcgcggaatttggcgccttcctcttctttgccgctgacgacggtggagaccaggtgggcgtttttccacagatagtcacggaccttcgccagcagcgcggcgtcttcggcaaaacgctccatcagaatatagcgcgcgccatccagcgccgctttgctgtcggccacgcctttatcggcgtcaatatattttgcggcttccgtttccggatcgtgggacggttcgttccacagcaggtcagccagcggctccagcccggcttcgatggcgatctgtccgcgggtacggcgcttcggcttgtacggcaggtagaggtcttccagttcggttttgctgagcgtggtattgatggctttttccagcgcgtcggtcagtttgccctgttcagcgatggatttgaggatcgcctgacgacggtcttcgagttcgcgcaggtagccgaggcgggtttccagattacgcagctgcgtgtcatccagaccgccggtgacttctttacgatatcgtgcaataaacggcacggtgttcccttcatcaagcaggcgaacggcagcttctacctgttcggctctggcctgaagttcacccgcaataatgcggcagagcgaatcattcatcatggcttttaa

SEQ ID NO: 271570 - DNA, 210 bp, Klebsiella pneumoniae
atgagcatgattcaaaacctgattaaaaaagcgttcggtacttccaatatcaacgaagccgcaagctttctggccagcgcctgcaaccgaatgaaggcaatggataagcgcaccatcgaaggcgaagttttcgccgcccttaaaggtgtaaacttctcccgcgccggtgaatctgtaagtatcccggtaaagcggaccattcacatttag

SEQ ID NO: 271571 - DNA, 801 bp, Klebsiella pneumoniae
atgtgttttctttgcggcaatgatgtatcccagcacaacttcaatctgcttcagcagcgttacacaagcctggagttagaccacgactcgttgaaaaggcagcacagcgagtacgaggcggaaatccgcgcgcttaaaaatgaggtctccgccctgcaggagaaaattgtcgtgcgagacgacagcattgacgacaacggcgttgacaatgactgggggaacagtctggaaaacctgactaaagttctctcgcgcccgacgatcttttctatgttcaactacctgctggggaagatcggtgaaggtgattacaccctaaaagatcgggagaaaattacaagtgactttaaagagtatagcgagaatctgttaaagatagagcgagtcaccgacgtcaaagtcaagctcctgcagcagcgtaaatgggatgaaggtaagccaatacagataggttttgagattatcatggaacatctgcatgctcacgaaattgaggtttttaaatcaatggcgcgaggtgagtattccgatgcagttaaggcgagttcagaagaatggggctacctggaacttaatttcgacgacggtgcatgtgccctcttcttcattggtttcggcgtatttggcaatgacaatacgccaaccatcatgctgaatgtcgatgttttcaatgaaactctatcggaaagcaactttaaggtaccggcggaggtggaaaacctagtttcctgcctcagctatgagtgcaacatgaacaaatgggctaccctgaccgccgcgcaaccacagcgctttaggtaa

SEQ ID NO: 271572 - DNA, 429 bp, Klebsiella pneumoniae
atgttcaaaccagtcatgcttgctctggcttccctgacggctgtgtcattctcatctgtgggtaccgagttcgaaggtatccgggtcaagatcactgccggtgaccaggtgatgacggcaacgttttatgacaatgccaccacccgggctctggtctctcgtttcccgctgacgctgcccatggaagatttatatggacgtgaaatgtgctaccggttcccggatgcgctgcccgcaaacgaaacgaaaaccagcggttatgaagtgggagatattgtttactgggcaccccgccacagcttcgtcatcatgtacaaacagaacaatgaacagatcggtaatcttcagaaagtgggccgtatccactctggggttgggattttcaggcatacgggtaatatcgatgtgacatttgaaatggcacattga

SEQ ID NO: 271573 - DNA, 945 bp, Klebsiella pneumoniae
atgtcccacggtgcgaataatttctataaaagcgataaggtgaagactgaaaccgttaaattcaaaaatatttacggtatggaaatcaccggcacgttatttactccccgcactatggaggccggtaaaaaatatgatgcccttattgtcggccatccttttgccgcagtaagacagcaggctgctaacctctatgcaactaaaatggcagaagccggatttgttgcgctgtccttcgaccagtccttctggggagagagttcaggtacgccgcgtggcgccgtgctgcctgatgtttatgcagaaaacttcagcgccgcagttgatttcctcggaacgcgcgcatttgtggatcgtgaaaaaataggcgtgataggtatctgcggtagcggcggctttgccatcgccgcgacaaaaattgatccccgcattaaggcactcgcgactgttagcatgtacgacatgggcgaatatttccgtactggtctgaaccatgagcggaccttggagatgagaaacaaggacctggcgattgctgcagatcaacgctacaaaaccgctgaaaccggtcaacccgtctatggtccggggcaaaacgatccggtgttcatcgaaggtaaagagtccaatgatttttatcagacagagcgcggcaaggtggcatccaacgatcgccgctcaacaccagcgacctatgcgaaattcatgaacttccatccgttcatcgatatcgagtccatttcaccgcgaccaatactctttgtcgtgggtgatgcggcaccatcacgcacttataccgataccgcctataaaatggcggcagagccgaaagagcttgtggaaattaagggggctaaccgtatcgacctgtatgaccgcactgaactcatcccgtgggacaagctggtgtcattttttaacaccaatctgaaaaaagataaataa

SEQ ID NO: 271574 - DNA, 1209 bp, Klebsiella pneumoniae
atgcctgtaaaacattctcacacaatctccggtgccggtgttgtctctgcactgatgccggtgatggctgcggtactggtcggctttattattatcggtgtggcacttcctgtcctgccgctgcatgtcaaaaatgacctggggttcgggacctttatcgtgggcctggtcgccggggcacagtttgctgcatcgcttatttcccgggtgtggtccgggagctattcggacaagcgcggcgccaaaaagggcgtggtggccgggcttatcgctgctgccgtttcaggactactgtaccaggtgtcgctctggttcgtcggcatgccggtactgtctgtgggtgttttgcttgccgggcgcgcaatactgggcggggcggaaagcttcatcattaccggtgccgtggcatggggtctggccctcgtggataaggagcatgcaggtaaggttatcgcctgggtgggtaccgcgatgtttgccgctatggctctcggcggaccggtggggacgttgttatttgatgctttcggctttgaggcgatcgcactgctgacgttcctgcttccgctgctggtactggcgtatctcgcccgtatgcccgcagttgcgccccatccacatgccgcgcaggcaacctttggctcagtcatgcacgcggtctggttacccggactgggcgccgcgcttgccagcacgggctactgtaccatcctggccttcagctcactttattacagcgccatgaactggcagcccgtctggatggcattcacggcctttggcgttgcgctgattgttgccagaatcgttgccggtcatctgccagatcgctttggtggcgcacgtattgcgctgatttttgtgctcgttcaggccgccgggctctttctgatatggcttgcgggtacgtccctgattgcgactatcggttcagcgttagccggttttggctactcactggtttacccgggcctcggtatcgaagccatcagtggttcaacgccccagaaccgcggcatggtgatgggcatctacacagcatttcttgacgtggcgatggcgatcggcagtcctgctctcggctgggtaggaggacatcttgggctgaacgcgatattcctggccggcgcgctggcagtgctgtccactgctgtggtggcatccctgctgttaaaacgcccggaccagagtaaacaaaatccggcctga

SEQ ID NO: 271575 - DNA, 738 bp, Klebsiella pneumoniae
atgtctcagggtattgataacaaaatcatcgtcatcaccggtgccagcagcggcctgggagcagaaacagcccgacacctgtcgaaactgggcgcaaaagttgttctgggcgcgcgacgtattgagaagcttgagcaacttgccggcgaactggggctggataccaaagcagtactgcgcaccgacgtgacggaccgcactcaggtccaggcccttgttgaccgggcggtagagctgcacggccgtattgacgtcattattaataatgccggcttaatgccgagctccatgctcgacaagctgaaggtggatgaatgggaccggatgatcgacgtgaacattaagggtgtactttacggtatcgccgccgcgctgccgtatatgaaagcccagaagtcgggacagtttatcaacgtatcgtccgtagccggacataaggttgggcccggcggtgctgtatatgcaggaacgaaatgggccatccgcgctatttcagaaggcctgcgtcaggaagtgaaaccctggaatatccgcacaactattgtttcacccggcgcggtagataccgaactgactaaaaccatcaccgacgaagatattgcgaaaggtatgtcgaaaacctacgagaatgcaatccctgcagaggcttttgcacgggtcgtcgcatttgccatcagccagcctgacgacgtggatgttaacgaaatacttttccggccgaccgtacaggtttattaa

SEQ ID NO: 271576 - DNA, 777 bp, Klebsiella pneumoniae
atgaaaacttcaacggcagttgcgctggcgctttctctcggatcggctggcgccattgcagaaacgggggcacggcggggcccgctgtcagacaccgacacagaggcagtatctcccgcactcgaacgctatgcgagcaccaggctggcaggagacctctggaaaagaaacgatttgtcgccacgcgatcgcagcctcgttaccgttgcagcggttattgcccggaatcagaccgtacttttaccggagcagctggagctggcgctgaaaaacggtgttaagccggctgagctttccgaaaccatcacgcagctggcgttctatgccggctggggcaatgccattgcggccgcagcggtaacgaaagagatattcctgcaaaaaggaattaacgctgaacagcttcctcgcgcggaggaggcgctgctgccgatcgatgaaaaagctgaagcagctcgcgctgcacgcgtagaacagagtatcggtagcgcggtgccggggcttgtcagcgacaccaccgacgtgcttttccgggagttgtggctgcgtcccgggcttgcaccacgggacagaagtctggtgaccctgtctgccctgattgcaaacgggcaggtacagcaaatttcgccgcaccttaaccgggcaatggataacggcctgacccggctgcaggcttcaggcgcactgagtcatcttgcgtattatgctgggtggcctaatgctttctcagcagcgcagattttcaaaacggtgtttgagcagcgtgaatcgaaataa

SEQ ID NO: 271577 - DNA, 459 bp, Klebsiella pneumoniae
atgaaagcgattattgctgcagcagccatgtccgtactgggtaccacccaggtttctgccgaaagtatcgaaatccgtcgtaacgggcagaccccttctgtcgtcggcaaggccgataacttctcgggtcatgcagttgtcagcccgttgttgccgccaaacgagtccacgcgtgccaatctgggccaggtggatttcgccccgggggcgcgcacggcctggcatactcaccctgccggacagttgctgatcgttacggcaggcaaaggctgggttcaggaagaaggtaaggctcgtcaggatatagcccccggggatgtcgtctggatccctgcgaccgttcgccactggcatggcgccacggcgacgtcccccatgagccatctggccatgacgtatatggtggacggtaaaaacgtggactggcaggagcccgtctccgacgaacagtatcagtaa

SEQ ID NO: 271578 - DNA, 1212 bp, Klebsiella pneumoniae
atgtgcggaaaatgtgaagacaacagtcatccggacgcgccagcgtccccgacccggagaaaggttctgatggccggggccggccttgctgcagcatcaacgctggcggtcatgccgggaaaggtacaggcacaggaatctgccgctcaggcaggtaatggaccctggcgtgttcgtgcctggggcaacagggatccggaggggccatttgttcccctggaaattccccgccgggcacttcgtccgaacgatgtcctcatcgacattatgtactgtgctatctgtcattcagatattcatatcgccaggcaggaatggggggcgccttaccctgccaccaattatccctgtgttccggggcatgagatcatcgggcgtgtcgccgccatcggaagcgccgtgacgaaattccggccgggtgatattgcgggtgccggtgccatgattgattcctgcggagaatgcgagagctgcgttaacgatctggaacagtactgcctgaaaggctggacgctgaatttcaactcgccggataaaatttcgggcggctataactatggcggtttttcccagcgtgtggtgatccccgaacgttttaccgttcgcatcccaccgggaatgaatcttgccgctgcggcaccgttaatgtgcgccggcatcaccaccttctcaccccttgagcactggtcggttgaagccgggcaacgggtcggggttattggcatgggcgggctcgggcatctggccgtcaagctggccgtcgcgcgcagggctgatgttacggtattcaccaccactccaggaaaagtcacggacgcgaaaaaaatgggggcccgggaggctgttgtctggaacgatcctgacgccctgaagccttatgcgaaccagtttgattttcttatatcaacggtgccgacgagcgtccccactcatccgattactaatatgcttcgcctggatggtacctacgtcatcgtcggagcccgtgaaccgatagaagacgtccgcggttccgggctgtggcttcagcgtcggcaggtctcagcatcactgatgggtggcatggcagaaactcaggagttcatcgatttctgtgcccgccgtaacattgtggccgatatcgagctgataaagcccgaccagatagatcgcgcctttgagcgaatcaaagcaaaagacattcgttatcgttttgttgtggactttacgtaa

SEQ ID NO: 271579 - DNA, 906 bp, Klebsiella pneumoniae
atgtccgatcagaatctcaatgaccttgctgcctttatggtggttgcgaaggagcaaaactttacgcgtgcggcaaaacgactgggcatttcacagtccgcactgagccagacggttcgggggctggaggctcagcttggcctccgcttgctcaaccgaaccacccggcgtgttgtgcccacagaagccggagagcggctaatggcctccgtggggccgcaaattgaggatatccagcgccagttaatggtgctgagtgaactccgcgataagcctgcgggtacgatacggcttacggcaacagagtatgcagcagagtcagttctgtggccggcggtatcccgcctggtaaaagcctatccggatattaaggttgaaatcctgacggattatggtctgaccgatattgtgagggaccgttttgatgctggagttcgtcctggtgaaaccattgcaaaggatatgattgccgttcgtattgcaccagatatgcgcatggcggttgccggttctccagcctatttcaatgacagacctgtaccaggtacgccacaggaacttaccgatcacagctgtattaatcttcgactctccggtcatggaggactctatgcgtgggaatttgagaaagacgggcgtgagctgaatgtgcgggttgatggtcagttggtcttcaacacaggaagcatgatacttagagctgcacttgaagggcggggtcttgcgtatcttcctgaagggcagcttgaaccttatatctcatccggacaactggttcgcgttcttgacgagtggtgtgaaccttactctgggtaccatctttactatccaagccatcgtcagccaacacctgcatttagcttactggttgatgagctacgctattcaacccgcaaacaactataa

SEQ ID NO: 271580 - DNA, 462 bp, Klebsiella pneumoniae
atgatgtcacttatttattcggcaaatcggatattaacgaaggggggggttattcctgaaaccactttggtaaaaaatgtgagccagctaagtcaggcctggaattacagtagggctgagggcgtgtcgatacatacattgaacataccagaaaacgagtatacttactctgtttcctatatcgatgatgggaaaaatactgatggggaaataactgttttaaaacaggggaaagaaataagtacgataaaatgcgatgatgtctgggaacaacatctaggtgatagcaatatgatgcatggtatccccgatgaacattcagacaatattaacgaacatgaaagtaataaatccaactcagaatcagagaagataccatctcaatcaccggttaagatcaaaataaaagattccacttacaacttcaaaggggctttgttgaataaatcgaactttcgctga

SEQ ID NO: 271581 - DNA, 603 bp, Klebsiella pneumoniae
atgaataacacacttcttcctccttctgccagcgcgtggatgcgtggcgccgaagctgccacggcgaagctgtccggaatcacggtagctattcgcacgctgtggacgccgacggcatgcccggttgatttattgccgtatctggcgtgggcgctgtcggttgatcggtgggataagaactggccggcagagaaaaaaatagcgtcaatccagcaatcctactggcttcatcgcaggaagggcacccgcgcagctgtgcggcgagtgatcgaagatatgggcttttccgcgacgtttgcggaatggttcgatgtcggcgacgaaccagggactttccggattgagatcgatgttaacgatgtcggattaacgcccaaaacactggatgagctgaaccgtctggttggtgcagcaaagccggttagccgtcatctggcacaaatgacaatttcaaccagcacgcatggctatgcatgggcgggggtagtggtagttgatggagaggcaacgacagtttatccgccaggattccagcctgatgaggatatttattacgacggaatagcgacataccgcggcaattattattttaccggaaggtga

SEQ ID NO: 271582 - DNA, 408 bp, Klebsiella pneumoniae
atgccaatacataagtttgagctcgaaaagcatatcaacaaaaaagtagtcgcaataataaatctgcaacagattgctatggcctccggatttatattggaaagttatgacgataactgcctggagagggcgacatatgctctaaaaaaatctggaatactggaattgtcagaaatagatgaatttgcaaataaaaacatagatttagtcaagtttttttttggcaggcttagatcgaaaaatcatagggtatggaaagtaacactgccatttttatatgagctgacagctatattcaaagaaccatcaatctttaacgagcaatataaggatatctgcaattgggatccggaggttgcagaaatgcttgattccgctctaaaggatatgcatgaaggcaatgcataa

SEQ ID NO: 271583 - DNA, 999 bp, Klebsiella pneumoniae
atgacgaaccataatcagatgagtcgaatttattctaaattcgggcgagccgggtttaatctttcttacattcgtaaactgttacctgaatggtgggacgaacagcttgctgaaaccccgtcagggcgtcagtatgcgtgcttgcatctcgcacgcatgtttagcattcttccggatagtctgaaagatgacagtgaggggttgtgtttcaactttggtgggaatcataaatataaacatcgccaaaacgttgcagagcaggatttagatattgctactgcagttgcatatgccgctgcaggcattgtcgcatctaatttcaaaaccccgtttgatgctggcgccgtgctggatcccacggtcatcagagatcaaatcctcgctcacgaacaatgggtgtcgcttggtagcctagtaacgttctgccattcaattggtattccagttgtttatcttaaatatttcccgcaagctgcaaagaaaatggccggattggcattagtaagccgcggacgaccggtgattgttctgacccaacctcagaagtatggctatatgttgtttgaccttgcgcacgagttgggccatatcgctaagggtcaccttaacgcagaaaacgggcagtgccatgtagatttgaaaattgagaatgcttcaactgatctcatcgagaaggaggctaatgaatttgcctttcaggttatctcgggacagaaatctctacgtattggacctacagggggtaggttaaaaggctccgacttagctcgtgccgcccatagatatggaagtgaaaaccatatcgaccctacgcatattgctctgaattatggttatgctcaagcttgctggggcgccgctgttaatgccgtgaaactactatgtgcgggcaagcattcagatcaggatttcgtaagggctatgatgaagagtggaatggatttggaaaatatccacgaagatgatcttaaggttttagaaaatctaatcggggagtga

SEQ ID NO: 271584 - DNA, 279 bp, Klebsiella pneumoniae
atggcggtccggtcgcccagcagcgccgcgtccgccgcccgggcggtacagaacaggatgatggctccgggcagcgcccagcaaaaggccaccgccagcagcggccaggtatcgctgctgagcggaagcgcgctgattggcgccttgctggtgctgatgaccgatacccttggccggctggcgtttgcgccgctgcagatcccggcggggattgttattgccctggtgggctgcccgttttttgttgtcttactctggcgtcgccgcgatgccctttaa

SEQ ID NO: 271585 - DNA, 264 bp, Klebsiella pneumoniae
gtggtcaacgccacgccgctggggatgaaggtcagcgatccgctgccgctggacgttgaccgtctggcgccaggcacctgggtgggggaggtggtgatgacccaggagtatactccgttgctgagagccgcccaggcgcgacagtgccacatccagcgcgggaccgacatgctgtttgaaatgatccctgcctatctgcgctttttcgacctgccggtagccacccccgaacagctgcgggcgctggcggaaattcgctactga

SEQ ID NO: 271586 - DNA, 723 bp, Klebsiella pneumoniae
atggcagtaattaacggtttatcaatcaatattcccggcgccacctgggacgccgaatgcattatcggatcgcgctacccgcaggcggcagttgcgtcactggcgacctatggcacacagaatgcccgcaccattctgggagcgaatccggtcgcagctggcgtgccggttcagcacgattattactttaccggcgatgtgaatacgggaggttatgatctgggtgtaaccgacaatatcaagaaaacagaaatggtgctgatccgcccttcagccgtgcgttcgttgggtatggggaactatcttgggagcacggcaaccccgcagggcgatacctttgtgtttgagccgtctgcgggacgccttcgcgccgtagtagggcgtactgccggcacatcagaatcagcactgagtgtggcaatagacaccagtaaattccatctggcctttttcgatgtcagcggcgaatccgtgcaggttcataaaatggtttcggggcaactggtttccggagcgctgacagcggtcaccagtcgcgccatcccgtcaccggcgaaaccaatcatggccgcaaaagcgaacatagccctgacggattttttaggcagcgttgatattgccatgaccggtgtctggatcagtacgaacctgaccgccgcacaaaagcaggatatgtgcaacgtggtgatggaaatgtacggcgatattttgccgctggcgtag

SEQ ID NO: 271587 - DNA, 2112 bp, Klebsiella pneumoniae
atgacaaatattagcgaaacaccccgctgggaagacagtatttaccaggtgaggcgaggagacaaagtagagggcggagccggtggtgtggcgaatattcaggcgagccagctggcgaatcgcaccctgttacttaaacagatggtcgatggtgttcagactggaattagcccttacagtactgaagaagaagctcagtctgatattgatgctggcaaactggttgagggcgcccgcttcgctgtctggtctgacaatgcacaggcgtgggcgcaggaataccagaatatcaacggcgtggcgacggctaccgggaagtttttacccagcaaggaatttaccgacctgctgtatggcatggtgacggacttatttaagcgcagcgtaccggacggctggaagacaattttcccggatgataacgggaatttttccgtcggtattgatgatgtgggacgcctgattgccgggctggcaaaaatgaataaagccgaaatcggaacagccgacgcgaggcgcctgaacctcggcaatgtctttttatcccagggcgatgacggaaatgctctggcactgcatgattttttgatgaatatctgcctggcaattaccaatagcggtgtgctgaaggctggcaaatctgaaattaatacgctgtctgcactcagtaaaatgatcctgccggatgcgtcagaaatgacccgaaaagcaatggatgattttttgttggcatggacggacgataacggaaataaaagcgtcggccttaaaaaaagcggcgcctgggctgcgggacggattgaatccaataccgtcgagtcaaagcgcattagtgccgaaacgctggaagtgaaggcgataatttcccctgaatttttacgctatttcaatcaggcgatttattctcgtctgccggatatcgcccataagatcgggtacggtcagtcactcgccgccggagtaaacacccaggcgctgattacaatcgctgcgttatatacagcgctacgtttcatcggtggggtgcgcgcccaggacggctccggcacttcggccgagaaccatgcgcaactggttccatacgttgaaacatttaaaagcaccgccaacggggacgcttgggaaacgccgatggcagccagcatccgtggatggtatgagctactgattgctgaaaattatgggtttaatccagacgacctgatcatcctgggttcagttccggccgagggtagtcagtccatcgcatcactcacatcgggtacatatttgcagcgtgtctatgacgatattacgtatggatatgcccgcgcacaggaactgggtaaaacataccgacctgttactatgtatctcatggtcggggaaacagaccagacgttaggtactactgcagaatcgttcagcgccacctttgatctgttgcagcagcgcgttgatactcacgcctcggcggtttgcggtgaaaatattcgtgtgcctatttttgtttaccagttcagcagttgggttaaccggacaccaaatacgtcatatcccactattccaatggcgctgctggagctggcaaaaacacgtgaaaatgtttatctcactaacccgatgtatatccacgattacaccgataacgcgcatctcacggcccgcagttcatttattcacggcctgtatatttctgtaatggaaaaacgagtactggttgacggtaaaacagatgctaaacccctaatgccagttgaccataaacgccaggggcgcgccgctaccgtatggctgaatccggtaggtcggctggaacttgataccagcgtggtgtccgatccaggtaattacggcttccgtctgcttcatccggatacactcgacgttattccactgaccgatgttaatgtccgctatgacgctttaacgatatcaactgccgatgatattcctgctggggcaattttacagtatgcgtttcatggtggaaccacaggacagtcaccaggacgtctccacggccccagaggatgcctacgtgacagtcagggcgatatcatcagctttactcttaatggtgaggttatccgtatggataactattgcgtaatgttcgaattaactctctga

SEQ ID NO: 271588 - DNA, 603 bp, Klebsiella pneumoniae
atgaatagctctcttctcccgccatcatcaaccgcatggatgcgggccacggaaggggcaagcgccaggctgtcggctatcaccgttgcactgcgcacgatatggacgccgaccgcctgcccggtggatttgctgccgtatctggcctgggcgttatctgttgatcgctgggacaaggactggccagcagagcggaaaattgctgctatccagcattcgtactggctgcatcgccgaaaaggcacgcgcgccgccgtgcgacgagtgatcgaggatatgggattttctgccacgtttgcggagtggttcgacgtcggcgacgagccaggaacgttcaggcttgaagtggatgtgaacgatgtcggattgacaccgaaaacactggatgaattgaatcgccttattggtgatgccaagcccgtcagtcggcacctggcacagatgacgattgcaaccagcgcccacggctatgcgtgggcaggggtagcggttattgatggggaggcaacaacggtttatccgccaggctaccagccagatgaaagtatttattacgacggaatagcggcatacagcggcaatacttattttaccggaagatga

SEQ ID NO: 271589 - DNA, 1380 bp, Klebsiella pneumoniae
atgaaaattgtgatccaagaaccggatttgagtaacggttttgatgaagctgatatatttaaccgtaaaaaactatttcatcaaatagtaagattgatagaggattctcccaaaaatagccttgtttttgcgcttgatgataaatggggcaatggcaaaactacatttgttaaaatgttgcaagcagaaatagcgaaagaaaataactatgcaatagacgccatatactttgatgcctttgaaaatgattatcaaagtgatccgttcatatctttatcatctcttttatattcacacgtagaatcaaagaaaaccaaagggaagaaggttggagataaaattctttcaggaataaagaaagtaggctccaacctattactcaacggttctaaatttgcgttaacagccgtctcaggtgggattatatcagccaataaaatagatggaataggtgaggtcattacagactctttgaaatcagaagttgaaggattcattgaaagcagaataaaatcaacaaacaatgaaaaaaaagacatagccgacttcaaagaaagcttaaaagaaataatcaaagtaaccaacaataaaacattgattataatagatgaattagatagggcaagacctgattatgcattagatcttcttgaacgaataaaacatttattttcagttgatggccttatatttcttcttgtgatgaacagagaacaatttgagaaaggtattttacgtagatatggtgatattgactcaagattgtatctaaataaatttatccattgctggttttcccttcctaaaaagaatgcattttccaagcatgttattttaggcaactcaccgacaacaactttcgattacatatctcatgttctagaaaaaaataacattaactcattcaattcctctggcgcatttattaggatattatcatacttaattgatagaaataatggttctttacgagaaatagagcgttgcttatctgttctcgctgtagttgacaacccttatgaacttaacaaaatcacaaataattactataatgccgggttggcattggttgtatttctaaaagtatttaacccaattctacttgaaagtttaatcactcatgaaattaaccattctgattttacattcaaattaaaagtcgccctccctatcatcaaggataatataatcacccataatcaccttaattttttaacatcacttatcagataccacttcttaagcaatgaagaattgaggcatgcccgcttaaaaaatgaggagtggattatagacattgaaaacatgagagttaatagcctgagggcaatgataattgaagatatcgcatcatcaattgataacatgcatattagttaa

SEQ ID NO: 271590 - DNA, 183 bp, Klebsiella pneumoniae
atgggcttctgtacggcgaaacatattgatttactcaatatgacaaactggcggcggcccgccagcgcgaaggcggcgaaaaacgcgatgcgcatgccgccggggtcaggcggtgaaacgggcccctttcagggccgcagaaggaccgctcagttgtcccaggcgtggggggcgaagaggtag

SEQ ID NO: 271591 - DNA, 933 bp, Klebsiella pneumoniae
atggggaagagtatgttagaagaaatctataatttattttactttgcgtcatcatctgatgaaaaaataacacatgtgggtatagctgtccataaagtgagtgggagtgatagtgaaaaaataaagcacctaaaaaaccacctactttctgatttaccaaggtgtgagtattttgaagtagatccaagatcacttggtgattctgattttcttaccaatagtaggtttttggcgttggcaagagtgggtgatccaatacgtgtttttgaacaggctttaattgctaagaatgcgtctgctaaccctctagtaatttatactgctgtagtagatggtcagattaaggtagatgcctcggtttctacagacaaagaagttagacgaagtgattttgaggccaatagcatacctgggattaaagatttgcctgactatcttgacaagtatttggttggaaataaatttttgattaaagatctattggttgatgatcatgtcaaaccaatacatttattatttaacaataagcattatttatctagcattaaactgttaatgtcatttattgatactatagcttatcttgagtatggtgatgtaaataaagcgtttcccatgtggttagatacatactgtgaattatctcacttaggcataagttcaaatgaactttatgaattaagacactctcttttacacatgactagcttgaactcacgtaaggttgtacagggtaaagaaagacgaataagttatagcgttgccccagtcggaacccctacgcgcactcattcaggtattgaattttttaattacgttgatttcattcccctttttgaaaaagggttagataaatggttagcaacctataataatgaaaaaatttctatttttgttgaacgttatgaccaaattgtaagagaagatcattaa

SEQ ID NO: 271592 - DNA, 201 bp, Klebsiella pneumoniae
atgcaaagtaattttatggtaaaagctttaattgccagacaggacaatttggtcgaaaaaatgaaagtaagtggtacgccttctttttatgtttcagggaaatatcatattaacaatgcatcactcgcgcaagatgactatgatacctatgcagaggatatggcgaatctggttttatttttgcttaacaaatcccagtga

SEQ ID NO: 271593 - DNA, 1977 bp, Klebsiella pneumoniae
atgggtaaggctatcgatatcttgctttacgtggctctaagcgaggagtttgatgtcgttatagatatgctaggatcagattttgaatcccaagagcaggtaggtgttgcactgacaggtttcttcggcaatatcgactcgcctgttcttaacagaagcttcgaagttgctgtgttcccggcaggaaaaatgggcaatacccgatccgctagtcttacttcagcacttatcgagaagctgaatccggccaacatcgtggtgctaggcatagcaggatcactggtaaacgacatggaacctggcgatgtatttataccggacactgtgaatgagtacatggcaaattcagcgacccatggggaaggtaaaaactggagttttactacctcaggtaaccaatttcaaagctctttgagactactcaataggtttcaatttttcgcacacaccagtggcgactattacaaacgttggcagcaagacactcagattgccaaggctgaactcatttcagaagaggtacagcttgcccttgctagcaatgaactgatcctacgaggtagctgtaagctctttgccggtgacgaccgtaagttggccagcggcccagcagtaggtaaaggcaagggttttgtggattggatcatccgtgaacatgatcgtaaggttgcggccctagaaatggagtcggcaggtgtatacgatgccgcgactgttcgcacaacggctccacgaactgtggccatccgcggcatttctgactacgcggacgctcgaaaagaaaaaattgaagacacagctaaaggtaagtttcgaaatttgtccgctagaaacgctgtttcgttttttattcacactgtccaagctgggatgttcggagctgaggaagaattggcgcaggtcgcattatcgccatcgccacatctgcagcttgattctcgggtgaaatctgtattcgtcataggtggtcacaccggtgagaccgcagatgttgatgctgaactcccacgtttgaacaaggcgtcgttgacccttgggcatgttctcgcgaaagcgggagcacagctacttatatgcagcccatttactgattcggtcgactactacgcagcaatgggctatgcggactctaagtgtggtggattaatccagttccatagtcccagtcatccaacagttgaggaaaagcgatgccttctacgcaaaacgcttggacgacctggcctcgtaatccaggattggaactaccctggtccagagggcaatgaggaagacgcatggttccagtcctggtttttggcccagattcaggcgctggagaaagctgatgtggttgttgctctgggagggaaggtttcgcaaacggctagtacacttttgcatcttgctgaggccaggggccttccgatcattccgtttgcattcctcggtggagtggcgaagcgctcatacgagcgccgagattggtcgagacttaatccaggttttgacccaagcgttttgtgcgacgtcgatggtgttgaacatacgattgagatagctaatcgactcatgttagatcgaatgcagccgagccgtctcttagagagaccgaaaatggtttttgttagttttgctcatcaggacgccgaaatggccaatgcactacgggccgtactagtaaaagagggtattgaggtcctagttggtgacgatgagatcaggtcagatcagatgatcacagcaaccattgagcaagcggttcttcgcagcgatgtttgtgcagttctttggagccgtcagtatgcccagagcccgtggtgttatgacgaaatgagtctggcaataaatcagcaggaatatggcaagattaaggtatggcttttcaatctagatgactctccgattgtcccagctcaggcgcgcaagctgcccactatctctgttaggaatgttcaggcaatgcacaattgcgtgcatgagcttttgggcaggtag

SEQ ID NO: 271594 - DNA, 2871 bp, Klebsiella pneumoniae
atgatttttccatttgataataaaagtaatatttctgccgttctaagaatgttaaagaactctacacgaaataaagttagggcgattgcatctggaagtgatacagactctatagatttgatgaataatctaagagaaaaatgtaatgtcactgagttgtaccaagcagaaaatgcagtcaaggcgttgtcaataggtcgcaagttacttccagatttatttcctaaagagcctcagttcaaagatgacttcataaggctagatgctttaggtttggaaaaaaatctttcgtatatagataacgcaataaagttaaataaaagaaaagttgaaaaattccttgaggatttatttgagataaacgaaagtatatatcaaaatgatctttttttagcagaaaaactaataaataaagctatagaaaatcatggtcatagtcatcttttattaaggaaagcaatatttgttatatccagcgatgagatgtctaaatttgatagcctttcaaggattattacatcatatggtgtaagaagtaacgtagtaaacactttactttattgttttaaagaagaacaagactatttaagcgttaaaaaatctgtaatgtctacgaaagaccgaggagttttcaatcaatttacaagagacttactacggattggatttcatccacatgccaaaaacactgcagacctgattcaattgacgcaaagttgtttgcagtcaagtttagtggatgccatcattattacgaaagtgaatagtaatctttttgataaatctaaatacatcaatatcgattgggtttttaaattaattgacaataactcaaagcctattcaggaaattgtaaatctaacagagcaatatgaagattcagaaggagtttttttccaacgtagttgtgcttggctagagaatgatgaagttgttgagtatagattgcttattgaccactttaatgactctcctgaatctccatactttgaaatgaatgatgaattagtattgagaataatcaaaaatgtaagagttgaaggtattgaagaaattcttaccagtgagaatttgttggagtttggtgggagcaagttgtccgtaaataagtcgtcaatttcaaattcagcgctcctaaatttaatgatccatataaatgaaggcatgataattaccactgaagatgtattactccgattaatggagaacactcgagatttagcacgaacaataaatatcagttttatcaaaaattttatactgtcttcaccaagcgagctatccgagattgtgttgttattgttgatttacaagagaagcaaaaatgaagctgaccattataaattacgtagaaagctacaaaactatataattaagtataatgaatcaaacttagttaattttatagatagtgtcgctaaaaagtctcaagctgttgctgaattcacatatgaggtatgtacggaagattttatatctaagcttagtcatgtcataggtacgactgagaaaattacagaaactagagctagtcttcatgattggatgggggatctaactggtgatactaactataaggtgagagcaaaaaacttaagaatagatcacaagattaacctcgtcaaaggtgaactagacgacaatcgaatatatgtagatacttctaagtttttggagtggatgcaagatgaaatagcgcaagacctaacgacagtgctttcgttttcactgcatgataaggaagtgattaatacaaatgaaccacaaatcactcaaataatttccaagtgttattcagagttttgctctaataacctatttggtatagcatcttatttaggtagaagacttcgacatggtacttttaaaggccatttgtatcatagcgtagttaatgatatagagcaaacttatgatgatattattgatgatcctttaatattccctttatggggagcttttaaagaaagttacaaaaatgaagtggactctattgttaaaaataaacttcatataaagaatggcagtacatttgaaggatttctttctccagaaatcacaggtcataacaaaatagaagtcctgaacggctgcattaacaatatctattctgatttcgataaaagcgaaagctcatacaacgctattttattaattaatgagtattgttggaggctggctgagattgatatgagatctgttcatggctttttgaaaagtagaaaaaattatcttgtagatttagatttgttgaatgaaattaagagaaaagcgctacaaacaaaaatggacgaatcgagggtgtctagtttttatagggaagttcagcgcctagtaaatgacaaattgactgatatgtatagttggttcaaaaaacctcaaagtatatcacctaaagcatcattgaacctgttatataaagtagtggtaactgaagttaagcagagctttccaaattttcaaccagacactagctttgatgaagaccacgacatcgaattaataggaggtgcttatcatgtactctatgatgctctctacgtcattgttttcaatgctgcaaaacatggtaaaaatgcaggtagtgtttatagaaatttcacaattgagcgtgatgaattaagtgcacttgtccgcgtgaaatttgattcagaaatctgtgattcttcgagtgaatttactattaatcaattacttaaagtcgatttagatgatgctgagattgatacagcccaaactgtcgaaaacttgagtggcatcaaaaaactttaccacctagacaagtatgacgagaactttgaaataattaccatagaatgtgttaaacgaaaagtttgcatcgatatgatttacaggttgggccatctatga

SEQ ID NO: 271595 - DNA, 450 bp, Klebsiella pneumoniae
atgaaaaatatattgattatcgaagacgatagttttaaggctgacagcttagtccaatttttgattggctactattcggatccagaaatcaagatagctggaagcttagctgaagctattaacattgtgaatagtgacatttttaatctgattttagtggatatggcgctgcccagtcatccttccgttattggcggcggttctccaacatctcttctaacaggagggattgatgtgctgctcgaactaaattatttagagaggaatgacccatgtatcgtcgtaactcaataccctgatatagatatctcaggtaagttttacgatttaactcaagctaaaattgaattcaagacgcagttagggtgtaatgtcatggcttgtattgagtacaaagaggaagaatcgtcttggcaagaacatttgaaaagcatattggataatttatga

SEQ ID NO: 271596 - DNA, 1014 bp, Klebsiella pneumoniae
ttggttctgcctatatttggtaaggatgaggaagagcctcaagatgttacttcgaaaattatagagctaattagagattatgagtctaaaaactataagacaccagttattgcaatcactcaattttcagactcagctgaaagtaatttttcaaacctcaataaatatgacatcaatgtaataacttatgagcaggggtctgacgaatggaaatcggctttttttaggaagatcgagttatgcatcccaaagactacttatgattttattattgtttgtgctttagagaaagaagcagctgcttatatcgaggccggttacgcaaagcccaagacttcaatcaagtatggactttcttgtcaggatatgatgattgaaggacataaaggccttataattgtccctccacgaatgggattggttaatacatctatcgttagtgcgcgagctattgatttattcgaacccaaaattatctgcatgagtggtatttgtgctggtatagaggggaatgctaacatttacgacatagtcattccttcgcagtgcgatcagcatgatgcaggtaaatggacaagtaaaggttttgtaccagaaagttattcaattccactgattcacgataccgaaatcgctatcaatagaattgtaaaagaagatgggtttgttgatgcagtcgcgcaaggtgtgcatctttcagaatctgaaatggtagatgggtcatcaactttagatgtgaaaatatataccgcaacaacatctagtggtagtagtgtaattgctgacgagaagatgttggactacattacttcacaacatagaaaaaagactgcctttgaaatggaatcttacgcactttatgaagctgcacgacgctctccattaaaaccaaactacttcagtgctaagtctgtcgtagataacggtaatactaataagggagatgagtatcatagagtagccgctttgatatctgctaaggctgtgtatgggttaataaaagaacttatttaa

SEQ ID NO: 271597 - DNA, 138 bp, Klebsiella pneumoniae
atggtattttacctgttcagaacgctgaatgaagtacgggaaattacggaacactcgcagaatgagtacaacagcgagcgtccctatggttcccttaagaacctgacgccgaaggaataccggctgttggctgattaa

SEQ ID NO: 271598 - DNA, 141 bp, Klebsiella pneumoniae; identical to SEQ ID NO: 102393

SEQ ID NO: 271599 - DNA, 750 bp, Klebsiella pneumoniae
gtgctggtcattaaacgcgtattcaggctgaccctgcgcgctgcgcagggttttattgattccatttttacactgatgaatgttccgttgcgctgcccggattacaccagtgtcagcaagcgcgcaaagtcggttaatgtcagtttcaaaacgtccacccggggtgaaatcgcgcatctggtgattgattccaccgggctgaaggtctttggtgaaggcgaatggaaagtcaaaaaacacggcaaagaacgccgtcgtatatggcgaaagttgcatctggcagttgacagcaacacacatgaaatcatctgtgcagacctgtcgctgaacaatgtgacggactcagaagccttcccgggtcttatccggcagactcacagaaaaatcagggcagcatcggcagacggcgcttacgacacccggctctgtcacgatgaactgcggcgtaagaaaatcagcgcgcttatccctccccgaaaaggtgcgggttactggcccggtgaatatgcagaccgtaaccgtgctgttgcgaatcagcgaatgaccgggagtaatgcgcggtggaaatggacaacagattacaaccgtcgctcgatagcggaaacggcgatgtaccgggtaaaacagctgttcgggggttcactgacgctgcgtgactacgatggtcaggttgcggaggctatggccctggtacgagcgctgaacaaaatgacgaaagcaggtatgcctgaaagcgtgcgtattgcctga

SEQ ID NO: 271600 - DNA, 210 bp, Klebsiella pneumoniae
atgatcaacggcggtattcaggttttccaaagtgaataccttgcctgttttctcccccatagctgcaagggcatccagcgtctttttcgctttcagccacatttcacccgttacaatttcaactggtttcaccgggagaccaacattgttcagtcctgtgccgtgcaagttgagagacgggcagccaaggcggcgagcggcctcgagtga

SEQ ID NO: 271601 - DNA, 1161 bp, Klebsiella pneumoniae
atggctatatatcatttaagttttaaattgtgcaaaaggtcagaaggtaaatcttccgtctatttggctgcatatcagaatagaaataaatttaccgataatagaacgggtgccgtatggaattacagcaaaaaagaaggctttgacggttcgttaatcctggcaccaccacaagcaccaggatggcttgtgaagtcgtctgaggccctatggaatgaggttgagaggacagaacgacagaagaacggacagactgccaggtacttcgatgtcgccttgccggtggagctggacgacaaacaaaaaaaagaccttttaataaaatactgtcaggataattttgtagatgagggaatgattgccgatattgcattccacgatctaaatagtaaaaatccccatgcccatgtaatgttaacaatgaaaaatgttgggccagagggatttttaacaaaaaacagagaatggaacgataagaaatgtttagaagcctggaggcaaaattgggaagttattacaaatgaggcattaaaaaaatatggtcataaatcccgtattgattcccgttcattggaagaacaaaaagaagaggctgacagaaaagcaaaagttgcaaaaactccacaggcaaaagctgcctggattgctaaatctatccgtctggacagaacgccaatgacccgcattcacaggcataattggaaaactgggcagaaattaagaaaattggagcaagaagaaaggaagattttatataaaaaggcttcgttaacatatcaccaaataactaaaccaattgagcctgagcaatctatgaaaatagaaaaatcacaaatagctcaaaaaataaaatctatattcgaaactgccaaaaataaattaaattcgaaaatcgctgactttttcaagcctaaacccaaaaaagaaactcctgaaaaatttgtcagtagttatgaaattgacgagttaggaaatcacatattgaaaaaagaggctgaaaattgggatcagaaaaacaatgataaaattaaaaagcaggttcgtgagaaaaaagaaaaagaagaatccgaaagattgaggcttaaagaagaggatgagaaattaaaaaatagctccaagccaattcagcaaaataacaatcataggaaattaaagcgatag

SEQ ID NO: 271602 - DNA, 390 bp, Klebsiella pneumoniae
atgaataaacttataacagaggcagaaggtgcaagaatcgaaagtgtttttaaatacatattagaggcatctgaaagcatattaatagagcatgggcatgttattacggggcaaataataaaaaacaaaaagttctttgctgataacgggcataaagattttgaaaggttagagtattaccttagctcggcaattagttctcttgtcgaggataaggtaacagaaggcattaaagacattaacacggatgagaaccttgtttttaaaaaaataaatgaattgagtgataaggaaaaattaattttagctgagtgtattattaaacattttgaatattcaaatattagaggaatgcaaaaagcttttaatatttttgggggtgataaatga

SEQ ID NO: 271603 - DNA, 1413 bp, Klebsiella pneumoniae
atgttttacaataaatttgataaagattggcatccagcttttttaaaagcatcgcatgcagcacggaaacttgcacttccagtaactttattgccaacaacatatacatttctaacctctatcgatttgaccatgttttcatatggtttcaactgtgtcggtgatagaaacaataaagttgttctcaaagcaattggtaataaagacaattctctagtctttgtcaaatttcaaaatgttgacaggcgacgagttggtggttttttaattgatgctaatctattatatgatgttgcatttgatacatcttggacaataaatggtggtccatcactgatgttggtttgggagaaaatacagattcaagggtggaggaaaataggttggattgcaaataataacaatgatgtgtggaataagaatataactattcttggctcttctactgaaagttctgggatttcgtattttaatcacagcccaggtggacctgtttcttttgaaggttgtagcttttctggtggacgagtaaaaattacagctcagcatattagtgcttctttttgtgtttttagaggtattgaaataaaacagggcggtagttcatggaatgttttctcttccattggatgtcatttttttaaagatcacaaattcaactcttgctttattatctcaggtactgttcagggatttactgtaacaggtggtttggtcgaacctacagatggtggaactgtactcttgggggttgatgatgctgtcaacaatagtggggcatttattttccaaggggtaaggataagttcttataataaatttaaacctgcaattttagcgggtggtgttttacgaaatgattatggaaaaaatgttattaaaattactggaggtattattgagttatcaacattagaacccagtgagctagcgtgggttgatattttgactttagattcagttctcgtgaatcaagagaaaccactaataatgtcaaggaatctatcaaaagttaattggtcttattcggattcttatgttgaaaatgtaattgtttcttcaaaaaaatcttcttcgtgttttgtacgtaattataatttgaaactgagttcttcaagttctgattttggtataatcgaatttcttgatctctctaaaaccagatatagtcatggtgttttaaatatagtatatgaggattgtgcaggatttgctgaattttcatataaaagagtcaatgatgaagtaactgttaccgaaaatggttcttattttccagaagctgaaagaaatgttcatattgctatattgaagcaatcaatttcggttcgcaattctcgacagaacaactcaaataataactcttgggttatatttgttactttttcaggttatcttgactatctaccgtaa

SEQ ID NO: 271604 - DNA, 663 bp, Klebsiella pneumoniae
atgacctttatgcatctagcggatgatattgcttctgacttagatgctgcttttatggtacgaagattagcactgcctggtagtggaacaccaaaaggcattttgcaaaaatatacatcaggattctttggtaggcttctttttaaaattcaacgactggctaatgatgatttaacagatctgggcctgatccttttaaaaggaaatggtaagtttgtcgatatgcttaatgaggcagtaggtaggatacaatacttaaccatacaggataaccttactcatgattttactattcagctagaaaatggggttggtggtctaaccgttcatacattagctggtgatttagaatcagctcaaaataaattgatggcccatgttaatgcaaaaaaatatttagcaaagcaaaatcaatggtttggggttttggttgaggctgatcgacttggtatggtggcttcgatatgtaagctatcctttccgtggcaaaaagatacaaaaatggatcttgcagttaaagaagcaaaaatggataagccaatgatttatgattcgaaggaattaagggggaaatttaaagttaagcttggaagaaatgataagtgtttatgtggaagcggtaaaaaatataaaaaatgctgtcttataaaaaataatctatga

SEQ ID NO: 271605 - DNA, 657 bp, Klebsiella pneumoniae
  misc_feature (612)..(621): n is a, c, g, or t
atgtatgaaagcccaatattttggatgcgtgaagataaatcgtatcgcaagtttgctgatgagcatagaggaaatttcactgaggcattcacatataataaattagtatctgtttttggaagagaaaacgtctatgtaaatattgatatttttaaaaatgcggcagagaaaattggtgagatcgatatactcgttaaattcgggagtaaatatttaatcgtacaagcaaaatctaaaggtatgacgctttcctcaagaaaaggacaagctgagattgttaaagatgatttcactaagggatttcagaacgcttatgatcaggcgatagaatgctccaatgctcttatggaagcgggggttcactttaaggatgcaagtggaaatttggtagaatttaaaaatcggcctacatcttgctacccagtttgtataacatctgagagttatccgtccttagcttttcagtgtcgacttcatcttaaatatgagaaaacagaacatttaaaagcaccatatattatggatatttttttcttagatattcttactgagtttctttcggagcctttatttttcttgagttttgttgaccgccgtactggttatcatgannnnnnnnnncgagcacagaaattgttcttctatccatgcatttaa

SEQ ID NO: 271606 - DNA, 783 bp, Klebsiella pneumoniae
atgaataatgagcaagcgaaatttttagagttagaggaactttgtaaacaagacggttttattcatgcgtattcatatttatgcctaagagactgtacaataggtttccaaggaggattggaaactgatgatttgaaccatctaacttcatctgaccgattgattaaaactgagttatcactactgcatgggttgatgctcaagtccggttataatgcagtagaaataagcagcgataagctaactcaatatgttgattctgctgaacaaattttaaaagatattcatgaggccataaaaacttcaggaatgaaaaatttctctcttgagaatccgaatctttcgtttgaaagtttttttacggaaaaagatgttgttcgtgagtttatattttatagtgctgagcaggcatttgagtttcaatttgcatcattcgcaagagaacgttatatagaagatgaagtatggctccgtgatcatgttggtttcgatatgaatgatgcttatacaatatatcgagctattaatgaaatgcttaatgaaaatcttaactccattgcatcacgtagcgaattaataagtcataaagaatctcgccttcagtttcatgaaataaatgttgatgagctaattcgtttatctaaacagtcaaaggaaatagtaattgcttttttgactatttttagtacaagttcaaaagatgataacacatcgtttagctcaatagatgattttaatattattaatgcaaagcctattgtatatctaaatgggcattgttga

SEQ ID NO: 271607 - DNA, 279 bp, Klebsiella pneumoniae
atgagtatcttcaccgaagagaaaacatcatgggaacaggagatgctgatccgtgaggcgatagaaaacgccgaacagggatttacggttcacctgagaaacggtgcgcgtattgccgttagccctgacagtccgtcaatagatttaattatttacggtctggaaaaaacaattcgcggtaatcatgagcgtgcgcgaatgacatttattgattttctgtattactggcatgagagggtattcaagtcaattaaacgaaagccgcgccctaaccactaa

SEQ ID NO: 271608 - DNA, 225 bp, Klebsiella pneumoniae
atgggggttaagtcaatcaagctggaaagcggaataagcgatccggattttgtggaaataagcatcaacgcacggaaacacgaacgcgcgcacctgctcggcttactgcgtatttatgttggccagttgaaaaaggaaagcgccaccccggaagagatttattcatcaatcgaacagtgggctgacgcccgcgaattaaccatcactgaggaaagcaaacaatga

SEQ ID NO: 271609 - DNA, 168 bp, Klebsiella pneumoniae
atgttttatgggatgttggtaaaaaagataattgcaaatgatgtaatcgctcttatgttagttataccgtttacaattgcaagtataatatttggccatattgcatatttgactattgagaaaaaaatcaataactatacgacctcaaaaaaggatgcttacaaatga

SEQ ID NO: 271610 - DNA, 717 bp, Klebsiella pneumoniae; identical to SEQ ID NO: 194937

SEQ ID NO: 271611 - DNA, 927 bp, Klebsiella pneumoniae; identical to SEQ ID NO: 194939

SEQ ID NO: 271612 - DNA, 594 bp, Klebsiella pneumoniae; identical to SEQ ID NO: 194940

SEQ ID NO: 271613 - DNA, 813 bp, Klebsiella pneumoniae; identical to SEQ ID NO: 194941

SEQ ID NO: 271614 - DNA, 213 bp, Klebsiella pneumoniae; identical to SEQ ID NO: 194942

SEQ ID NO: 271615 - DNA, 450 bp, Klebsiella pneumoniae; identical to SEQ ID NO: 194943

SEQ ID NO: 271616 - DNA, 201 bp, Klebsiella pneumoniae
atgagtgatctacccgtccgacagtttgccgacaaagcatatcaggcagaaattattctcgccctaatgcaggcaaggcaggttgaaaaaatggaatccagtgaagtggccgcgatgataaatctactcaaagatctggttggcagtgtaggcggttttcttggtgaagaagcatttcgcgaggaggaggaaaatgcttaa

SEQ ID NO: 271617 - DNA, 279 bp, Klebsiella pneumoniae
atgcttaaccctcaacctaaaagctttacctggttatttctggccacttacgccgatgcgaaagcactccctgtcgttctgcgcactcaggcggataccgaagatgaagcccgttcacagctgactggtgattattctctgacattcgcggcaaaaatccgttccgattgccctctcacctgtcattgggtggatcgggatagttctgttttgtggtctgtcatgggctgcaatgctgacgcttcctttcatgtaatgaagggggagcgcaatgcataa

SEQ ID NO: 271618 - DNA, 216 bp, Klebsiella pneumoniae
atggccaatattactcaagatgatgaatgggtgatggaagcgggaattatagcgaggatgtatatgaccccccggcaaataagagcttaccgtagcgggcggtgggtagaaggcattcattataagaagcattcccccaacccactctctacagaagggagagcgacacttctttataactacacaaaaatcaataagcttgttggagatacttaa

SEQ ID NO: 271619 - DNA, 273 bp, Klebsiella pneumoniae
atgggcccgacgcagggcatctgtagcctgtccttgttgccccgttttaccgcctgggcgtaccgctctggcactgagcacactgtccgcaattacctgatagccctgctgagcagcaccatcctgccccgtccactgattgagttgcatattgcccgccacgctgacaaggtcgcctttccggtggttggccagcgcgtcagcctgcttaccaaaagcaatgacacccagccagaaggtagcctctccgttatcagccgcattacagggtag

SEQ ID NO: 271620 - DNA, 1101 bp, Klebsiella pneumoniae
atggaagatatttcttacgtaccaattttaaaaacaaaacgcgcagagtttacagcaaccgcacagttatctaaatcggtcaaagtgaaaatcatccctctttttgaaattgaacctgttcctttagatccagacacagatattcccgataagagttataatgaaatgttgagtgattttggaaagaaaattgctacagcatgttctgacatttctattatttaccttgatgggatacttgttgaagagcaattcattgacttaggtgatatttatccaatcacgaatgctgtcaatcaggcgcgcgcggcaggggttcatgttattccggtaagttctccaactcgtaacggaaattatttaaaagcgattgatggtcttgtgaaagatgaagtgtgtttacgattgactgtaacagatattgctaacccccagatgatatcagcttatatttccaggttaaatatcccctatcgaaatattgatgttgttatcgatctgcgtgactctataacagaagattcattggggacagaccaaagtcaaacacttgctgcaggacttattaacaatcttcataatatacatgatttccgtcgcgtaatattagctgccggttcatttccagttgaccttagtcaaatatccgtaggtatatattcgcaacctcgtttcgaatggtttctgtggaaggatttacgtcaaaaatcctatttaacgcgagaagtaatttacgcggattatgggattcagcatccagattacactaggcttgcgacacggtttcctagtgtcactgctagtgttcgttatactggtgatgatgatttttgggtttttagaggaagaaaagctaaccaatatgggtatgatcaatatggtgcgcatagccaacaaattgttgctcacagagaatactctggggtgacattcagtgtagcggataaagatattaatgattatgctctagtttatgcacagtacctgcaaaatccctctcagagttataaatttggtagccccgaagtttggagacgaattggtcaaaatcaccatattacaaaagttgtttatcaactctccagtttgtacgggctttaa

SEQ ID NO: 271621 - DNA, 582 bp, Klebsiella pneumoniae
atgagagacatcgacgttcgacaagctgttcattcaaaaatccttaaggaacatcacaaggatcctgatacccttattatcgatgagtttgttatgaacttaggggctagccgtgctgatatcacagtaatcaatgggttaatgcatggttatgaattgaagagcaaaagcgataatcttttgcgtctacccgctcaggttgaattctattcttcgattatggacaaggtaacccttgttgtatcagattgccatgcagctgccgcagagaaaatcatacctgactggtggggagtaaaaattgcaactgaaggctctaggaatgccgttcatctacgcacgctgcgtcttaatcgaatgaatccaaacgtcgataaagttgccctagccatgttactttggaaggatgaaatgctgtctattttggctgctcaaggtctagagcgtggcctgaaaagcaagccacgcagagtactgtgggcgatggttgcagaatgcatggaaacccatcagctaagagatgaagtgcgcatgcgccttaaagcccgtacaaactggagagttgataaacaacttttgtaa

SEQ ID NO: 271622 - DNA, 306 bp, Klebsiella pneumoniae; identical to SEQ ID NO: 194950

SEQ ID NO: 271623 - DNA, 357 bp, Klebsiella pneumoniae; identical to SEQ ID NO: 194952

SEQ ID NO: 271624 - DNA, 756 bp, Klebsiella pneumoniae; identical to SEQ ID NO: 194953

SEQ ID NO: 271625 - DNA, 186 bp, Klebsiella pneumoniae; identical to SEQ ID NO: 194954

SEQ ID NO: 271626 - DNA, 570 bp, Klebsiella pneumoniae
atggcaacaccggactgggaggccatcgagtcggcatactgggccggagtccttgttctccgtgatataggcgagcaatacggcgtaactgaaggggctatcaggaagagagcgaagaagtttggctgggtacgcaaggccggtacgcaggtacgcaaaagcggtacgcaaaaagtggaaagtgtaaacctgcgtaccaagccaaaaaagccaactcagaaaattgaaaatcaaattgatttcactcggcaaacaaatgaaagcactaatgacgaatggacgctaaaccctgatgaatacgggcttacagacatgcaggccaggttcgttaacgagtaccttatcgacatggataagacagccgcatataaaagggctggctacaaaagcaagggtgaaacagcagcggctgcagcacgacgcttgtatcggaatgtatcggttaatcaggctattctaatgcttctaggatgcttagaaatgccagggtttctcgttatgtccatcacctgcgtaatgagcgtcaaaaactctatgcggcagagctggacgacgttatcgggcagttga

SEQ ID NO: 271627 - DNA, 570 bp, Klebsiella pneumoniae
atggagcaaggtttagatatttcaaaattagtgccatttgttattttttttcttggtgttgcatgttcacccataattgaatggttaaaagaaaaatcaaaggcaaagcgactcagagatttagttatctcatcattatctgatgaacatgaaagaatggaagacgctataaaatatacaataaatactattaagattatcgaagtatcagaaaataacattttaaggctacatactccaataaacctaaaagttttagaacgatactatcttgatatctatccagcgatcacaaaagaacagaggagagggtttaactgtttgatgttgcaaataaactctatagaagagaaatacaattacattaaaaataactggaaagaagtagagccggataaactcattcttaaaatgcaaagcatgttgcactcaattttccttgcagaatatttcctttacgaaatgtcaactcagaaatgccattttaaattcccaacgcagagtgatagagaaattattaaatcagtgatttcaaggtatggcattacagataaggattatattatctaa

SEQ ID NO: 271628 - DNA, 513 bp, Klebsiella pneumoniae
atggttgataaagatagatttctacaaaaactcaatgagaataccgaggccaaactttcagaagacaaagagaaggatgctcagcttaaggaaaaaatagataatgctaaaaaagttgttgatttatacttgtcctctattgagaatttaatcaaaagtattaccaattgggtttctggaaccccttttgaaataaatatatttgataaaaaattatctgatactacacgtggaatcaacactccacttttttatacagctaagtactttagcctcacgcttggaaacataaatataacttttgatccattagggtgtcttaaataccctcacaatggtttaatcgatattgatgtaaacgatttgaaattggttaaagcatatgacaatatatttttgttgcttgattccaatgggaatggaaaatggtatttttccgataatcgaaaaaaatatccagttgatggtgactcattcagaagttttcttcttaaaacgctgaatatcgagtaa

SEQ ID NO: 271629 - DNA, 267 bp, Klebsiella pneumoniae
atgagcagaaaattaacaaaaaaagagcaggcctgggtggatgaggtaaacgcagttctggcacgttgcccatctccgaaaaaaataggcttttacaccatcggcgacccgtcaatcgcgctctacgacctgcgcaggctagatgaggtaacggcaatgctggatggtcgcaactcatctgactggtgtaccgccgttcaaaaaatcggtgcgggctttgatgaaaccattgattttccgtccgccgtcgaaagcacagccggataa

SEQ ID NO: 271630 - DNA, 1314 bp, Klebsiella pneumoniae
atgagcggtggagttgagcttgatatggatgtcatgaaagcactaaggtggctcgcagaaacgactactgatcctcgaggattttccgagagattggaaatcgctcaggataattatattaaagaaacatcaaagaaggtgaatttcggtgctccgtttgataaaagttggtatggcgatgatgttgtcgctggttttttttcgcaagcgaagtctttaattgataatcgacgagcctttgaaatatctaccgcgtcacaaatcattccttgggtgaagcaattaggtcaaaacgtaaacattcttaatgaaatatcaggagctaaagagcgggctaaaagaatgctcgatagcaccagtgtttatccagatacagcattgtttgaattaatacttgcagggaattatgccgcaatggggtatgatgttgagtttattcctgaacaaaagggaattgcaaaaaccccggaatttaaatgtagttttgatggcggggtggagttttttgttgaatgtaaaaggctccaaaaagggtcatatgcaactcaggaagaacatacacactttaccagagcccatttaacagaacttcgaatccattctaaaaggatgagtgtctggatggatgtgacctataaaagtgaagtcaaagacactcctgataattatcttgtgaatcatttaagtaactattacgggaaagattactcctgggatgatgattttggtgttggatttgtaaaagcagtaaatttaaattcggcaaaatatgatgtggaagttaacggatcactttcgtttcatactaaactagcaaggttacttaaaggtggtccgcttggtgatgacttttataatatctttgcgtctggtaggcctgatgagcgtgaccaacggtttatttcaaaaatcaaatacgcgtctttgttgacatggcggtgtattaatgaaaaatccctggaatgtcgttctcggcatattaaaagcacattggctgaaatagaaaagcaaatttctaacaatgggcttggtgttggtcatgttgcaatagatgctgatgttcaaaagaatgttgcagataagcggcgtgagaaaaatattgaggttacgacatcattcaagcttgagtcaaagcttgtacggttaaatattcattaccttgtccaacgtatagaagaaagtcattcttggatggttgatgaaactcttgactatttatataccgataggattttagagtattttattccagctgttcaaatatttcctgaggccgatgcatttaataacgacttgccaggctggcatcaatga

SEQ ID NO: 271631 - DNA, 219 bp, Klebsiella pneumoniae; identical to SEQ ID NO: 102292

SEQ ID NO: 271632 - DNA, 1023 bp, Klebsiella pneumoniae; identical to SEQ ID NO: 102293

SEQ ID NO: 271633 - DNA, 765 bp, Klebsiella pneumoniae; identical to SEQ ID NO: 102294

SEQ ID NO: 271634 - DNA, 3066 bp, Klebsiella pneumoniae
atggcaaggaggcagattctttctctgtcggaaagagaatcattactggcattaccggacgatgagttaacgctgacacgaatggcctatttcagtgagcatgatctggcgcttatcagtgctcaccgtaaacctgccagccgttttggttttgccgtccttctttgctatctgaaaaatgtcggctttgcaccggataaaaaaatcccaccctctgatgcgctgctgaagcatatcgccagcaggctaaaacttaccggggatctctggcctgcttacctttccggcagggataccacccggcgcgagcatttaaccgaactgtaccgctatcttggcgtaaaagcgttcaccggcaaaatacagcaggactgtattacacacctgctgccgatggcgacgcgcaccgataaaggtattctcctggccgaagaactgctggtctggctccggaagaacaacgtgataatccccgcgattgatgtcgtggagcgtacctgtgcggaggccatggctggcggcgataaaatcgtatttcagaccctgaatgccccgttaactccggctcacagggatgcccttgatcgtttacttgagtcctcagataatcagttttccagactgacatggcttctgcaaccgccaggtaaaatcaatggtaagaacgtgctacaacaccttgatcggctcagtagcattgaatcgctggcgttaccggaaggtatagatcgtaccattcaccagaaccggttgctgaaactggcgcgggaaggccggaagatgagtagccgggatttgacccgattttcagcagcccggcgtcatgcgatcctggtgtgcgtgctggaagaagcccgagccacactgacagatgaagtgattgagctgcatgaacgcatgctgaacagcctgttcagcaaagccaaaagaacacaggctgagcgccttcagcagaccggaaagctgatccagtcaaaactgaggcagtacatcgatgtcggccaggcactgtctgaagcccgtgattccggtggcgatccatggctcgcaatagaaaacatactgccatggcctgaatttgtcgccagtctggaggaaacacgccatctcgccaggaaaaataattttgatccgctgcatattattactgagaaatacagcacattacggaaatatgccccgcgcatgttatccgctttacagttagtcgccaccccggcagcgcaacctctggctgatgcgctggttgtgatcaaggatatgtaccggaagcagtcacgtaaagttccggcgacagcgccgcttgagtttgtccctgaaagctggcgcaaggtggtgattacacctgcgggtgttgaccggcagtactatgaattttgtgcgctcagcgagcttaagggggcattgcgctccggggacatctgggttaaaggctcacgccgctacaaaaactttgatgattacctcattcccgaaaaggactttgacaaactcacaccggcgctacccctgcccgtatctgctgattatcatgagtacattaccagccgtatgaccctgcttcagtccagacttgaagaggtcaatgccatggctgcccttggtgagctgcccgatgtggaaatatctgacaggggagtaaaagtatctccgctggataattgcgtcccggtgctggtttcaccgctggcagagctggtttacagcatgctaccgcgtcctaaaatcacggaaattctcgatgaggtaaacagctggacgacgtttacccgacatttttcgcatataaaaaatgacattacccgtcccgatacccgcctgctcctcaccaccatccttgcggatggcatcaatcttggtctgaccaaaatggcggaagcctgccccggaagcaccaaatcatcactggaggatatccaggcatggtacatccgcgacgaaacctattcagccgcccttgcagagctggtaaacgcgcaggggaaaagaccacttgcggcattctggggagacgggacaacgtcatcatcagacggacaaaatttcagaacaggcagctcaggccgctacgcagggcaggttaacccgaaatacgggcaggagcccggacgtcagttttatacccatatttcggatcaatacagcccgttttatacctgcataatcagtcgagtcagggattcaacccatgttctcgatggcttgctgtaccacgaaagcgacttggaaatcagggagcattacaccgatacagcgggtttcaccgatcatgtctttgccctgatgcatctgctgggatttgcgttctgtccgcgaatcagggatctccacgacaagaagctgtttatccaagggaaagcagaccggtacccggcgcttcagtcactgatatcaacgaccagcctgaatctgaaagagatcgaaattcactggcgtgaagtgctgcgtctggcgacctcgataaagcagggaaccgtgacagcatctctgatgctgaaaaagctggccagctaccccaagcaaaacggacttgccaaagcactgagagaaattggccgcattgagcgaacgctgtttatgctcgactggttccgcgatcctacactgcgtcggcgagtacaggcggggctgaataaaggagaagcccgtaacgcgctggcgcgggcggtattcctgcaccggctgggtgaaatcagggaccgaaaaccggaaaatcagagttatcgcgccagtgggcttacgctgctgacggctgctatctcactgtggaataccgtctatatggaaagggcgatcgatgccctgaagcgtaaaggggtgaagatcaacgagcaactgctgtcacatttgtcgccgttaggctgggagcacattaatctgacaggggattatatctggaaaagcaaccgaataccggcttccggtaagtttcggcgcctgagaccagctaaagtcgaaaggtcaaaaaatagccttaacgaaaggaagggacttcccctgattatgcgcctgattaactcttgtgcaatcatggggtacacatcgtcccggaggaattcgttatga

SEQ ID NO: 271635 - DNA, 1173 bp, Klebsiella pneumoniae; identical to SEQ ID NO: 139381

SEQ ID NO: 271636 - DNA, 336 bp, Klebsiella pneumoniae; identical to SEQ ID NO: 139380

SEQ ID NO: 271637 - DNA, 954 bp, Klebsiella pneumoniae
atgctgctgcgcctgatccgccttcggggtcagcgtgcgggtggttttgccatcagacagcgtgacactgtcacccgaaacagactgcacctcccagatactgttggccacatagccgcgctccgggtcacttttgctgaagcgcattcggtccccctgagacacggtgatcttttcctggcgataaagcgtcacaccttcagcagaggcttcacggggagagatatatcgctcctttccttcactgtctgtcagggtgatcagctgattatccttatccactttgctgatacggtggtatacgttatcaaccagcgccaccgcctccttgtgagccgtccaggtcgacagtttgcgcagttcaccgtcacggatgttgctcgtgaccagcaccggcagggtgatttcctctttgccggtttccccgttctcccgccgtgcgtcatggatcagactgttcagcgcccgccggtccttattcagatgggtgataatcagcgtctgcgactgtgcctccggggtccgtccggtatagtccttcaccagcgcctcgtagagcgtcgcgggctgacctgccggcagggtttccccctcgctcagcgccttttgtatcgccttttcctgcgccggcgtgaattccaccacagaactgcccggcgcccagacgccttcttttctcggcacctgctccggcgtgacctgctcgatggtggtcagggcgcggtgcacatcccgctcaatcaggctgtagaccgccggtcgcagctcaggcacctggcgcacaatctctttcatgatggcaacgtcggcggcgctgcgctgctgcatgagcctgaacggctggcccggcgcgatgggctgcagctggtcgttatccccactggacaccgcccgtccaccgccggcgacgatgagggagtgggcttttgccatatcggccagccccaccattga

SEQ ID NO: 271638 - DNA, 783 bp, Klebsiella pneumoniae; identical to SEQ ID NO: 158516

SEQ ID NO: 271639 - DNA, 327 bp, Klebsiella pneumoniae; identical to SEQ ID NO: 235425

SEQ ID NO: 271640 - DNA, 543 bp, Klebsiella pneumoniae
atggcagcacgtggcgttaacaaagtcattctggttggacatctgggacaggatccggaagtgcgttacatgcccaacgggggcgcagtggccaatctgacgctggccacgtctgaaacatggcgtgacaagcagacgggagagatgcgcgaaaacaccgagtggcaccgtgttgtcatgttcggcaagctcgcggaagtggcgggcgaatacctgcgtaaaggcgcacaggtctacattgagggccagctgcgcacccgcaactggcaggacgatgccggagtcacgcgctacgtcaccgatgtgctggtcggccagaacggcaccctgcagatgctcggcggccgccgtgaatccggtgagcctgagagcgctgcgcagccgcagagtcctgccgccccggcacaacctgctcaggccccggctaaatccccgaaagcaaagggcggtaagaaaggccgtcaggatgcggctccgtcgcagcaaccgcctcagccactcccggatgatttcccgccaatggatgatgacgcgcccttttaa

SEQ ID NO: 271641 - DNA, 249 bp, Klebsiella pneumoniae
atggaccacaacgttttgtccccgcttgaatccctgccggatggcacgtttacccgcgagcaggctcaggttgtcgcagcgcagtatcagaatgtggcgattgaagatgaccaggggacccattttcgccttgtcgtccgtcatcaggatgacggcagcatgatctggcgcgtctggaattttgaaccgggcggtgagtacctgatgaaccgctatatccgggactacggagtacgcaaaacgcaataa

SEQ ID NO: 271642 - DNA, 543 bp, Klebsiella pneumoniae; identical to SEQ ID NO: 92454

SEQ ID NO: 271643 - DNA, 249 bp, Klebsiella pneumoniae; identical to SEQ ID NO: 92455

SEQ ID NO: 271644 - DNA, 531 bp, Klebsiella pneumoniae
atgcgcacaatgaaagtcaacaccgccactcgtgaatcagacgaacagtttaaaacagacaaatatctgcgctgtgccgtaaccaatggtaaagctcgccttgattttatcccggacctcttctttacgccgttagccgatactatggccgcgaactggttacgccagcattctgaatacgacggcggttcctggtcttactgggttattccacagggtgtcggcgggaatattgcacccaacagcatccagttcattaccacgcagaccggatatatcgcacctgaaggtgagcagcgttacaggatgtgcatcccgggaaattattttgaaggtgaggttagcgctgatgcagcaggcattattgccacgctgatgattatgaacaggttgtcctggcacgtggctgaaatggggccgcaatatgaccagatctgcaggcgtctggtttcacggcaggatgcactgaaggattatatcagcattattcatcatcccgaacggcatttaatatggcgggcaattgattaa

SEQ ID NO: 271645 - DNA, 183 bp, Klebsiella pneumoniae
atgactatattaattcaggattcattacgtcgcgccgttgaagctgcctccggcggtgcgcagactgtactttataccagcgccggtgacccgtcgtttgtgaatattattcccaaatttgacgtcagcacgattgatgcatcgctggcgctggttcgggaacgcatccggcatttattgtga

SEQ ID NO: 271646 - DNA, 420 bp, Klebsiella pneumoniae
gtgggaaccagtaatgatattcacgatatcactgctacaaatattggtcttactggtaacgagcaggtcagcaccattctgaccacgcagtttaaaatctacaacgtgacaatcagtggtatcagcagcgtcaactatatgactccaggccgtggctgggatgaagttaatgcaatcctgaaatcgtatgccgggtttggtgatgcttcccgctataaggcaggtaatgtcagcaacatcagtattaataacatcattgagtgtgcatcaaaaaattacagtgtcgatataaccctggagggccggaatatccgcgtcaatcgttatatgaaactggatacccgtgcgaaaacaaaaggtgcgctgaacatcagcagctcagcggccccgtacgtcacaacctctaatattgtggaataa

SEQ ID NO: 271647 - DNA, 156 bp, Klebsiella pneumoniae
atgaaatttcgcttccagcgcacacaccatcaggcagaacatttcctgcatgttcgcgatgtcggtggcctcgtaccgggcgcagattttccggcagtgctccatgctctccggcgttcgtatccgggccatatccagctcactggcggcgagtga

SEQ ID NO: 271648 - DNA, 192 bp, Klebsiella pneumoniae
atggcattcatccagctgtcgctgctggggatagcggcggaagtggtgacgggcaacacgctcacgatgcagttccggcgggtgaggtataccccggtttactacctcaatgactttgaaaaacgactggcagatctgcgccggttcagggctatgcgggactttatgcgcggaatacaggaggccgcgtaa

SEQ ID NO: 271649 - DNA, 2973 bp, Klebsiella pneumoniae
atgagtacaactgaaaaccaaattgagctagaccttattgccaagctggctgagttaaaatatatacttcgacctgatattcgtgatcgtgcttccctcgaaaaaaatttccgggcgaagttcgagactcttaatagagtgaatctcaccgatagtgagtttcagcgtttgcttgataccgttattacccctgatgtatactatgccgctcaaaaactacgtaatatcaatagtttcgagcgagatgatggaacaccactgaattatagtctagttaacattcgtgactggtgtaagaacgactttgaggtcgtaaaccagttgcgcatcaacactgagaacagtcatcaccgctatgacgtgatgcttctcataaacggcataccagtggtgcagatagagcttaaaacactgtctgttagcccacgccgtgctatgcagcaaatcgtggattataaaaccgatccaggtaatggttacggaaagacactgttatgtttcattcagctcttcatcgtcagcaaccgtactgatacttggtactttgctaacaataatgcgcgacattttagctttaatgccgatgaacgctttctacctgtctaccagttcgccagtgaagataacaaaaagattaccttgctagagagcttcgccgataagttcttagctaaatgtacgcttggacaaatgatcagccgttatatggttttggttgccagtgagcagaaacttttgatgatgcgcccgtaccaaatttatgcagtcaaagctatcgtcgaatgtattcatcagaattgcggaaatggctacatctggcataccacagggtcaggcaagacgctgacatcgttcaaagcatccactttgctcaaagataatccagacatcgaaaaatgcctttttgtcgtggatcgtaaagacttggatcgccagacccgggaagaatttaaccgttttcaggaaggatgcgtagaagaaaacaccaatactgaaacactggtgcgccgacttttgtccgacgactatgctgataaggttattgttacgactatccagaagttgggtctggcgctggacggaacaaataaacgtaactacaaagagcgtctggagccattacgagacgcccgtatagtatttatcttcgatgaatgccaccgttctcaatttggcgaaaatcacaaggctataaaagaatttttcccaaacgcccagctttttggcttcacagggacgcccatctttgagccgaatgccagctaccagcaaatcgaaggccagcaagccagcctacgtaccactaaagacttatttgatcagtgtttgcaccagtacaccatcactcatgctatcgaagatcgcaacgtcttacgctttcacatagactatttcaaacccgaaggaaagaatccacctaagccaggcgaagggatagctaaatctaaggttatcgaaactatactttccaagcacgattctgctactaatggacgcaaatttaacgctgttctggctacagccagcattaacgacgccattgaatattttgagttattttccagcattcagatgcaaaatgcggaaaaagatgctgaattccgaacattgaacatagcatgcgtgttttccccaccttctgaaggtaacaaagacgttcagcagatacaggaagatctacctcaggagaaagaagataaccagcaagatcctgaaggtaagaaagctgcacttacccgtatcattgccgattataatggccgtttcgggaccaatcatcgcataagcgaatttgattcttactatcaggacgtacaaaagcgcatcaaggatcagcagtatcccaatacagacttatctgctgcgcaaaaaattgacatcaccatcgtagtggacatgttgcttacaggatttgactccaaatatcttaatacattgtacgtggacaaaaatctcaaacaccatggtttaattcaggcattctcacgaactaaccgtgtactcaacgataccaagccatacggcaacattctcgattttcgtcagcaacagaaatcggtagaaggagccattgcgctcttttctggtgagcaaattgataacccgcgtgagatctggctggtagatgccgcgcctaaagtgattgataatctgcaaaatgccacgctaaagctggccgagtttatgcaatcacagggactgaataatgcaccggaagaagtagccaaccttaaaggtgatgccgccagagcgcaattcgtaaacctgttcaaggatgttcagagacttaaaactcagcttgaccaatataccgatctttctgaagagcagaagcaacagattgaaagcatagtaccgccagatcaattgcagggatttaagggcgtatatctagaaacagccaaacgattgaaggaacaacaggacaaagaccatacgccaccagaagtgcaacaactcgattttgagtttgtactctttgcctctacagttattgattacgactatatcatggggctaattgctaacctgactcagcaaaaaccaggcaaactcactctgaatcgcgaagaactcattggcctgatccagtctgatgccaagtttatcgatgagcgtgaagatattgccgagtatatccgtggcctgccggtaaatgaagcattaaacgaaaaacaaattcgaacgggatttgaaaagttcaaggcagagaagaaagcgaaagaactctttgacatagctgtcagacatgaactcgctcctgatgccctgcaagtttttgttgatgaaattctgcgccgacgtatcttcgacggcgaacgactttccgaattcatggctccgctgaacttgggctggaaggcccggacaaaaaaagagttggcgctgatggaggatctagctccgttactgtacaagttggcgcaagggcgtgagattacaggactatctgcctatgaggatgggaaataa

SEQ ID NO: 271650 - DNA, 237 bp, Klebsiella pneumoniae
atggcaagcatttttgctattgacacgcagtggactagtacaaattttaatttgcatattagcacgggcagcaaattcaggctcgtgggggaaaactctctaattttaatgtactgtggcttgatcaacgaatttctgctcatctctcaggttggtctgtttgttgagtttattaaaaacctaactggtaatctgtttaaggccaccaccaaatattctctggagcaagtaaaatga

SEQ ID NO: 271651 - DNA, 1260 bp, Klebsiella pneumoniae
atgagtggagataaaaaattatcgttggtgcctcgtttacggtttcctgagtttcaagaaaaaaatggttgggagaaacatcctctttcagaaatgcttgaggaagtgctgcgtcccgttgtgatgaaagatgacgaagattactctctcgtcaccgttaagcgtcgatatggaggcattgttttaagagatgttctcaagggaagagatattctcgtaaaatcgcagtttcgtattaagaaaaatgattttctaatatccaagcggcagatagttcattgtgcatgtggtgttgttcctgaagaacatgatgatgcgatcgtctcaaatgagtacacaattctacgagcgaaagggaattgtgatatatgcttttttaattattttgtccagcaatacatagttggccgatcatttttggaatgcagcgtaggcattgttattgagaaaatgttgtttaaacaggaacaatggcttaagaaaaaattctttttccctacacttcctgaacaacaaaaaattgctgattgtttatcttcactggatgagttgctcacagcagaagtccagaaacttgatgctttgaaaaaatataaaaaaagtatgttacaacagttgttcccccgccaaggtgaaaaagtgccacgactgcggtttcctgagtttgaaaagtcagaggcatgggtagaaaaagagcttcatcaactaggtgagcttatctccggtttaacatatagccctaatgatgtaggtgaaaatggcctattagttttgaggtcgtcaaatattcagaacggcagaatcgttttggacgataatgtttatgtgcgtgaagacataaatggagctaatctatcattagaaaatgatattttaatttgtgtaagaaatggttcaaaaaaattaataggaaagaatgcactgattccaaaagggatgcctttatgtacccatggcgcatttatgaccgtttttagatcagattttgcaaaatttgtaattcaactgtttcaaactgatgtgtatgaaaaacaagtggctgctgatttaggtgcaactattaactctataaatagtaaccatcttaaaaaatataaattttttgttccaaaactacaggaacaggaaaagatcgccaattgcctttcctatatcgacaatttacttgaagcccaacatgataaaatcaaaaagttaaaagaccacaggaatggattactacaacaccttttcccaactgattgggaggtaccatcatga

SEQ ID NO: 271652 - DNA, 1173 bp, Klebsiella pneumoniae
atgaagccgggaacgatcctagctgacttgccagcactgagcagttatttgcgtaaggaattgacaaacaaaaacacgattttaatctacgcatataatggtactggtaagactcggctgtcgatggcatttaaagatttgggtaaaaacacaattcaccgtcctttttcggttggtgatcgtgtaggccagtcactcactattaccgaaaagatcggtgataccttatatttcaatgcattcaccgaagatctgttccattggaacaatgatctggaaggtgacgcggaccgacgcttgctgctcaacagggattcgcgattttttcagggactgtttgagctggaaatggataaccgcatacggccattgttgcagcgttataccgacttcgactttcgtattgatacagaagaatgggcgatacgcttctcacggatcgtagaagggcaagtcattgataatattaaggtttctcggggtgaggaaaatatcttcatttggtgcttcttcttagccatcgtacaattagcacttgatggtgctgatgcttaccagtgggtaaaatatatctacattgacgatccaatatcttcactggatgagcataacgccattacagtgggtagtcatctcgcacaactattgaacaaggctgataacccgttaaaagtggtgatctcgtctcatcatcctctattcttcaatgtcatgcacaacgagcttgacgcacgtaaatccaaaaaggtctccgcctattttttatcaagagccaaagttgatgacagttattccctcgcctatacaggtgcgacaccgttctttcatcatgttgcgatactgaccgatttgtataatgcagagcaatcaggcgagctatatacttatcatttcaatatgttgcgttcagtgctggaaaaatcagccagcttccatggcttctcaaatttctcagcctgcatttcacaagatgctgatgaccctgaaagaattttgcattcgaggcttatcaacattctgagccatgggaactattcgctgtttgagcctcagcctatgcttgacgagaacaaaacttatttcagaaaaattttgcatgatttcctgaatcgctatccatttaatcctgatttatttcctcagcagatcgaggaaggtgaagaaaaactatga

SEQ ID NO: 271653 - DNA, 1635 bp, Klebsiella pneumoniae
atgactgagtttgaaaaacaaaaactgggcaaaacgctctggaatatagccgatcaattgcgcggagccatgaatgcggatgactttcgcgattatatgctggcttttttattccttcgttatctgtcggacaactatgaagccgctgctcaaaaagaactgggaccagactaccctaaacagaaagatggggagcgttatcctccactgactctgtggtatgagcaaaatgagcaggatattcctgagtttgagaaattgatgcgacgtaaagtgcattatgtaatcgaacctcagtatctttgggccagtattactgagatggcacgaacccaagatgtgaaattgcttaatacattgcaggcaggtttcaagtacattgaggaagaatccttcgccagtgttttccgaggattgttctcggaaatcaacctggcctcagaaaaacttggcaaaacatacggcgacagaaatgaccgtctttgtaagataatcaaagaacttgctgaggggcttaagcagttctctaccgacagtgacacgttgggtgatgcttacgaatatctaattggtcaatttgcagcaggttcaggtaagaaagccggggagttctacacacctcagcgcatttcagacatcttatctgccattgttacgttggatagccaggaaccagctactggtcagcgttctcatttagacagtgtgtttgattttgcctgtgggtccggatctttgctcctgaatattcgtaagcgcatggggcagcatggtattggtaaaatatacggtcaagagaaaaacattaccacctacaacttggcacgtatgaacatgctcctgcatggggtgaaagattcagagtttgatattttccacggtgataccctgctcaacgattgggatatgttgtgtgagaccaacccgtcgaaaatacctaagttcgatgcggtggttgctaatccgccattcagctaccgttgggaacctacagaaacattagctgatgatgtgcgttttaaaaatcatggtctggcacctaaatctgctgccgatttcgccttccttctccatggatttcattttttaaaagaagatggtgtaatggcgataatcctacctcacggtgtgctttttcgaagcggtgccgaagctcgtatccgcacgaagctactgaaggatggtcatatcgatacagtaattggtctgcctgcgaacctgttcttttcaacaggtattccagtatgtattctggtgctgaaaaaatgcaaaaaaccagacgatgtattgttcatcaatgcatccgaatacttcgataaaggtaagcggcaaaaccagctacttagaacagacgaaatgcctaacggtgaaatagggcacatcgaaaagattattcatacttatcagtaccgcaaagatgagcctcgctatgcacgtcgcgttagtatggaagagatcgagaagaatgattttaatctgaatatttcacgctatgttagtacggccgaagccgaagaagaaataaaacttgattcagttcatgctgaattggtttctctggatagtcagataaaattagcaaccaaaaaacataacgaatttttaaaggagctagggttacctctcttaccataa

SEQ ID NO: 271654 - DNA, 213 bp, Klebsiella pneumoniae
atgacctttcttaaaatgctggtgaccgccctgggtcaggccctgtcctggtgtggcgggcatcaggccagactgtatattgaaacccaatttcgtcaggccggttacgatgacgacagtattgatgcagccagagaagcagtcacactgctggtgactgcgctgataacggccttgatggcgcagatattacggatcctggacaacttctga

SEQ ID NO: 271655 - DNA, 324 bp, Klebsiella pneumoniae
atgccattcacactacccaatgaatgggggctacaaagcgatatcaccccacgatttggcgcaagattagttcaggaaggcaaccggctgcattacctggctgacagggctggtttgacgggggaaattaccccgaagcaactgcagaaactggctcaaactttcccgctgtttatcagtcaattggaagcaatgctgcgctccggtgagctaaattcacagcagcaacatcaggtgaccattcaacttgcgagtctaacctgtatagctgatacccgtggtagctgcggctacgtttacatttctatttatccaaccccttaa

SEQ ID NO: 271656 - DNA, 321 bp, Klebsiella pneumoniae
atgcacatttcaactgtaccggccaaggagtcggtttcgtcacgtctgtcgcccgtgcaggtctggcagcaacttttaacgtatctgctgaatcaccattacggcctgacgcttaacgacacgccattccataacgacacggccattcaggagcatattgaagctggtattgcacttgctgatgcagtgaatttcctggtggaacgctatgaactggtacgcactgaccgtaagggattcacttggcaagatcagacaccattcctgaccaccaccgatattctcagagccagacgagctaccggaataataaatacttga

SEQ ID NO: 271657 - DNA, 177 bp, Klebsiella pneumoniae
atgcaccaccatccggttaaatcttcccgaattatctccgtcgcctacgatgacgcctccgccacactggaaatctatttctatcaccagccgccattacaatataccggggtcccaccgcgtatttttcatgatttttacaggtggtgtcaaaaggccggtattatgacggggtga

SEQ ID NO: 271658 - DNA, 138 bp, Klebsiella pneumoniae
atgaatccttatttgaaagaaaaaatagcaatcggcgccataggaattagcatcgcatgcattagtacgattgcattcgcggtaaccctgaaacttatcgacgtgtttatttttttaaggacgatcggtaatgaataa

SEQ ID NO: 271659 - DNA, 969 bp, Klebsiella pneumoniae
atgactaaatcacctatcaaatgggctggcggcaaaacccgcgtcatgccgcagctgctgatgcaactgccgaaagccgattgtttaatcgagccgttcgttggcagcggtaccgtgtttatgaacacggaataccgccgttacatcctctgcgatagcaatcgcgcgctgatcaatttctttcgtgtgctgacttccaacaccgagcgactaattgataccgctcgcggaatgttcctgggtggcaataacgaagagcaatattacaagcgccgtgcgctatttaactccatgcagtggagcgatacgggcaaggctgatactgctttactttatgccgctttgtttctgtatctgaaccgacattgctttaacgggatatatcgcgtcaatcagatgggtgatcataacgtcccgttcgggaaatatggcgcaccttactttccggctgacgagatgcgccgctttgccgaaaaggccaacgacacaaaagccgttttcattgatggcgattttcgtcacaccatcccttacgttatgcagctggcatatgacgcggttatttactgcgaccccccctacattccagccagcaagacagctaacttcactgcctacggcaagccatttaccctggacgatcaccgcgacctggttgcaaccctgctcgatgctcatcgccagcacggcacccgcgcggtgatatccaacagcgacaccccggaaacccgcgagatctactccgctttcaatctccacgccttcagcgttcgccgctctgtcagcgccaaaagccgcgatatggccgttgaagtgatcggcgttcttcgcggcgatgtgggtcgcaactctggcgcatgtggagcttggacgagcaccattgaaaatctgcggccggcggcgatatggatcgggtttgacctggccgccggattcgataacggggagccatctgatgaacacgcttga

SEQ ID NO: 271660 - DNA, 1041 bp, Klebsiella pneumoniae
gtggtcgcttattacaacgaaatagacccattcgccgctcaatggctgcgcaaccttatcgacgccggccatattgcgccaggcgtcgttgacacccgttcaattgaggatgtaaccccaaatgaccttactggattcacccaagttcatcttttcgctggaattgcggggtggtcgctcgcgctacgtcgcgcgggatggcctgataacagacccgtttggacaggttcatgtccctgccaacctttcagcccagcaggcagaggcggcgggtttactgatgagcggcacctatggccctccatgcattggcttgtcggccagtgccgccctgtcgtggtctttggcgaacaatctggcagctctcacgcaaacaactggatcgaccttgtacaagctgacgtggaagccctgggctatgccttcggggcggtcgcgtttccgtctgcgagcgtcggtgcgccgcaccagagagaccgcgcttattgggtggccgacgccgacggcgagcaacaccaagaacgctatacggaatgccgaaagaataatggcgaggaaagatgctggcaggcaaagcaatttacaggacgtggtaaatcttgctgcatggccgacaccgaccgcatcggatggcaaggggggatatcagggcgggaggatacgaaacggaaaattatcgacggacaggctcgatgtggctgcgcagcttgcgggttggcccacgccaaccacgagcaacgaccgctcaccatgtccgcaggaagctatgcggacgtatcgagacaatggaacaaagatacagaagaggttgcaggatgtagcggcgttgtgcggcccggcccggttaacggcatctggcgagatgctgactggctccactgccaggatggaaagtggcggccaattagacccggatcattcccgctggctgatggggttcccggcagagtgggaagactgcgcgcctacggaaacgccatcaacattgaagcggcgacagcgttcataaaggcttatatggcggcggtgggttatgtctga

SEQ ID NO: 271661 - DNA, 2571 bp, Klebsiella pneumoniae
atggcaaaagtgaatgaagtatctatctgggaaaatgagatttaccagattgagcgaggggataaagttgcaggtgggcctgggggagcggctaacctggccgcatcacagcttgctaacagaacgctcttcctccgtgattctctggaggctatttctacagggatgcaaccttatgctaacaaagaaaaggcgatggcggaccttgttgccggtaagctttcagaaggagacagggtttccgttcgctctgatgagaggagtgtatggatagatgaatatgtcgttgctaatggcggactggtcaaaacagggaaaagcctgattactcaacaggccatcactgacattatccagatgatttataatgacactgccgggcagtctcacggagccaacctttttgacagggataaagcaaaagagggggcgtttattaatgaactcggcggactgtctgacaacgcagcatattttgccagtgatcgaatcccggtattaagtaatgaaaaatatgtattttccataaatgtcgctcacctggcattttacgatattaacggaaatatgctttcaagattgaccggaattatcgcgggtcagccatttaccacaccagtgaacaccttcagtcttgccttctcccagacgctcagcactggaaagggggggcagatgctggtcagaggtgaatctatgcctgacagctatcgctcttttggcgcagtagatgcagctactgcaaaaagagccgccatgaccggagcgttagacgctgattacagactcagcccactggtgcgcaacctgtttgataaaaatcgcgtcaacgaaggatatgcactgtcaacaaatggaacgctgacaccaaacgtcgcgtattttgtgacagattacatcccggtaatgccgggggcagaatatattctttcgtcagggacgcaggtgctctgtttttatgaccaggacatggcaaaaaccagccacatctccattggttcagccactgcatttacggtaccggagggttcgttttatctgaggtttcagagcacccctcttactgcaaaagatgccctgatgctgattcgaggcactgcgctgccgtctgcctatatcggattcgggacgctgacaaccgcggaggtcactacgctttcacagggaatagcgtggggggttttggatggcaacatgcctgtgggacggaatctgtttaacaagggcgccacgcttgataattacgcgttgtcaactacaggggcaccctatgcggcggccggatattttgttacgccatttatcccggtaaaaccaaacacgcagtatatcgccagccgtgcatccggtgtggtcgtctattttgacatcaacaaaaccaaaattttaaacacgacatttgcagccagcacggcattcaccacacctgagggggcggtgtacgtacgttttcaggttttcggcctcgctgataaaaacaccctgatgctgattgagggctctacactgccgtcgtcttacctgtcgtttggttcgccgacgtcaacctacgtcgatacacaggcattgagcgccgcgcgttcagtagcactatccctgcaaaaagtggcggtgaatctctataacagcgagttggcgcaacttaatactgccgtatcgtaccagaccggcgggacgtcggcggcgaccggttattttgccacgccgaaaatgatggttacgccgggagattattttgtctcaaactacggttccggcggcggtgcattctacaaaattgacggcacattccttagcgggttccagaatctggccgcaaatacgccgtatgctgttcctgacaatgcatattttgttcggttccaggtctataacctaacccgcgttgaaagcctgatggtaacacctggccaggcgatccctgacgggtttattccatttggtgggcaaacacaggaattgccgtggcaggggaaaaagcgcatcgatctgggagacagtattactaataccggaaacttcattgcccctctaaacacctacacgggaatgattgcgctggcgaattatggtgtaccaggacagggggtgagaactatggcggactctctgaacgaaaccacaatagcgtcagctgatttcatttcaatcctgggcggaacaaacgattacgggggaaatcgccggcttgggacaattgcagacgccagagcggattatgacgactcgactgttaaatcgttttattacgacgtgttctacgtactgaacaaaatctacaccctcaaaccgagtgtacgagtaatgttcagtacgccgctgaaacgcggggcatttgagagccagcccgtttaccctgcggcgaactcagcaggcgttaccctgccgcagtacgttcaggccatcaaagaggtgtgctcattgttcagcgtgcccgtctgtgatttgtttgctgagggcgggctgaatctctacaacctgagcgtttacaccggagacaatctccacccaaacgtcgctggcggggagttgatggcgcgccggatggcttcagtaattaacggtctctag

SEQ ID NO: 271662 - DNA, 318 bp, Klebsiella pneumoniae
atgaaaacttgcaaccttgttgaaatgcttcagttcagcctggatgatgaccacatgaagaaaattatcgccagcgtcggagaagaaggggcattttcatttcatgaagaggctgatgccatgagagaggcattatctttttgcgctgatgaaatgttagatcgcattgcaggtttaacgcccgaggatcctaattttattaaaaggttgtcagcgcttggggaaattaacagacttcaggagtacattgcatttgttaataattctatttgttggtgggacagagagttgaggaatcgtaatggacgtcaggggtag

SEQ ID NO: 271663 - DNA, 675 bp, Klebsiella pneumoniae
atgaatatttactgcgatgatggttcaactaatgttaagctggcatggtttgaaggcgatgagcttcagacccgggtttctgcgaactccttccggcatggctggaaagtggcggaattcagtgcggcaacgttcaactatcaggtggggacgctgaaatacacctgggacagcgtcagtcgggatgccatcccgacaacaaacgtggaatatcagtacggtgatctcaacctgctggccgtgcatcatgcgctgctgaacagcggactggagccgcagccggtgagcctgaccgtgacgctgcccctgagcgagtattacgacggggactgccagcggaacgaggagaacatacgacgcaaacgggaaaacctgatgcgtgagctggttctgaataagggcagggcatttaccgtaacggacgtgaaggtgatgccggaatcactgccggcggcgttctcccgtctcgcggagctgaagcccggccccgctgagaccaccctgattatcgatctcggtggcacctgtgaagaaccaacttatttgatactaaccaaatatccgggattatccgggaacaaatcaaaacaactgggtattttcaggcgcttgcaggtgggaattgaaaaaaccaatgaggctttctatttgataccatatctgtggataacttag

SEQ ID NO: 271664 - DNA, 297 bp, Klebsiella pneumoniae
atgaataaaaaagcgtggttagaagcagctttagctctaatcgatacgatgccacgtgaggagtttttgtctgcgcttgagaaatgtggtgtgatggacaaatcctcagaaacggcagaagttgcacaagagctaacctactacatggtaggtagtattgacgaaaacactgtgcgagacgaaggccaggtctggcgatgtgaacttttcagaatggatgatgagctcttgagctttttcccaaaaaatactaactcagcgcctcaaggggcgctgtctcatttagtggcggcgtaa

SEQ ID NO: 271665 - DNA, 321 bp, Klebsiella pneumoniae
atggcacaactagaattgaaaatggagaaagttgtagagaaggaatttcgcgcactagaaaacaggaaggtgcaagaggcttttgctgtagacctcgaaatgataatgaacgggctcaaaccgttgtcatcatcaaagccactaaatggattaggaaaaggagtttttgaactaaagaaaaacggccgcccggcttacagatgtgtttatgtagtaaaaaacaacacactatacgtccttcacgtatacagtaagacatcggacggcacaccaaagcatcacgaagacacaataaaaaaacgttttaaatcagtaaaataa

SEQ ID NO: 271666 - DNA, 321 bp, Klebsiella pneumoniae
atgctaaataaatttagcagtccgtttgaactctttgctaaagacgcagttgagttgaacatgctcagcctgaaatcaaagctgcttataatcatcgctgaaatgatcagaggcgagggttggtcgcaagcggctgctgcggataagcttggagttagtcagccccgcgttagtaacttaatgaatgggcatgtatccaagtttgccattgatacgctccttgagatgctgtgccgcattggatttgttgtggatgtgacctttcggccgcatgatgaagaaagtcctttgcatgtgagcgtaaaaaaggcggttgtgtga

SEQ ID NO: 271667 - DNA, 300 bp, Klebsiella pneumoniae
gtgaacgagatacgccgcgatctgaatttacccgtctggcccgattttgccggggtcaccaaagacgacggcggcctggaccgggaagcgcgcaggatgatgcttacccttgagcgctgcgaaccctgcgaaggggctggggtggcctgctattccgggtcgaccgtcacccacgtagggatcgtggtcagtatcgatggtctgctgcatgtggcggaatgcaacccaggcacgaacgtcacctttctgcccttgccgcggtttaagcgtcgatttgtcaaagtggagttctggcgatga

SEQ ID NO: 271668 - DNA, 255 bp, Klebsiella pneumoniae
atgaaatcgaagcgtacatctcatcgcagtacaaataacaaaggtaaaggcaaatcccgtaagaatggttgtaacaaacctgttcagaatgtagacaaggtagaggaatgcacgaaatatatgcgtttcttctattggttgttcaggttgtatcaacttttctttggtagcgacagtgactcactcggcagtcggtcattgttcctttaccttaaggaggctcttaaggcattgatcactaaacattcaaactga

SEQ ID NO: 271669 - DNA, 1086 bp, Klebsiella pneumoniae
atgagcattcagtttctcggcatgattggccaccgcctctcttccgaaacgattgccccggtggggccgatctttgaccgcgactatatcgttcgctttgcgcaaacccatgaagccgccgggtttgatcgtctgctggtcggctactggtccgatcaacccgacggctttctggtgacggccctggccggactgtcgacgcagaaaattcagtacctgctggcccatcgtcccggttttgtttccccaacccttgccgcgcgcaaattcgctacccttgagcacctgctggggggccgcctggcggtgcatatcatcagcggcggcaacgatgccgaacagcgccgggatggcgattatctcgaccacgaccagcgctacgctcgcaccgacgccttcctcgacaccgtgcgccaggtgtggaccagcgagcagccggtggatattcacaacgatttctatcaggccgagcaggcctggtccgccattcgcccgctgcaaaaaccgcatcttcccatctacttcggcggctcgtcggaagcggccatcgccgtcgccggcaaacatgccgacgtcttcgcgctgtggggtgagtcgctggcgcaaaccggcgagaccatccagcgggtgcgcgccgaagcggcgaaacaccagcgtgatatcggcttcagcgtctcgttccggccgattatcgccgacagcgaagccgaagcctgggagaaagccgagcatatcctgcacgtcgccaccgagcaggcggcgcagcgcgggggcgggttcaaagccaaaccggacagcatcggcgcccagcggctgcgggctactgcggcgcagggcagagtggtggacaaacgcctgtggaccggcatcgcccagctggtgggcggcggacataactccaccgcgctggtgggcaccccggagcaggtggcggatgcgctgatcgattactacgacctcggggtgcgtaacttcctgatccgcggcttcgatccgctgaacgacgcggccgactatggccgggcgctgctgccgatcgcccgggaaaaagccgcgcggcgtgcggtggcggagcgcgcatcgtga

SEQ ID NO: 271670 - DNA, 894 bp, Klebsiella pneumoniae
atgcgcattgacgatatcgacgctttgctggccacggtgcagttttcctccctcaatcaggccgcggaatatctggggatcacccagtcggccatcacccggcgcctgcagcgtctggaacaggagctgaacgtcacgctgttagagcgccagacccgcccgctgaccctgaccgccgccggacaccgggtgtacgagcagtgtctgagcattaagcgtgagacgaaaaaactctacagcctgttggatccgcaaggcgagccgcgcggcgcgctgcgtctcggcgtgccgcagagtctcagcgagattgccctgccggcggcgctgtcggcgctgagccagcagtttcccggactgtcgccgcagatcacctgcggctggagtggacagctgcagcgccggctggaaaacggcgagctggacggcatgctggcgatggggcccgcccagcaaagcttcgccgagggctacagcgggcgcctgctgtgtcccctggaggtggtgccgatcgtcggccggcgtttgaatttgcgcgcgtcatccctgcgggagtgcgccgaacgaggctggatccttaaccccgacggctgtggcctgcgcgccgggctcattcgcgagctgcagagccagggattgcggttgacgctcaacgtcgagagcgcgggcgcgcagctgcagatagcgctggtggcgcaggggctggggctggggctggtgccgagggcgacgctggccagcagcccgtggcgggacgaggtcgcggtcctcagcctcagcgattttcagcctgcggtctcactgtggctgatccacgcccagtatctggcgaacctgcagccgccgctgaccttttttgccagcaaagtgatgcagcagctgaccgtatccgactga

SEQ ID NO: 271671 - DNA, 603 bp, Klebsiella pneumoniae
atgactgcaccacgactggaaaaattacgccatttcattcatgaggtagaccgcctgcaccgcgaacaccaccagaccgccccgctgcttgacgccgtggcgcagcggctggcggcgctggtgcgttacgacgactggctgccggaagagtacaccctgccgcatccgcaccattaccagcagtatctgctgcatgccgactccggggagcgcttctcgattgtcagcttcgtctggggaccggggcaagcgacgccgatccatgatcaccgggtgtggggggccattgggatgctgcgcggcgcggaggaaaaccagcgctaccagttggatgccgatggcataccgcgcgcgctgggcgccgccacgcttctggaagcaggccaggtggagaaagtctccgctgacgatggcgatattcatcgcgtcagcaatgcgctggcggatcgcgtctctatcagcattcatgtctacggcggcaatatcggcgcggtgaagcgcgccgtgtataccccggaaggtcagcagaaaccgtttatctccggctattctaaccgccatttacccaatatctgggattcctcccgcgaacatcaaggataa

SEQ ID NO: 271672 - DNA, 1581 bp, Klebsiella pneumoniae
atgtccacctacgcttatcgccaggccgccgggatccgccaggcgctgctcgaccgtcgtgaactggcgctgatcgacgtccgtgaagaggccgatttcgccaccgctcatccactgtttgccgtcaatctgccgctcagcaaactggagctggaggtccgccggcggataccgcgcttcaccaccccgctcaccgtctacgacaacggcgagggtctggcggagatcgccatcgaacggctgcggtcctggggctatcaggatgtggccctgctggccgagggtctcgccggctggcgccgcagcggcggcgagctgtttcaggacgtcaactccgccagtaaagcctttggcgagctggtggaaagcgtgcgtcacacaccgtcgctcagcgcccaggaggttcaggcgctcatcgacagccggcaggaggtggtgatcgtcgacgcccggcgcttcgatgagtaccagaccatgagcatccccggcagcatcagcgtgcccggcggcgagctggccctgcgggtagagagcctgacgccctccccgcagacgccggttatcgtcaactgcgccggacgcacccgcagcatcatcggcacccagtcgctgatcaacgccggcgtgccaaacccggtccatgccctgcgcaatggcactatcggctggacgctggccggccagacgctggcgcaccagcaacagcggcaatacgatccctccgcccgcgcctccggcgcccgggccgctgaggtggcgcattttgccgaacgggccggggtggcggtcatcgatgaggccacgctgcaacgctggctgcagcagagcgaccgcaccaccttcctgtttgatgtccgcagccccgaagagtacgcggcgggtcactatcccggcagcctgagcgcgccaggcggccagctggtgcaggagaccgaccacttcgctagcgtacgaggggcgcgcattgtgctgctggatgacgatggcatccgggcggcgataaccggctcgtggctggcgcagatgggctgggagacggcgcggctgagcgcgctgtcgaccagccagttgagcgaacgcggggtgccagccgccgaggtgccgcccggcccgcaggcggaggagataagcccggcgcagctggcgcaacagctggaagaacccggtacggtggtgctcgatttcaccaccagcgccaactttgtcgctcgccatatccccggcgcgtggtggctaacgcgctcgcagctgcgccaggccctggaagcaatccctcccgcccaacgttacgtggtgacctgcggcagcagtctgctggcccgctacgcggtgccggaggtggcggccttgaccggtaaaccggtgcagttgcttaccggcgggacgctggcgtggatcgccgccggtctgccgctggcgcatggcgatagcggcctcgccgtcgagcgccgtgaccgctatcgtcgtccgtacgaaggaaccgataattccgccgaggccatgcaggcctatctggagtgggagtatggcctggtggatcagctggcccgcgacggcacccacggttttcgggtgctctag

SEQ ID NO: 271673 - DNA, 726 bp, Klebsiella pneumoniae
atggcttacacctcccgtttgctcaatgcgatccctggcatccgccacgcttttctcgatgtccatgaaaccgccgcctttccctatgccgagctggctccggtgaagctggtgcatggtaatgaggttcatcattatcagcagccgctgccgacgcgcccgcacgccgacgcggtgtttaccgcggtagccgggcaaaaggtgggggtggtgaccgccgactgtctgccgctgctgatcgcctcgcgcgacggtcgctacgtctgcagcgtgcatgccggctggcaggggctggtcagcggtattgtcgacaacagtctggcctgttttcgccagcagggggtggcattggccgatctggtcatcgccgtggggccgtatattcacccctgctgttacgaagtctccgccggattctatcagcaactgctggaccagcccggcggtgaccgggtggcccgccatcgccagcggctgttccactcccgttcgggcccggtcagcgatccgctcaaagccgccgcacgcggcagcgataatctgtggtttgatctgcgcgcctttgccgaagcgatcttcgcagaggcgggggtggcgccggcgagcgttgaatggctggggagttgtacctactgcaccccgcagtcgctgggctcctaccggcgccggacccattttccggcgccgaagagctttcagtattcgtggatcatgcgcgaagcctga

SEQ ID NO: 271674 - DNA, 807 bp, Klebsiella pneumoniae; identical to SEQ ID NO: 212969

SEQ ID NO: 271675 - DNA, 867 bp, Klebsiella pneumoniae
atgagctatcaaccgcaaactgaagccgccaccagccgattcctcaatgtcgacgaggggggccgcacgctgcgcatccatatcaatgactgcggcgacgggaaagagaccgtggtcatgctgcacggctctgggccgggggccaccggctgggccaacttcagccgcaatattgacccgctggtcgaggcgggctatcgcgtgctgctcctcgactgtccggggtggggcaaaagcgatgctatcgtcaacagcggctcgcgttcggacctcaacgcccgcattctgaaaagcgtggtcgatcagctggggatcgataaagtccatctgctgggcaactcgatgggcggccatagcgcggtggccttcaccctgagctggccggagcgggtggctaagctggtgctgatgggcggggggaccggcggcatgagcctgttcacgccgatgccgaccgagggcatcaagttgctgaacgccctgtaccgcgagccgaccattgaaaacctcaaaaagatgatgagcatcttcgtcttcgacacccgcgacctcaccgaggcgctgttcgaggcgcgtctcaacaatatgctgtcgcgccgcgaccatctggacaacttcgtcaagagcctggaagccaacccgaagcagtttcctgactttggcccgcggctgggcgaaatcagcgcgccaactctgatcgtctggggacgcaatgaccgcttcgtgccgatggacgccgggttgcgcctgctctccgggatcgccggttcggaactgcatatttaccgcgactgcggccactgggcgcagtgggaacatgccgacagttttaatcagctggtgctcaatttcctcgcacgggcttaa

SEQ ID NO: 271676 - DNA, 945 bp, Klebsiella pneumoniae
atgcatgcctatttgcactgtctctcccacactccgctggtgggattcgtggacccggagcaggcggtcctcgatgaagtgaaccgggtgattgccgacgcccggcggcggatcgctgaattcgatcccgagctggtggtgctcttcgcccccgatcactacaacggttttttctatgacgtgatgccgccgttctgcctcggggtcggcgccaccgcgattggcgacttcgccagcgccgccggcgacctgccggtgcccgccgagctggcggaagcctgcgcccacgccatcctcaacagcggtatcgacctggcggtgtcgtacaacatgcaggtggaccatggcttcgcccagccgctggagtttctgctgggtggcctggaccgcgtgccggtgctgccggtgtttattaacggcgtcgccgcgccgctgccgggttttcaacgcacccggctgctgggcgaggcgatgggccgctttctcaataccctcaataagcgggtgctgatcctcggctcgggcggactctcgcaccagccgccggtgccggagctggcgaaggccgacgcccatctgcgcgatcgcctgctcggcggcggaaaacagctgccgccggacgaacgcgaacggcgccaacagcgggtgatcaatgccgcccgacggtttaccgaagacccccactcgctccatcccctcaacccggtctgggacaaccgctttatgagcctgctggagcaggggcggctgagcgaactggacgcgatcggcaatgacgagctgtcggcgatggccggcaaatcgacgcacgaaattaagacctgggtggccgcttttgccgcgctatccgcttttggccgctggcgcagtgaaggccgctattaccggccgatccccgagtggatcgccggattcggctcgctgagcgccaccaccgagatttga

SEQ ID NO: 271677 - DNA, 1665 bp, Klebsiella pneumoniae
atgacaacatctacacccgatattcaacccgccgtgcagcataccgctcaggtcgccatcgttggcgccggtccggttggtctgatgatggccaactaccttggccagatgggcatcagcgtgctggtggtggaaaagctcgccacactgatcgattacccgcgggccatcggcattgacgatgaatccctgcgggcgatgcaggcggtggggctggtgaatgacgtgctgccgcataccacgccgtggcacgccatgcgttttctcaccccaaaaggccgctgctttgccgatatccagccgatgaccgatgagtttggctggtcgcggcgcaacgccttcattcagccgcaggtcgatgcggtgatgtatcacggtctgcagcgtttcccgcaggtccgctgcctcttctcccgcgaagtggaagcctttagccagaccggtgacggtgtcacgttaaatcttaaaggaccggacggcgagcgggagacggtgcgcgcggactggctggtggcctgcgacggcggcgccagctttattcgccgtacgctgaacatccccttcgaaggtaaaaccgcgccgaatcagtggatcgtcatcgatatcgctaacgacccgctggccaccccgcacgtttacctgtgctgcgacccggtgcgaccctacgtttccgccgcgctgccccacggcgtgcgccgctttgaatttatggtgatgcccggcgaaaccgaagcccagctcagcgaaccgcacaatatgcgccgcctgctgagcaaagtgctgccggacccggatcgcgtcgagctgatccgccagcgggtctatacgcataacgcccgccttgccgagcgctttcgcatcgaccgcgtgctgctggctggcgatgcggcgcacatcatgccggtatggcaggggcagggatataacagcggcatgcgcgacgccttcaacctggcgtggaagctggcgctggtggtcaatggcaaagcgggagagacgctgctcgacagctaccagcaggagcgccgcgaccacgcgaaagcgatgattgacctgtcggttaccgccggccatgtgctggcgccgccgaagcgctggcagggggccgcgcgcgacggcctctcctggctgctgaactacctgccgccggtgaagcgctacttcctcgaaatgcgctttaagccgatgccgcagtaccgcgagggggcgctgctgaccgacggcgccggcaagacctcgccggtgggcaaaatgtttattcaaccgcaggtgacgctggagagcggcgagagcgtgctgctcgacgaggttatcggggcgaatttcgccattatcggctggggctgcaacccgcagtgggggctcgacgccgggcagatcgcccgctggcgcgcgattggcgtgcgctttatccaggtggtgccggaggtgcagatccaccgcgagcaggataacgcccctggcacgctgcgggtgggcgatacgcaaaatcgcctgaagagctggtttgctcagcataacaccgccatcgccgtggtcagaccggaccgctttgtcgccgctctcgccatcccgcagaccctcggcgcgcagctgaccgccctggcggaaaaactgaccctcgcaaccggggataccgcccacgctgaagagaaggtggcctga

SEQ ID NO: 271678 - DNA, 813 bp, Klebsiella pneumoniae
atgcgtgacgatgggtccgcagcgtacaaaacagtgcgcggattgagccggggtttattgttattaaaattgttaaataaattcgacggcggcgcgacgccgggcctgctggcggagtttagcggcctgcatcgcaccaccgtgcgccggctgctggagacgctacaggaggagggttttgtccgccgcagccgctccgatgacagcttccggttgaccattaacgtccgccagctgagcgatggatttcgtgacgaacattggatttctgccctcgccacgccgctgctcggcgagctgctgcgcgaggtgcagtggccaacggacatcaccaccctcgacgtcgacgccatggtggtgcgcgagactacccaccgcttcagccgactgtcgtttcaccgcgcgatggtcggacggcggctgccgctgctgctcaccgcctccggactgacgtggctggcctttgcccccgacgcggaacgcgacgccgtcgtcagcatgctggccgcccgtccggaagctgagtatcagctggcccgcgaaccggaacggctggcggcgatcctcgcccgcacccgccagaacggctatggcgaaaacttccgcggctggcggcaggaggagaaaatcgcctcgatcgccgtgccggtctgcagtcagcagcgggttatcggctgcctgaacctggtctatatcgccagcgcgatgaccattgagcaggcggcgcagaagcatctccctgcgctgcagagggtggcgaggcagatagaagcccgcatggaagaggaagaagtgtggtacgaaatgccctga

SEQ ID NO: 271679 - DNA, 1059 bp, Klebsiella pneumoniae
atgtcaaaacaccccttactgctgggcctgacgctgctcagtgccagcctgttcaccggccagaccttcgccgaccgcaccgtcaccgaccagctgggtcgccaggtcaccctccccgaccacgtcacccgcgttgtggttctgcagcatcagacgctcaacctgctggtacaactgcatgccgccgaggatatcgtcggcgtcttaagcagctggaagaaacagctcgggccgcagttcgcccgctttatgcccgagatcgggcaactggcgaccccgggcgatctcacccaggtcaatattgaaagcctgctggcgctgcgtccgcaggtggttttcgtcgccaactatgcgccgccggcaatgatcgcgcagatccaacaggccgggatcccggtggtggccatctcgctgcgtcacgatgccgccggggaaaaaaataaaatgaaccccaccatggctgacgaagagcaggcctataacgccgggctgatggaggggatccgccttatcggcgaggtggtcgaacgccagcccgaggccgaggcgctgattcactacaccttcgaggcgcgcaagcaagccaatgcgccggtggccgatattccaccgaaccagcgggtgcgggtgtacatggccaaccccgatctgaatacctatggcgctggcaaatataccgggctgatgatggcgcacgccggggcgctgaacgtggcggccgccagcgtaaaaggcgcccgccaggtgtcgctggagcaggtgctggagtggaacccacaggtgatcttcgtccaggaccgttatccgcaggtggtcaaacagatagagaacgacccgcagtggcaggcgatcgatgcggtgaaacatcaccgcgtgtggctgatgccggagtatgccaaagcctggggttacccgatgccggaggccctggcgctgggcgagctgtggatggcgaaaaaactctatcctgcgcgctaccagagcatcgatgtggacagtaaagccagggattattatcagcgtttttaccgcgtggcgtggacgccagatgcccgctaa

SEQ ID NO: 271680 - DNA, 1008 bp, Klebsiella pneumoniae
atgcccgctaactctcagccctggctggtgcagggaagcctggcgctggcgacgctggggatcgcggtcgcctcgctctgtttcggccagtacccgttaagcctgagcgccgttggccacaccctggtccatctgccgccaggtgaaggggtgatcgggcagatcgtctggtcggttcgcctgccgcgcgtggtgatggccctgctggccgggggcgcgctggggctgtgcggcgccaccttgcagggcgtgttccaaaacccgctggtggacccgcacatcatcggggtaaccgccggctccgccttcggcggcacgctggcgatcctgttgggcgtcggcagtctgctgatgatggcctcgacctttttcttcggcctcgtcgcgctggggctgatttacgccctcgccgccctgcaggggcgggacagcacgctggggctgattctgtccgggatcattctcagcggcttcttcgccgcgctggtcagcctgatgcagtacctcgccgacagcgaagagacgttaccgaacatcgttttctggctgctcggcagcttcgcgaccgccagctggcataaggtactgcttatgtccctgcccctggcggtggctgccggggcgctgtggaagctgcgctggcgtatcaacctgctggccctggaggaacgcgatgcccgcagtcttggcgttccggtggccgcgctgcgtcgcggcgtgctggtttgctgcgcggtgctggtggcagcccaggtggcggtcagcggcagcatcgcctggatgggtctggtggtcccgcacctcgcccgtctgctggtaggggctgaccatcgtcgcctgctgcccaccgccttctggctcggcgccgccctgatgctggtggtggacgatctggcgcgcacgctgacccaggcggagatcccgatcgggatcgtcactgccctgctcggggcgccgctgtttacctttttactggtgcaatcccggcgccggagtacggcccgatga

SEQ ID NO: 271681 - DNA, 750 bp, Klebsiella pneumoniae
atgaacagctcattatcgctgcaagcgctacgctacggccaccgtcagccgctcttcgccccgctcacgctggcctgccggcccggtgagatctgggcggtgctgggcgccaatggtcggggaaaaagcaccctgctggataccctgaccggcgtgctgccgccgctgggcggcgagatgcagtgcgagggcggcgtggccctggttccgcagtcgtttcgtcccgcttttcgctggcgcgtgagcgatgtggtgctgatgggccgggcccgtcatgtggatctctttgcccagccggacgaggaggatgcccggcgggttgagcaggcgctggggcagctggggattgccgccctggccgaagatgacttcggcgccctctccggcggccagcagcagctggtgttgattgcccgcgcgctggtcagcgccagccagaatatcctgctggatgagccctgctcggcgctggacctcggtaaccagcaggtggtgctgcagctgatcggcgacctcgcccaccgccaggcgcgcaccgtcctgttcaccacccatgatcccaaccacgccctacaggtggccagccatacgctgcttctgctgccggagggccggtggctggcgggcgagaccgccgacgtgctgagcgaaacgcatctccggcaagcgtacggcctgccggtacgccttatccgccatgccgcctccgcgttccctctgctggcgccggggtttacgctgcgtcgctga

SEQ ID NO: 271682 - DNA, 744 bp, Klebsiella pneumoniae
atgacaaacaccactctcacgctgctggcggcgggaagcctgagaagcgctttcctgccgctggtggcgcactttcggcagcacactgacctggcggtcgatgcgcagtttggccctgccggcctgctgcgcgagcggatcgaagccgggtcgccgtgcgcggtttttgcttccgccaacgcggcgcacccgcaggcgctgctgcaggcgggtctggcgcaggaatgccagggatttgccagcaaccagctgatgctgaccgcccggcggtcgccggataacgatggcctggactggctggcgctgctcagcacgacccgcctgcggttggcgacctccacgccgggctgcgatccgtcgggagattatacctggcagctgttcgcccgaattgaggcacgctatccagggttgggcaacgcgatggccgggcgggcgcagcagctggtcggcggcagagactcactgagcgtgccgccgggagagatagccggcgcgtggcttattcgccagaatctggcggatctgtttatcggctatgcgcactatggctccgcgctggccacctgcgacgatctgcgtaccctgaccatcccggcgccgtggaatattcgctgcgattaccagctggcgcgtctcagggccgatcccgccgcgctggccctgtatcgctttatcctcggcgacgttggccaggggtatcttcggcaggcgggttttatgccgttcagcgacgcagcgtaa

SEQ ID NO: 271683 - DNA, 837 bp, Klebsiella pneumoniae
atggtgattagtgggaatacgcggctgatagcgcaccttggctattcgaccgccagttttaaggcgccgatgatctacaacccgtggttcgttgaccagcaggtggacgtgaaggtggtgccgatgggggtcaggccggaggactacgccgcgtttattccgccgctgtttacgatgaccaatatcatcggcgcgctggtgacgatgccgcataaaatcgccacctgcgatctggtgcagcgcctgagcccgacggcggccatcgctggcgcctgcaatgccatccgccgcgaggctgacggtagcctgagcggagacatgttcgatggcgagggatttgtgctgggcctgcgtcgtaaagggtttaacccgcaggggacgcgggcgctggtggttggcagcggcggggtgggatcggctatcgccgcctccctcgcggcggcgggggtcagcgccctgaccctgtacgatacccggcccgaggtggcgcacgccctcgccgggcggctgcatcagcactatccgcagctcgatatcaccctgatgcagcccgatcctgccggacacgagctggtggtcaatgccaccccgctggggatgaaggccagcgatccgctgccgctggacgttgaccgtctggcgccaggcgcctgggtgggggaagtcgtcatgactcaggagtacaccccgctgctgagggccgctcaggcacgacagtgccacatccagcgcgggaccgacatgctgtttgaaatgatccctgcctatctgcgcttttttgacctaccggtagccacccccgagcagctgcggaccctggcagaaattcgctactga

SEQ ID NO: 271684 - DNA, 1323 bp, Klebsiella pneumoniae
atgagctcatatagccctaacccgacggctgccgcccagccagccgtcaccgtgcgccgctcccggcggcgtatcggcattcttgcgctgttggccattggcaccatgatcaactatctcgatcgcaccgtactggggatcgccgccccaaagctcaccgctgagctggggatcgacccggcgatcatgggaatcctcttctccgccttcgcctggacctatgctctggcgcagatccccggcggattgtttctcgaccgctttggcaacaaagtgacctactttttgtcactgaccctgtggtcgctgtttaccctgttccacggcatggcggtggggctgaagacgctgctgctgtgccgcttcgggctcggcattagcgaagcgccgtgctttccggtcaacagccgggtggtcagcgcctggttcccacagcaggagcgggcgaaggccacggcggtgtacaccgtgggggagtatctcgggctggcctgctttgcgccgctgctgttctggatcatggacggtttcggctggcgggtgctgttcgtcagcgttggcgccgtcggcattctgtttgccctggtgtggtggcgctgctaccgcgaaccgcatgaagatccgcgccttagccagcaggagcgcgagcatatcgaaaacggcggcggcctcagcgccccgaccgaccagcaggtggcgttcagctggccgctggtccgccagctgctgagcaaacggcagatcatcggcgccagtatcggccagtttgccggcaataccgtgctggtgttctttctcacctggttccccacctggctggccaccgagcggcatatgccctggctgaaggttggcttcttctccatcctgccgtttgtcgccgccgccggcggggtgatgtttggcggctggctctccgacaagttgctgaaagctaccgggtcggccaaccttggccgtaagctgccgatcgtcgccggtctgctgatggccagctgcatcatcaccgccaactggctggagagcgacctggcggtgatcctggtgatgtcgtttgccttttttggccaggggatggtgggtctcggctggacgttgatctccgatatcgctccgaaggggctgggcggtctgaccggcggcctgtttaacttctgcgccaacctcgcggggatcctcaccccgctggtgatcggctttatcgttgccgggttcggcaattttttctacgcgttgatctacatcggcggcgccgcgctgctgggcgtggtggcctatctgtttatcctcggcgacgtcaaacgtattgagttatcgcagtaa

SEQ ID NO: 271685 - DNA, 1854 bp, Klebsiella pneumoniae
atgctgcgctctatcgccaccgtttcgatttccggcaccctgcctgagaagctgcacgctattgcggcggcggggtatcagggggtggaaattttcgagaacgatctgctctattatacggggacgccggcggaaatccgccagcttgccgccgatttagggttaaaaatcacgctttttcaaccctttcgcgattttgaaggcgccagtcgggcgcagtttgcggcgaatatggcccgcgctcggcgcaagtttgctctgatgcgcgagctgggctgcgagacgctgctgctgtgcagcaatgtgcagccggactgctcggcggatagcgaattgcaggtcgcggacctgcgggcgctggccacgctggcggaagaggaggggatcgctatcggctatgaggccctggcctggggaacccatgtgaaccgctggcagcaggcctgggagcgggtgcggcgggtggacagcccggcgttgggcctggtgctcgacagcttccatattctggcccgcggcgacacgctggacgcgctaccgtcggtgccggtggagaaaatcacctttgtacagctcgccgatgcgccgtatatgaaaatggatttgctggagtggagccgccacttccgctgctttcccggacagggggagctgccgctggaggcgtttgccgagcagatcacccgctgtggctaccgcggcccctggtcgctggagatcttcaatgacggttttcgcgcctcgccgaacggtgcgacggccaaagatggttatcgttcgctgctgtggctggaggagcaaacccgccgtcggctcccgacgtccgatgccgatctgttttcaccgccgccgctgccggtctatcacgggctggagtttatcgagtttgccgccagcgccgccgaggcgcagcgcctggggcaacatctgcaggcgctgggttttcagcacgagggaagccaccgctccagacgggtaacgctgtggcgcaacggcggggcgcggatcgtcatcaaccatcagccgcacagctgggccgaccatttttatcaacgccacggggtatcgctctgcgcgatggcgctgcgggtcgagcacagcgcgtcgcttgtcgcccgcgcccgcgcgctggggtatgccacctggcagggcgacgccgggccgaacgaaacgccgatcccggcgatctgcgcccccgacggcagccttatctatctcatcgacgccggggaggctatctacgagcgcgattttcatctgcgtgatggcgtgacggtgcgcgaggattatctcggtatcgatcatctggcgctgggaatggaggccgacagccgcgataactgggtgatgttcttccgtacggtgtttggtttttcccttgagcatgagcagacgctgccggacccgtatggactggtgcgcagcctggcggtgcgcagcccgcagggcgatatccgtctggcgctgaatatttcgcagagccgggcgacgcagatcgcccgctccgtcgcttgctaccagggggcggggctgcagcatgccgcctttgcctgccgcgatctgccggccgcctgcgaccagcttgccgaggttgcccgccatacgctgccgatcccggccaattattatgacgatctgctggcgcgctttggcggcgagctggacgtcgggcagcttcagcgccagcagctcctctatgaccgcgatccgcaggggggagatttcctgcatctttacacccggccgtttaccgccggccgctttttctttgagttaaccgagcgccgggctggctatgcgctctatggcgcagcgaatgcggccgtccgtctggcggcgatgcagtattgttag

SEQ ID NO: 271686 - DNA, 639 bp, Klebsiella pneumoniae; identical to SEQ ID NO: 138591

SEQ ID NO: 271687 - DNA, 213 bp, Klebsiella pneumoniae; identical to SEQ ID NO: 138590

SEQ ID NO: 271688 - DNA, 1413 bp, Klebsiella pneumoniae
atgaaaaagaccaaaattgtttgcaccatcggtccgaaaaccgaatctgaagagatgctgaccaaaatgctggaagccggcatgaatgtgatgcgtctgaacttctcccacggtgactatgcggaacacggtcagcgcatccagaacctgcgcaatgtgatgagcaaaaccggtaagaaagccgctattctgctggacaccaaagggccggaaatccgtaccatcaagctggaaggcggcaacgacgtctccctgaaagcaggccagaccttcaccttcactaccgataaatccgtcatcggcaacaacgaaatcgttgcggtaacctatgaaggcttcacctccgacctcgccgtcggcaacaccgtcctggtggacgatggcctgatcggcatggaagttacggctatcgaaggcaacaaagttatctgtaaagtgctgaacaatggcgacctcggcgagaacaaaggcgttaacctgccgggcgtctccatcgccctgccggcgctggctgagaaagacaaacaggatctgatcttcggttgcgaacagggcgtggacttcgtcgcggcctccttcatccgtaaacgttccgacgtcgtcgagatccgtgagcacctgaaagcccacggcggtgaaaacatccagatcatctccaaaatcgaaaaccaggaaggcctgaacaacttcgacgaaatcctcgaagcgtctgacggtatcatggttgcgcgtggcgacatgggcgtggagatcccggttgaagaagttatcttcgcccagaaaatgatcatcgaaaaatgtatccgcgcgcgtaaagtggttatcaccgccacccagatgctggactccatgatcaagaacccgcgtccgacccgcgctgaagccggcgacgtggctaacgccatcctcgacggcaccgatgcggtgatgctgtccggcgaatccgcgaaaggtaaatacccgctggaagcggtcaccatcatggcgaccatttgcgaacgtacagaccgcgtgatgaccagccgtctggacttcaacaacgacaaccgtaaactgcgcatcaccgaagcggtgtgccgcggcgcggtagaaaccgctgagaaactggaagcgccgctgatcgtggtcgccacccagggcggtaaatccgcacgcgctgtgcgcaaatacttcccggatgccaccatcctggcgctgaccaccaacgaaaccaccgctcgtcagctggtgctgagcaaaggcgtggtaccgcagctggtggaagagattgcctctaccgatgatttctatcatctgggcaaagacctggcgctgaagagcggcctcgcgcgtaaaggcgacgtagtggtgatggtttccggcgcattagtgccgagcggcacgactaataccgcttccgtacacgtgctgtaa

SEQ ID NO: 271689 - DNA, 237 bp, Klebsiella pneumoniae; identical to SEQ ID NO: 212954

SEQ ID NO: 271690 - DNA, 987 bp, Klebsiella pneumoniae
atgaaacgcaaaacgatgatcaccttagcccttctcagcgcccttggcgcctccacggccgcctgggccgttgattatccgcttcctcccgccaacagtcggctgattggtcagaatcagtactggacggtccaggagggagatcgcaacctgcaggcgattgcgcgccatttcgataccgcggcgatgctgatcctcgaagccaacgatacgattgcgccggtgcagccgaagcccggcactcaggtccttatcccttctcagatgctgctgcccgacgtgccgagggagggcattgtcgtcaacctcgccgaactgcggctgtattacttcccgccgggagagaatcaggtgcaggtctatccgctgggcattggccagttaggtctggaaacgccggagatgaccacccgcgtggggcagaagatccctaaccctacctggacgcctaccgccggcatccgcgcgcgctcgctggagaaaggggtgacgctgccggcagtggtcccggccggaccgaacaatcccctgggccgctatgcgctgcgtctggcctacggtaacggtgaatatctcatccacggaactaacgccccagacagcgttggtctgcgcgtcagctcgggctgtatgcggatgaacgctgatgacatcaaagcgctgttcagccaggtgaaaaccgggacgccggtacggattatcaatcagccggtgaagtttgccgtcgagccggatggtaaacgctatgtcgaagtccacaggccgctttcgcagaccgaaggggaaaacacccggaccatcgcttacacgctgccagcggcgtttcacgccttcgcagaggataaagcagtggatgatctgcagttgaaaaaagcgatgtcgagaagggcggggtatccggtggtggtgtcggcgggggcaggtagcacggcgacgtcgctgtcggcgcagaatagttcgtctgacaacggtctgcttacccaatag

SEQ ID NO: 271691 - DNA, 417 bp, Klebsiella pneumoniae; identical to SEQ ID NO: 242392

SEQ ID NO: 271692 - DNA, 378 bp, Klebsiella pneumoniae
atggaagtacaagcaggaacttttaatcccgccgatttcagctggcagggactgaccatgacgccggccgctgccgcgcatatccgcgatctgatgcgcaagcagccggataagaaagggctgcggctgggcattaaaaccagcggctgcgccggttttggctatgtgctcgaaatgattgccgagccggcgcccgacgatctgctctttgaagctgacggggcgaagctgtttgcgccgctgcaggcgatgccgttcatcgacggcaccgagctggattatgtccgggaaggtttaaatgaaatctttaaatttcataacccgaaagcgcagcatgagtgcggctgcggcgaaagttttggggtgcaggcggagtaa

SEQ ID NO: 271693 - DNA, 336 bp, Klebsiella pneumoniae
ttgcgccatcgccaccagggggaaggagaggtcagtgcggcgcctgcgttttccgggaggtgtaaagaagatgaatttgaaattgagcagatggtatcttttgctagcctttctgaggagggcagacggagcgacaccatgaaagataaagatgaacaaacggcattgattggcatggccatcggcgcggcggtcattagcttagtggctacacaaaagcagattaatcaggggagtatcgtggatgaactggtgaggctgggcagacagaagggggacggggtagaggatgaggtctttgtccaggccgcccggctggtgagtaaaggcacctag

SEQ ID NO: 271694 - DNA, 1185 bp, Klebsiella pneumoniae
atgattgtttcagcccccagcgattatcgcgaagccgctcgtcgtcgtctgccccgcttccttttcgattatattgacggcggcgcggtggcggaaaacaccatgaacgccaacgccgccgagcttgcctcggtagctcttcgccagcgcgtactgtgcggggccggcgaaccgacgctggcgaccacgatccttgatgccccatgggcgatgcccgtggcgctggggcccgtcggcgccaccgggatgtacgcccgccgcggcgaagtccaggcggcccgcgccgcctcccgcgccgggatcccgtacaccttatccaccgtgtcggtctgctcgattgaagaggtggcgagccacgccagcggcgcgctctggtcccagctgtacgtactgaaagatcgcggctatatgcgtaacgcgctggagcgcgcctgggccgctggcatgaaaaccctggtatttaccgtcgatatgccaatccccggctcgcggtatcgcgataaccgctcagggatgtccgggccgcacgccaccctgcgacaatatctccaggcttgcacccatccgcgctgggcgatgaacgtcgggctggcgggcagacccctgtcgtttggtaatatcgaagcctacaccggccacaaaatgaccatggacgactatatggggttcatcagcaacaacttcgacccgtccatcgcctggcacgatctggagtggatccgcgacagctggcaaggaaaattaatcatcaaagggatcctcgatgccgacgatgcgcgcaatgccgtgcggctgggcgccgatggtattgtggtgtcgaatcatggcggcagacagctcgatggcgccatccccaccgcccgggcgctgcccagggtggtggatgcggtcggcgacgatctgacagtgcttgccgattccggggtgcgctccggcgtggacgttatacgtctgctggccctcggcgcgaaaggcgtgctgctcggtcgggcctatatttatgccctggccgcggcgggcgaagcgggcgtggcgcatctgctgcgcttatttgccgaggatatgaaggttaccatgaccctcaccggcgcgacctcgccatcggccatcagcctcgattgccttgatcgcctcgaacaggatcaacaccgcactcatgcggtgccggtatccttacccgcctga

SEQ ID NO: 271695 - DNA, 3093 bp, Klebsiella pneumoniae
atgagcgccgggcgttttaatctctccgcgctggccgtccgcgagcggtcggtgaccctgtttttgattatcctaatctccgtcgccgggctggtggcgttcttcggactcgggcgagcggaagatccgccctttacggtcaagcaaatgacggtcattaccgtctggcccggcgccaccgcgcaggagatgcaggatcaggtcgccgagccgctggaaaaacggctccaggagctaaagtggtacgatcgcacggagacctatacccgcccgggcatggcgttgataaccctgtcgctgcaggatcagaccccgccttccgaggtgccggagcagttttatcaggcgcgcaagaagctcggcgatgaggcgaaaaatctgcctgccggcgtctccggtccgatgatgaatgacgaattcgccgacgtcacctttgccctctttgccctgaaggcgcgtggagagccgccgcggcagctggtgcgtgacgccgaagccttacgccagcagctgctgcatgtacccggggtgaaaaaagtgaatatcctcggcgaacaggcggagcgcatttatctctcgttttctcatgaccgtctcgccaccctgggtctctcgccggaggcgatttttgccgcgctgaacagccagaatgtgctgaccgccgccggggctatcgagacccggggcgggcagatctttatccgcctcgacggggcgtttgaccgcctgcagcagatccgcgacacgccgattattgccgggggcagaacgctgaaactggccgatgtcgccacggttgagcggggatatgaagatcccgccaccttcctgatccgccatcagggcgaaccggcgctgctgctgggcgtggtgatgcgcgagggctggaatggtctggcgctggggaaagcgctggacgccgaaacgaccagcatcaatcagagcctgccgctcggcatgtcgttgaccaaagtgaccgatcagtcggtgaatatcagcgccgcggtcgatgagttcatgatcaaattctttgtcgccctgctggtggtgatggcggtgtgctttgtcagcatggggtggcgcgtgggcgtggtggtcgcggcggcggtgcctttaaccctcgccgtggtgtttgtggtgatggcggcgaccggcaaaaacttcgaccgcatcactctcggctcgctgatcctcgccctggggctgctggtggatgatgccatcattgccatcgaaatgatggtggtcaaaatggaggaggggtatgaccgcctcaaagcctcggcctatgcctggagccataccgccgcgcccatgctggccggtaccctggtgacggccgtgggctttatgcctaatggatttgcgcagtccaccgccggggagtacgccagcaatgtgttctggatcgtcggtatcgcgctgattgcctcctggatggtggcggtgatttttaccccctggctgggggtgcacctgttgccggacagaaagcccgcggcggccggccacgccgcgctgtatgacaccccgcgctatcagcgcttccgtcggctgctgacccgggttattgctcataaatggcgcgtggccgccggagtggtggcgctgtttatcgtggcgatcctgggcatgagcgtggtgaacaagcagtttttccccacctccgatcgtccggaagtgctggttgaagtgcagctgccttacgggtcgtcgattagccagaccagcgccgcggcggcgaaaattgagcactggctgcagcggcagccggaggcgaagattgtcaccagctatatcggccagggcgcgccgcgcttttacctggcgatggctccggaattgcccgatccctccttcgccaaactagtggtgttgaccgacgggcagggtgcccgcgaggcgctcaagcggcggctgcgggaggcggtggtcaatggcctggcgccggaggcgcgggtgcgcgtcactcagctggtgtttggcccttattcgccttatccggtcgcctggcgggtgatggggcccgatccgcacgctctgctcgacatcgccgagcgggttaaatcggtgctgcaggccagtccgctgatgcgcaccgtcaataccgactggggttcgcgggtaccggtgatgcatttcagcctcaatcaggaccggctgcaggcgagcggactcagctcccagtccgtcgcccagcagctgcagttcctgctgtcagggatcccgatcaccaccgtccgggaagatattcgcgccgtgcaggtgatcggccgcgcggcgggcgacatccgtctggatccggcgaaaatcgccgacttcaccctggtgggcagcggcgggcagcgggttcccttgtcacagattggcgacgtgtcgatcaggatggaggacccgctgcttcgccgtcgcgaccgcacgccgaccatcaccgtccgcggagatgttgcggagaacctgcagccgccggatgtctccaccgcgctgatgaagccgctgcagcccattatcgactcgctgccgcctggctatcgcatcgagacggcggggtcgattgaggaatccggcaaggccacccgggcgatggtgccgttatttccgataatgatcgccctcacgctgctgatcattatcctgcaggtgcgttcgctgtcggcgatggtcatggttttcctgaccgcgccgctggggctgattggcgtggtcccgacgctgctgctgttcaatcagccgtttggcatcaatgccctggtgggcctgatcgccctgtcggggatcctgatgcgcaatacgctgatcctgattggccaaatccatcataaccaacaggcggggctcgatccgttccacgcggtggtggaggcgacggtgcagcgcgcccgcccggttctgctgaccgcgctggcggcgatcctggcgttcattccgctcactcattcggtcttctggggaacgctcgcctatacgctgattggcgggacgctggggggaaccatcatgacccttatcttcctgccggccatgtacgcgatctggttccgcatccgtccggagaacactgtacaacagacagagttgcaccttcagaggtaa

SEQ ID NO: 271696 - DNA, 1110 bp, Klebsiella pneumoniae
atgctcaggctcaacgccgtccatcttgccgtctgcctcctgccgctggccctcgcgggctgcggcgaacctgccgatcatgacgacccccgcatccggccgccgctggtccgggtggcgaccgtcgagcgcgcggaggccggctcgcgggcctttaccggcgtgatagtggcccgaacccaaagcgacctcggtttcagggtggcgggaaaagtgcttgaacggcgggtggaaaccgggcagagcgtcaagcgcggtcagctgctgctgcgcctggatccggctgatctagccttgcaggcgcagtcccaacagcgggccgtagatgccgcgcgggcgcgagccaaaaaggcggccaacgatctggcccgctatcgcggcctggtggcgagcggcgccatctctgccgcggaattcgaccagattaacgcggcagcagaggcggcgagagccgacctcagcgcggcccaggcgcaggccaatgtggcgcaaaacgccaccggctatgccggactgctggcggatgctgacggcgtggtggtggaaaccctcgctgagccggggcaggtggtcagcgccgggcaggtggtgatccgcctggcgcgggcggggcagcgcgaagcgcgggtgcaactgccggagacggtgcgcccggcggtcggcagcgaggcgctggcgacacgctatggcagcgaatctcagccggtcacggcgaccctgcgcctgctttcggacgcggctgacgccaccacccgcacctttgaagcgcgctatgtgctgaacggcgcgctggcgaatgccccgctggggtctaccgtgaccctgcgcatcggcaacgaccaggcgccaggccatgtgctggaggtgcccctggcgtcggtctacgatccgggtaacggccctggcgtctggcgcattgcctctcgtccggccaccgtctcctggcaaccggtgaccgtgctcggcctgaatgatgaaaccgcgcaggtgaccggcccgctgaagcccggcgagccgatcgtcgccctgggcgcccatcttctgcaccagggcgaggcggtgcggctggcggaacgacgcgagcataatgccgccgggagccagccatga

SEQ ID NO: 271697 - DNA, 537 bp, Klebsiella pneumoniae
atggcgcactttagtcgctatggctatgagaaaacgacggtcaccgatctcgccaaagcgataggcttttccaaagcctatatctataaattctttgactccaagcaggcgattggcgaggcgatttgcgccagccggctggagaagatcatggtggccgtcagcgcggccatcgccgatgcgccgtccgccagcgagaaactgcgccgcctgttccgggcgctgaccgaggccggcagtgaactgtttttcgaggatcgcaaactgtacgacatcgccgccgtcgcggcgcgcgataaatggccttcaacggaacagtatgccggtcatctgcagcagctgattggtcaaattcttgtcgaaggccgccaggcgggtgagttcgagcgcaaaaccccgctggatgaagcgaccctggcggtctatatggtgatgtgtcctttcatcaacccggtgcagttgcaatacaatctcgacaccgcgcccaccgcggcggtgctgcttgcctccctgatcctgagaagtctctccccctga

SEQ ID NO: 271698 - DNA, 996 bp, Klebsiella pneumoniae
atgaacagcagcggcaaggtacttattctgggagcaagcgggggcatcggtggggaagtggcgcgccggctggtggcagacaactggcaggttcgggcgctgaagcgcggcgcccagatacgtgatcccgaagatggcatacagtggatagccggcgacgcgctggatggcggccaggtcgcggcggcggctgccggttgcgacgtcatcgtccatgcggtgaatccgccgggctaccggcactggcggcaacaagtactgcctatgctgcgcaacgccctgcaggctgccgaacggcagcgggcgcttgtagtcctgcccggcacggtctacaactatggaccggatgcctttccgctgattgctgaagaggccgcacaacagccggtgacccgcaaaggcgccatccgggtggcgatggagctggcgctgaaggattacgtgcagcgcggcggccgggcgttgattgttcgggcgggcgatttttttggtccacgcgccggaaataactggttttcgcaggggctggtcaagcctggtcagcttccccgcatcattagctacccgggggcgatcggcgtggggcatcagtgggcctggctgcccgacgtcgccgccaccatcgccgcgctgctcgcccgcaggcatgagcttgagccgttcgcccgctttcatatgcagggccactgggacccggacggcagcgaaatgagtcaggcgatccagcgggtggtcgcccgctatggcggcagggcggtagcgaagtcctttccctggtggctggtgaagctggcggcgcccttcaacgccaccctgcgcgaaatggtcgagatgcactatctctggcgtctgccggtacgcctgcgcaacgataaactggttgattttttaggcgcggaaccgcataccccgctcgacagcgcggtttatcagacgctgcaaggcctgggttgtctgcccgccggcgcgataaaccaagaggcgggtgaggcgtaa

SEQ ID NO: 271699 - DNA, 999 bp, Klebsiella pneumoniae
atgaagaaggtcctttgcgcgttaggcttgatgttcaccgccgtcagttccgcgctggcaacaacctaccccctgacgattgaaaactgcggctatcaggagaccttcacccggccgccggagcgcgtggtcgcgctggggcaaaatacggtcgaaattctgctgctgctcgggctgcaaaagcaggtggtcgccagcgccttctggccgaccagcgttttaccgcagctggctgagcaaaacgcgaagattaaaaccttgacggtggaaattccgagcctggaatcggtgctggcgcaaaatcctgatttcgttcccgcccagttgccgctgctgctggggccggaaagcaaagtcgccaggcgtgaagatctcgccaccgtcggcgtaaacagctacgtctcaccggggatgtgcgccaccaaaaaggccaccggcgatatgtacggcagccggcaaaagctgtgggatatgacctggctgtatcaggaaattagcgatttttcccgcattttcaacgtcgaagatcgtggtcaggcgctgattgccgatttcaaaaaacgtgaagccgatctgcgccacgaatttggtaaaaacaaaaaagatctctccttcgtcttctggttctccagcgcctcgccttcggccgatgcctatgtcggcggtaaaaacagcgcctccggctttatcgccagcgtgctgggcggtcataatgcgataacctccgagaccgagtggcccacggtgagctgggagagcatcattgccgccaacccggatgtgatcgtggtcgccagtctggaccgtaaccgctgggcgctggataaggcagaggagaagatcaaattcctcaaaagcgatcccgccgtcagccagctggaggcggtgaaaaaaggccatatcgtggtcatggacggtcaggcgatgaatccgaccatccgcacgctttacggcgcggaacaggtgggcgagcagctgagaaaaatggggctgaactga

SEQ ID NO: 271700 - DNA, 1038 bp, Klebsiella pneumoniae
atgagcgtcgccgcgattgagacgcgccgcagcatactgctcaccggctggtgtgtactggcagcgatcgtgctggcgctggtgatagcggtgggcgtcagcgtcggcgagctggccatcccgctgcagaatgtcttttacgctatcagcaacagaaccggcttaaccgctgagcctctcaaccgtatctatgagagcgtgatctgggatttccgcctcagccgcgcgctggtcgccgcctgctgcggcgcaggcctcgctatctgcggcgtcgtgctgcaaagcctgctgaaaaatgccctcgcggaaccctacgtcctcggcgtctccgccggggcctccaccggcgcggtgtcgatcgtggtgctgggccttggcgctggcgcaatttccctctcggccggggcctttgccggggccttcgccgccttcgcctttgtcgccttgctgactaacggcgcgcgcggcggcaatgagcgtacgattcttgcgggcgttgccgcctcgcagttatttaacgccatcacggcctataccatcagcacctccgccagcgcgcagcaggcgcgcgatgtgatgttctggctgctgggcagcttcagcggcgttcgctggcccgaattccagctggtcattgtggtggtgctcgcgggtctggcggtctgcctgtggtatgcccgggcgctggacgcgttcaccttcggcgacgatgccgccgcctcgctggggattgctgtgccgcgcgtgcgcctgatcctcttcaccactgcggcgctgatcaccgccaccatcgtcagcatggccggctcaatcggctttgttggcctggtggtgccgcacgtgatgcgtttcttctttggcccgctgcaccgaacgttgctgatcgccagcgcgctggcaggggcgatattgatggtactggcggacattgcgtcgcgcctgctgattgccccgcaaagtctgcccgttggggtagtaaccgccctggttggggtgcctttctttgccgtgattatctaccgctcaaggaataagtga

SEQ ID NO: 271701 - DNA, 762 bp, Klebsiella pneumoniae; identical to SEQ ID NO: 212935

SEQ ID NO: 271702 - DNA, 1032 bp, Klebsiella pneumoniae
atgaaaacatggcttccgacatcgaccgccggcagtttaccgaaaccttcctggctggcgcagccagagaccctgtggtcgccctggaaactgtccagcgaagaattactggccggcaagcgcgacgccttgcggttatccctcgacgaccagctgcgggccgggatcgatattgtcagcgacggcgagcaaacgcggcagcactttgtcaccaccttcatcgagcacctcagcggggtggattttgccaaacgcgagatcgtgaaaattcgtaaccgctatgaggccagtgttccaacggtggtgggcgccgtggagcgccagaaacctgtcttcgtggaggacgctcgctatctgcggcagctcaccagtcagccgatcaaatgggcgcttccgggcccgatgaccatgatcgacacgctgtatgacaaccactataaaagccgggaaaagctggcctgggaatttgccaaaatcctcaatcaggaagcgaaagagttagaggctgcgggggttgatattattcagttcgatgagccggcctttaacgtcttcttcgatgaggtcaacgactgggggatcgccgccttagaacgagccaccgaagggctgaagtgtgagacagcggtgcatatctgctacggctatggcatcaaggccaataccgactggaaaaagacgctgggctccgagtggcgacagtatgaagaggctttcccgcagctgcagaaatcgtcccttgatattatctctctcgagtgccacaactcgcgcgtgccgatggatctgctggagttgatccgcggtaaaaaggtgatggtcggggcgatcgatgtcgccagccatgctatcgaaaccccggaagaggtggctggaaccctgcgcaaggcgctggcgttcgtcgatgccgacaaactctacccgtccaccaactgcggtatggcgccgctgccgcgccatgtcgcgaccggcaaactgcacgccctgagcgccggcgccgagattattcgtcgcgagctggcggcaaagtaa

SEQ ID NO: 271703 - DNA, 981 bp, Klebsiella pneumoniae
atgaataataaatttacctatacgattaagcgcacccggtttgatgaaaactataaccctgcggaaaatacgcgtattaccaccaacttcgctaatttagccagaggggtgaaccgtgaggaaaatctgcgcaatacgttaatcatgatgaataaccgttttaatagcctggcccactgggataatccccataacgatcgctatgcggtggaactggatattatttctgtcgagatgaatattgctcaggatagcgccagcttcccggtgattgagatcctgcaaacgcatattgtcgataaaaagagcggggagcgtcatgccggtatcgtcggcaataacttctcctcctatgtgcgggattacgattttagcgtactgcttctggaacataataaggaccagagtcgcttcagcgtaccggaaaactttggcgagctgcacggcaatatctttaaggattttgtgcaatccagcgcctggcgcgccaacttcagcaagacgccggtgatttgcctgagcgtctccagtaaagatgtttaccatcgcaccggtaacgaacatccggtcctcggcattgaatatgctcaggaaggcgtctcgctgaccgagcgctatttcagcaaaatggggctgcaggtacgctattttatgccaaaaaacagcgtcgcgccgttggccttttattttaccggcgatctgctcagcgattacaccagcctggaactgatcgccaccatcagcacgatggagacgtttcagaaaatatatcgcccggagatctacaatgccaactccccggcggggcaatactatcagcccaatctcagccacctggatcattcattaacaaaaatcgtctatgaccgggaagagcgcagcctgttggcgattgagcaggggaaatttacacaacaacattttatcaacccgcacaagacgttgcttgagcaatggtctgctaatttcgcgctttgctaa

SEQ ID NO: 271704 - DNA, 321 bp, Klebsiella pneumoniae
atgaaaaaagctctgcttgccctgttcgctatcgccaccgttaccgccgccagcgcctttgcggctgataaaaccgacgtcccggcgcctgtcgtcgataacggagtccgcccgccgatggagagggatcgtggccccctgccgccgttcccgccgcagcttccgccgcacagaccggtgctgttttcagccacggtagcaaccgatacgccagcggaaaccattaacaaactgaccgcgctgatccccgccggccaggcgaaacactacgaagtgcacgttgaggtggtgccggttggcgagggaaccgacagacaatag

SEQ ID NO: 271705 - DNA, 249 bp, Klebsiella pneumoniae; identical to SEQ ID NO: 135735

SEQ ID NO: 271706 - DNA, 411 bp, Klebsiella pneumoniae
atgatttggaaacgtcaggccacgctggagcagctcaaccggctcggtgaggggaacatggtagggctgctcgatattcgctttgagaccgttaccgacgatactctggaggccactatgccggtcgatagccgcacacagcagccgtttggcctgctgcacggcggagcgtcggtggtgctggcggagaccctggggtcggtggcaggctatctgtgcagcgaaggcgaacaaaaggtggtggggctggaggttaacgccaaccacatccgttcggcgcgcgggggccgggtgcgcggcgtctgcaaagcgctgcacgtcgggacgcgccatcaggtctggcaaattgaaattttcgacgaacagtcgcggttatgttgttcatcacgactaaccaccgcggtaatataa

SEQ ID NO: 271707 - DNA, 3057 bp, Klebsiella pneumoniae
atgatcccacaaatttctcaggcgccaggggtagttcaactggtgctgaattttttgcaggtactggagcaacagggttttaccggcgataccgccaccagctatgccgacaggctaacgatggccaccgacaacagcgtctatcagctgctgccggatgcggtcatttttccacgatccacggcggacgtggcgctgctggcgcgcgtcgccgccgaaccgcgttttaaatcgctgattttcaccccgcgtggcggcggcaccggcactaacggccaggcgctgaacggtggaattatcgtcgatatgtcccgctatatgaatcgcattatcgaaatcaaccccgaagagggctgggtgcgcgttgaagccggggtcatcaaagatcagctgaaccagtttcttaaaccctatggttacttttttgcgcctgagctatccaccagcaaccgcgccacgctgggggggatgattaacaccgacgcgtccggccagggatcgctggtgtacggaaaaacgtcggatcacgtgctcggcctgcgggcggtgctgatgggcggggatatcctcgatacccaggcggtgccggtggcgctggcggagacgctgggcaataccccctcgacggttggccggatctacaacacggtctaccagcgctgcaaggcgcagcgtgacctgatcattgataagtttcccaaactcaaccgcttcctcaccggatacgatctacgtcacgtctttaacgatgagatgagcgagttcgacctgacccgtattttaaccggttcggaagggacgctggcatttattaccgaagcgcggctggatatcacccgcctgccgaaggtgcgccgtctggtcaacgtcaaatatgactccttcgactctgcgctgcgcaatgcgccctttatggtcgaagcgaaagccctatcggtggagaccgtcgattctaaagttctcaatctggcgcgcgaggatatcgtctggcactcggtaagcgaactgatcaccgacgtaccggataaagagatgctcgggctcaatatcgtcgaattcgccggcgatgacgcggcgctgattgaccagcaggttactaccctgtgccagcggctggacgagctgatggccgccagcgaggcgggcgtcattggctggcaggtctgtcacgatcttgaaggcgtggagcgcatctatgccatgcgcaagaaggccgtcggcctgttgggcaatgccaaaggcgccgccaagcctattcctttcgccgaggacacctgcgtaccgcccgaacatctggcggattacatcgtcgagttccgcgcgctgctcgacagccacggcctaagctacggcatgtttggccacgttgatgccggggtgctgcacgtgcgcccggcgctggacatgtgcgatccgcagcaggaggtgctgatgaagcagatctctgacgaggtggtagcgctgacggcgaagtatggcggcctgctgtggggtgaacatggcaaagggttccgcgcggagtacagcccggccttctttggcgagacgctgtatgccgagctgcgcaagatcaaagcggtcttcgatcccgataaccgcctgaatccggggaaaatctgtcctccggaaggtatcgacgcgccgatgatgaaagtcgatgcggcgaagcgcggcacctgggatcgacagatccccatcgcggtgcgcagcagctggcgtggggcgatggagtgtaatggcaacgggctgtgcttcaactttgacgtcaagagcccgatgtgtccgtcgatgaaagtcagcaaccagcgcatccactcgccgaaagggcgggcgacgctggtgcgggaatggctacgcctgctggccgaccgcggcgtcgatcccaaccagctggagaaggcgctgccggagcagggcgtcagcctgcgctcgctggtggcgcgcacgcgcaacagctggcatgcgcgcaaaggcgaatatgacttctcgcatgaggtcaaagaggcgatgtccggctgtctggcctgtaaagcctgttcgacccagtgcccgatcaaaatcgatgttcccgagttccgctcgcgcttcctgcagctgtaccacagccgctatctgcggccggtgcgcgatcatctggtggcctcggtcgaatcttatgcgccgctgatggcgcaggcgccgaagacctttaacttttttattaaccagccttggctgaaaaagctgtcggagaagcatatcgggatggtcgatctgccgctgctctcggcgccgtcgctgaagcagcagatggccggccaccgttccgccaatatgacccttgagcagctcgaagcgctgagcgccgagcagaaagcgaagatggtgctggtggtgcaggatcccttcaccagctactacgacgcccaggtggtggccgactttatccgtctggtcgaggccttaggctatcagccggtgctcctgccgttctcgccgaacggcaaggcgcagcatatcaaaggcttcctcacccgcttcgcgcgcaccgcgcagaagacggcggacttcctcaaccgcgtggcgcagctgggcatgccgctggtgggcgtcgatccggcgctggtgctctgctaccgcgatgagtacaagcagacgctcggcgacaagcgcggcgatttccaggtgctgttagtccatgagtggttgccgaaggccctaaccagcgacgcccgtcccgatctgggcggtgagccctggtacctgttcggtcactgtaccgaagtgaccgcgctaccggcggcgacaaagcagtgggcagatatttttgcccacttcggcgcgaagctggaaaacgtcagcgttgggtgttgcgggatggctggcacctatggtcatgaagtgaaaaaccacgccaactcgttggccatttacgcgctctcctggcagcaggcgatgcagcggctgccgcgaaaccgctgtctggtgacgggctactcctgccgcagtcaggtgaagcgtattgaaggcagcggcgttcgccacccgctgcaggcgttactggagataatcggatga

SEQ ID NO: 271708 - DNA, 1113 bp, Klebsiella pneumoniae
atgattaatccccatcagcctcgggacattccgcaaatactgctgtcggtgctgttcctggccctgattatcatatcctgcctgtgggttgtgcagccgtttattctgtccttcgcctgggccggtacggtggtgatcgccacctggccggtgctgctgcgtctgcagcgtgtgctgttcggcaaacgactgctggcggtgctggcgatgaccctgttgctgtttctgctattcgttattcctatcgctctgctggtcaacagcctggtggataacagcgttccgctgatcaaactcatcagcagcggaaatgtgacgctgccggatttcgcctggctcaacagcgtaccgctggtcggcgataaactgtactccgcctggcacggtctgctggatatgggcggctcggcgattatggccaaggttcgtccctatattggcaccaccaccagctggtttgtcggtcaggcggcgcacatcggcaagctgctggtctactgcggtttgatgctgctgttcagcgcgctgctctactggcgcggcgagcaggtggcctatggtttccgctacttcgccacgcgcctcgcggccaaacgcggcgacgccgcggtgctgctggccggccaggccgtgcgcgccgtggcgctgggcgtggtggtcactgccctcactcaggcggtactgggcgggattggccttgccgtctccggcgtgccctacgccgctctgctgaccgtggtgatgatctttacctgtctggtccagctcggccctttactggttttggtgccgtcgattatctggctttactggagcggggacaccacctggggcaccgtgctgctggtctggagctgcgtagtcggcaccatggacaacgttattcgtccggtgctcatccgcatgggcgccgacctgccaatgatccttatcctcaccggcgtcattggcggcctgatcgccttcggcatgatcggcctgtttatcggtccggtgctgctcgccgtctcctggcggctgtatgacgcctgggtgcatgaggtgccgccgccgccgaaagaccctgacgtcgtccttgaagagctcagtgagctggaggccggtcgcaagtaa

SEQ ID NO: 271709 - DNA, 2379 bp, Klebsiella pneumoniae
atgtccaacaatggctcgtcaccgctggtgctttggtataaccaactcggcatgaatgatgtagacagagttgggggcaaaaatgcctcccttggtgaaatgattacgaatctgtccggtatgggtgtttccgtacctaacgggtttgccaccaccgctgatgctttcaatcagttcctggaccaaagcggtgttaaccagcgcatctatgcgctgctggatgaaaccgacattgacgacgtttccgcattagcgaaagcgggcgcgcagatccgacagtggatcatcgatacccccttccagagcgaactggaaaacgcgattcgcgatgcttatgacctgctgtccgccgatgacgccgaggcctcattcgccgtgcgctcttccgccaccgcggaagatatgccggacgcctccttcgccgggcagcaagagacattcctcaacgtgcagggctttgacgccgtgctcgttgccgtgaagcacgtgtttgcttcgctgtttaacgatcgcgcaatctcctaccgcgtgcatcagggttacgatcaccgcggcgtggcgctctccgccggggtgcagaggatggtccgctccgatctggcctcctccggcgtcatgttctccatcgataccgaatccggctttgaccaggtggtgtttatcacctcggcgtggggtttgggcgagatggtggtgcagggcgcggtgaacccggacgaattctacgtccacaaaccgacgctggccgctggccgtccggcgatcgtgcgccgcaccatggggtcgaaaaagatccgtatggtttacgcgccgacccaggagcacggtaaacaggtgcgtatcgaagatgtgccgcaggcgcagcgcgatattttctcgttaagcaacgaggaggtgcaggagctggcgaagcaggcggtgcagatcgagaaacactacggccgtccgatggatatcgagtgggcgaaagatggccacaccggtaagctatttatcgtccaggcgcgtcctgaaaccgtgcgttcccgcggccaggtgatggagcgttataccctccacgctcaggggcagatcatcgccgaagggcgcgccatcggccaccgcattggcgccggtccggtcaaggtgatccacgatatcagcgagatgaatcgcattgagccaggcgacgtactggttaccgacatgaccgacccggactgggaaccgatcatgaaaaaagcctcggcgattgtcaccaaccgcggcgggcgtacctgtcacgcggcgattatcgcccgtgagctggggatcccggcggtggtcggctgcggtgatgctaccgatcgcattcaggaaaatcagaatgtcaccgtctcctgcgccgaaggcgacaccggctatgtctacgccgagctgctcgacttcagcgtcaagagctccagcgtcggcgacatgccggatctgccgctgaaggtgatgatgaacgtcggcaacccggatcgcgcgttcgacttcgcctgcctgccgaacgaaggcgtcggtctggcgcggctggaatttatcatcaaccgtatgattggcgttcatccgcgcgcgctgctggagtttgacgaccaggagccgggcctgcagaacgaaatccgcgagctgatgaaaggctacgattcgccgagagagttctacgttggccgcctgaccgaagggatcgccactctcggcgccgctttctatccgaaacgggtgatcgtgcgtctgtcggacttcaaatcgaacgaatacgccaacctggtgggcggcgagcgctatgagccggaagaagagaacccgatgctcggcttccgcggcgccggacgctacgtttccgaaagcttccgcgactgcttcgccctggagtgcgaagcgatgaagcgcgtgcgtaacgatatgggactgaccaacgttgaagtgatggtcccgttcgtccgtaccgtcgcccaggcgaaagcggtggtcgaagagctggagcgtcaggggctgaagcgcggcgagaacgggctgaagatcattatgatgtgcgagatcccgtcgaacgccttgctggcggagcagttcctcgagtacttcgacggcttctccatcggttcgaacgacatgacccagctggcgctcggtctggaccgcgattccggtgtggtttctgagctgtttgatgaacgcaatgacgcggtgaaagccctgctgtcgatggccatccgcgcggcgaagaaacagggtaaatacgtcggcatctgcggccaggggccgtctgaccatgaggatttcgccgcctggctgatggaagaggggattgatagcttgtcactgaacccggataccgtggtacaaacctggttaggtctggcggaactgaaaaaataa

SEQ ID NO: 271710 - DNA, 834 bp, Klebsiella pneumoniae
atggaaagtgctgtagatcgccacgtattttatatttctgacggtaccgccatcacggcggaggtgctggggcatgccgtgatgtcgcaattcccggtcgccatcagcagcgtaaccctgccgtttgtggaaaacatcagccgcgcgcgggcggtaaaggagcagatcgacgccatctatcagcaaacgggtattcgcccgctggtgttctactccatcgtcatcccggaaatacgcgacattattctgcaaagcgaaggcttttgtcaggatatcgtgcaggcgctggtggccccgctgcagcaggagctcaacctcgacccgacgccggtggcccaccgtacccacggcctcaaccccggcaacctgattaaatacgatgcgcgtatcgccgccatcgattataccctcgcccatgacgatggcatctcgctgcgcaaccttgaccaggcgcaggtgatcctcctcggcgtctcgcgctgcggcaaaacacccaccagtctgtatctcgccatgcagtacggtattcgcgccgccaactatccgtttatcgccgacgatatggacaatctggtgctgccggcctcgctgaaacccctgcagcataagatgttcggcctgaccatcaatccggagcgtctggcggcgatccgcgaggagcgccgggagaacagccgctacgcctcgctgcgccagtgtcggatggaagtgaccgaagtggaggccctgtatcgcaagaataaaatcccctgcctgaacagcaccaactattccgttgaggaaatagcgacaaaaatcatggacatcatggggctgaatcgcagaatgtactaa

SEQ ID NO: 271711 - DNA, 1047 bp, Klebsiella pneumoniae
atgaataaaacagacgaattgcgtaccgcgcgcattgagagcctggtaacgcccgcggagctggcccagcgccatcccgtgacggccgacgtggctgcccacgtctcggcctcccgccgccgaattgaaaaaatcctcaacggcgaagaccgccgactgctggtgattatcggcccctgctccattcacgacaccgacgcggcgctggagtatgcccgccgcctgcagggcatgcgcgagcgctaccagccgcagctggagatcgtgatgcgcacctactttgaaaaaccgcgtaccgtggtgggctggaaaggcttaatctccgatccggacctcaacggcagctaccgggtcaaccacggaattgagctggcgcggcgcctgctgctgcaggttaatgagctgggggtaccgacggccaccgagtttctcgatatggtgaccggtcagtttatcgccgatctcatcagctggggggccatcggggcgcgcaccactgaaagccagatccaccgtgaaatggcctcagcgctctcctgcccggttggatttaaaaacggcaccgacggcaatacgcgcatcgcggtggacgccatccgcgcctcccgcgccagccatatgttcctctccccggacaagcaggggcagatgacgatttaccagaccagcggcaatccgtatgggcatattattatgcgcggcggcaaacggccaaactatcacgccgaggatatcgccgccgccggcgaggcgctacgtgaattcgatctgccggaacagctggtcgttgatttcagccatggcaactgccagaagcagcaccgccgtcagctggaggtgtgcgccgatatctgtcagcaaattcgcgcgggctccaccgccatcgccgggattatggccgaaagcttcctgcaggaaggcactcagaaagtggtccccggccagccgctgacctggggccagtcgatcaccgacccctgcctgagctgggaagacagcgaaagattattgagcgagctggctgcggccaccgccacccgcctgtaa

SEQ ID NO: 271712 - DNA, 228 bp, Klebsiella pneumoniae; identical to SEQ ID NO: 135742

SEQ ID NO: 271713 - DNA, 1443 bp, Klebsiella pneumoniae
atgaccctttcttttaccacccactggcgggatgaactgccggacttttacacttccctgtcaccaacgccgttggataacgcccgactcatctggcgcaacgccccgctggcgcaacagctgggggtgcccgacgccctgtttgcgcctgaaagcggggccggtgtctggggcggcgaagcgctgcttccgggcatgtcgccgctggcgcaggtatatagcggccatcagtttggcgcctgggccggccagctgggcgacggacgcgggatcctgctcggcgagcagcagctggcggatggccgccgttacgactggcatctgaaaggcgccggcctgactccttattcgcggatgggggacggccgcgccgtgctgcgctcgacgatccgggaaagtctggcgtcggaggcgatgcacgctctggggatcccgacgacgcgcgccctggcgatggtgaccagcgataccccggtctaccgcgagcgcgtggagcccggcgcgatgctgatgcgggtggccgagagccatgtgcgcttcggccatttcgaacatttttactatcgccgtgagccgcagaaggtccagcaactggccgactatgttattcgccaccactggccgcagctgcaggatgaggcggataagtacctgttatggttccgtgacattgtcatgcgtaccgcgcagactatcgccagctggcaaaccgtgggctttgcccatggggtgatgaataccgacaacatgtcgattctcggtctgaccatcgactacggcccgtatggcttccttgacgatttccaaccggacttcatctgcaaccactccgattatcaggggcgctacagttttgaaaaccagccggcggtggggctgtggaatctgcagcgtctcgcccaatcgctgtcgccgtttatcagcgctgaagcgttaaacgcggcgctggatgagtatcagcacgccttgctgaccgcttatggccagcggatgcgcgataaactcggcctgttcagccagcagaaaggggataacgacctgctggacgggctgtttgccctgatgatccgcgagaagagcgactatacccggacgttccgcctgctgagccacagcgaacagctcagcgccgcatcgccgctgcgcgatgagtttatcgaccgcgcggcctttgacagctggtttgccgggtatcgtgcgcggctgcgtgatgaacaggtggacgacgcgcagcgccagcagaggatgcagggcgtgaatccggcgctggtgttacgtaactggctggcgcagcgggcgatcgagcaggctgaggcgggcgatatgggcgagctggagcgcctgcatgccgcgctggcagacccctttaccgatcgcgaggacgactacgtccgccgcccgccggactgggggaaacgtctggaagtcagctgctcgagctaa

SEQ ID NO: 271714 - DNA, 465 bp, Klebsiella pneumoniae
atgcgcttctggttcatgttggcggcggcgttaattttagccggctgcagcagccatcgggcaccgccgccgaatcctcggctggcagactccattacggtggtggcgaatctgaacgagcagctgcgcagctggcgcggcgcgccgtatcgctacggcggcatgacgccgcgcggcgttgactgctccggcttcgtggtgcgcacgtttcgcgataaatttgccctccagctgccgcgtgaaacccgcgagcaggcggaaatcggcacccgcatcgataagcgcgatctgctgcccggcgatctggtgttcttcaaaaccggctcaggggaaagcggtctgcacgttggcatctacgataccgacaaccagtttattcacgcctccaccagccagggcgtcacccgttcctcgctggataacgtctactggaacaaaaagttctggcaggcgcggcgaatctga

SEQ ID NO: 271715 - DNA, 750 bp, Klebsiella pneumoniae
atgtcgtttctgatgcagctacaggatgtagaagcggcggggcgcctggccccgttttctgcggcctttcgcgccggggagattgtccatctggtggggccgaacggcgcagggaagagcacgctgttgacccgcatggcggggctgtccgacggccccggcatggttcattttaacggccggctgcttgacgagtggccggcgagggagctggcgcgccgtcgcgggtatctgtgtcaacaccagaccccgccgttcgccatgccggtatggcactacctggcgctgcatatgcagcagcagggtgatagcgcccgtctgagcgatatcgcggccaggcttggtctggacaataagctgggccgtccggtcaatcagctgtcgggcggcgagtggcagcgcgtgcggctggcggcagtgatcctgcagatcgatcccttgagtaattccgcgggtcagctgctgctgctggatgagccgatgaacagtctggatgtggcccagcaggcggcgctggatcggctgttacacgagctgagcgcggcggggattgcggtggtgatgagcagccacgatctcaaccataccctgcgccacgccggtcagagctggctgctctgccagggggaagccatcgcctgcggggagaccgccgaggtgctgaatgaggaaaatttaaccgccgcctatgcgatcccgttccagcgcgttgaggtggccggtcatattatgctcatcgcgtcacagtag

SEQ ID NO: 271716 - DNA, 552 bp, Klebsiella pneumoniae
atgcaacatgacattctgaataccgaagtgacgaccattgatggcgagaaaaccaccctggcatcctttgccggcaaggtgctgctgatcgtcaatgtagcctcgaaatgcggcctgacgccgcagtatgagcaactcgaggatctgcaaaagcagtttgccgccgagggcttcagcgtgctggggttcccctgcaaccagttcctcggccaggagccgggcagtgaagaggagattaagaccttctgcagcactacctacggcgtcaccttcccgctgtttagcaaaattgacgtcaacggcgaacatcgcgcgccgctctatcaaaaactgattgccgccgcgccgaaagcggtggccccggaaggcagcggtttttatgagcggatggccagcaaaggccgggcgccgctgtatgtggacgacattctgtggaacttcgaaaaattcctcatcaatcgccagggcaacgtcattcagcgcttctcgccggatatgacgccggacgatccgcagctggtggcggcgattaaaggagcgctggcgcaataa

SEQ ID NO: 271717 - DNA, 801 bp, Klebsiella pneumoniae
atgaagaagttgtttagcctggcgttaatcgccacctctgtcgccctgctgagcgcctgctccccggatgaagataataaagtaaaagtcgctatcaataccgggccggacgaagccatctggaaagtggtggagcaggtggcgaaggataaatatcatctcaacgtcgaagtggtctccttcaatgattatgtgctgcccaacgaagcactgaacaacaaagatgtggatgccaacgccttccagaccctgccgtaccttgaggcgcagtcgaaagagcgcggctataaatttgcggtggtaggtaaaacctttgtcttccctatcgccgcctattctcaccggatcaaaaacatcagcgaactgcctgaaggggcgacggtgaccatttctaatgaaaccaccaccctgggccgcagcctgctgctgcttcaggcgcaggggttactcaagctgaaaccgggcgtcggctatttacccaccacgctggatatcatcgacaatccgaaacagctgaaaattgttgaagtggataccccgcagctgacccgtacccttgacgatccgaacgtcagcctgtcaatcattaacaccaacttctccgcccaggcgggcctgtcggccgcccgcgacggtctgtttatggaggggccggattccccatacgtgaatgcgatagtcgcccgcgaggataataaggacagcaagaaaattcaggaattaaaagccgccttccagaccagcgaagtcgcggaaaaagcgaaggaagtctacaaaggcgacgcgatcaaaggctggtaa

SEQ ID NO: 271718 - DNA, 987 bp, Klebsiella pneumoniae
atgctgactctcgcccatcttcaacagcgccgcagccggcgttggctcttaggattaacgctgttgctgctggtcaccctgctgatcagcctgtgcgcgggggagcaatggatcccgcccggcgagtggctcagcgccaaaggtcagctgtttatctggcagatccgcctgccgcgaaccctggcggtgctgctggtgggggcggcgctggcgctctccggggcgattatgcaggcgttgtttgaaaatcctctggcggagccggggctgctgggggtctccaacggcgcgggcgtcgggctgattgccgccgtcctgctgggcaaaggagtcttgcccggctgggcgctcggcctgtgtgccatctttggcgcgctgctgatcacttttattctgctgcgttttgcccgccgccatctgtctaccagccgtctgctgctggcgggggtggcgctggggatcatctgcagcgccctgatgacctgggcagtctacttctccacctcttttgacctgcgtcagctaatgtactggatgatgggcgggtttggcggcgttgactggcaacagctgtggctgatgatagccctcctgccggtgctctgctgggtctgtctgcagtcgcaacccctgaatttactggcgctgggcgaagtctccgctcgtcagcttgggctgccgctgtggctgtggcgcaaattactggtggtggcgaccggctggatggtcggcgttagcgtggcgctggcgggggcgattggctttatcggtctggtgatcccgcatattctgcggctatgcggcttgagcgatcaccgggtgttgctcccggcctgtatgctggccggggcaagcgccttgctgggggcggatatcattgcccggctggcgctttccgccgcagagctgccgattggcgtggtgacggcgaccctgggcgcgccggtctttatctggttgctgctgcgttcgcgggggcggggatag

SEQ ID NO: 271719 - DNA, 1434 bp, Klebsiella pneumoniae
atgagtgactcaacgctcacaggcaatgcgcctgtcagacgaaatatcacgcggaaaaacgttattattggtctgttattgctgctgttcgtgttgatcgcgctgtggtgccacggtcgaccaggcagcgagcttggtctgctgggatttacgccgctggtggcgctagcgatattatcgctgatcggcgttgatattgtgctggcggtcatctcctcgattattatcgccatgataatgacctcgaccggcctgccggaaatgggcacgatgctggcgaaatccaccgggtcatttattgccaccgttgggcttatcattatgctcggcgccggcgtgggggaagtggccacccgcaccggcgcagcggttgagctggtaaaatttgtcgtccatcgcatcgggttgtcgagtcagacgcgggtgaaattcggcattgtggcgtcatcgattttaatttgcggttcgctgggcactatggccggtggcaatgccattatcgtggcagtaatcattccggtggcggcagcggtacgcttgacgccgccaacggtcgccgcgctgatgatgaccgccggttccgttgggctgtttaccgggcctttcacccccagtaccgtgacgatcctcagcctcggtgggttgagctatccggactatctgctgtacgttggtctgccgatgagcgcggtcacgctgctggccggctgggtaatggcgggacggatccagaagatgaccgaaggcaaactgcgctatgacgtcgatctcgcggaaaagccgcaagaggatctcagcgccgcgcagcagcgtcggcgtaaattaagcgcgctggccttcgcggcgaccatcatcgtgatggcgatcgttggcgtggtgattaaagccggcttcagcttcgcgataatcgtgatgctgctggtggcccttatgaccggcctggtaggcggcctgcgaccgacgcagatccttcaggccctgtatcacggctgcggccgtctggtgtggatgtttattctttactggctgtacaacccgatccttgagctgatggatggcctgcacgcctatcaggggctgctggagtatactcaaccgctgctggaggggatctccccggcctggctgtgctttagcatcttcgcgttcaatattatcggccatgtgcccggtgcggcggtggcccagatgacctttactcataaaatctttggcccgatgctgatggccgccggcgtgccgccccaggggaccaccgccgtgctgctggcctcatcccaggtggactggttcgggccgtttccctcatcagatatgttcggccagatggggctggcgcagtctactcatctgaaatatatgctctataacggctgggcaatcgtggtggcgaatatcattctctttgcgctgctgtttcagattctggtgtga

SEQ ID NO: 271720 - DNA, 915 bp, Klebsiella pneumoniae
atgaaactgcgtcatctggaaatcttctatgccgtcatgacctgcggctctttatcgcgggcggcggaagcgctcaatatctcccagcccgcggccagcaaagcgttaaaaagcgccgaaatgaagctgggttttaccctgtttcagcgggtgcgcggcaagctgctgccgaccagcgaggcgatcacacttttcgaaaaagcgcagagcatttatcaggacctggacaacctgcgcctgctggccgacaacctggctcgcgatccgcgcgccaagatcactttaggctgtctgccaagcctggggttaagcctggtgccggagctggtgaccgacttttatcagcaaaacagcaacctggtgatgacgctcactaccgagcacaccgagacgctggtcaaaaaactggatttgcgcgagatagatttggcgctgacgctacagccggtgcagcagggagagatcctgaccaccctgattgccgaagtaccgctggtgtacatcgaccgtcattatcgtcagggggcggtggagatcgaccagatcgaccagcagcgctggatctcgccgggaccgcactcgctctctgccgccatcgccacccgtcgcgacttttccaccacccggctaaacgtccagacctactatatggccaccgagttcgtgaagcgcggcatgggctgcagcatcactgatatcttttccgcccagcacaacctggccccggagatgatccatcccattacgccgccgatggcgattaacctctgtctgttacgccgggccgacgtttccctgagcccgatggcgcaaaagttcgtcgattttctctgccagcgtctgcgccagcagctcaaggagattaacctgcggttataccctgaccataaaaagtcaattgcgccgctggggtaa

SEQ ID NO: 271721 - DNA, 1254 bp, Klebsiella pneumoniae
atgaacaaacgcattgtcattatcggcggcggcgtggtcggtctggccacggcctgggaactgatcaagcgcggccatcaggtgcaattactggagcgcaatgccgaaccgggcagcgccaccagttttgccaacggcggacaattaagttaccgctacgtcgccccccttgccgacagcggcgttcccctgcagggaatgaaatggatgggcaaagccgattcgccgctgaatatgcgtctcaggatgtctctccagcagtggcgctggctgctgcagtttctgcgcgcctgtaataaccagaccaataaaatgaatggcgaccatattttacgcctgtcgttgctcagccgtcaggtcatgcaggcgtggcgggatgaggataatcttgccgatttccactggcggcgcagcggaaaattaattatccatcgtcgcgaatatgattttaataaagcagcaaaagggattgatcctcagtatcagcaggcgctgaatgctgaagcctgcctgcagctggagccggcgctcaaacatattagtccttctctgcagggcggaatctattcgccaggcgatgaaacggcagattgtcatcagttctgccttgccctgctcgacaagctcaatgccagcagcgactttagcctgctgacccagtgtgaggtgcggcgactcaataagcgcgggggacgcatcagcagcctggagaccagtcaggggaccctcaccggcgatgagtatgtcgtcgccgccggtaacggcagtggttctctgcttgggcatctgggggttcgcgtgccgctgtgcgccctgaaggggtacagcctgaccctgccctatcctgaaaaagcaggtattgcccctgacatcagcgtcaccgactacgggcacaaaatcgtttatgcccgccttggccaacagctgcgtatcgcggcgatggtggacatcggctacgacggcgacgaactgcgcgaaagccgcattcaggcgctgaaaaacatcgtcgcccgcagctttcctgaactggaggggctggacgaggccgaagtctggaccggcatgcgcccgtcaacgccagccggcccgccgatgctggggcgcgccggataccccaacctgtggatgaacctcggccagggtagcctcggctttactctcgccgccggcagcgcggtggtgctgggcgcgttaatcgacaatcagatgccagacatttctttagaaggtctcacatggaaacaaaccgcatga

SEQ ID NO: 271722 - DNA, 369 bp, Klebsiella pneumoniae
atggaaacaaaccgcatgacaattattcgtaataatccacaacctcgtcttgccgccagcgttgcgtatggcgatctgctgttcctctccgggcagacgccaaaaagcaatgaagacgatatcgttttacaaacccgtgaagtactggagaagatcgacgcgctgctggccgcggccgggagcgataagcagcacattctctccgcgcagatctggttgaaaaatatcgagcgtgactttgccgcattcaatgaggtgtgggtgcaatggatgccggaaggctatagcccggcgcgagcggccgtgcaggcggagatggcgcgaccagaaatcctggtggagatcatgctcaccgccgtcaaagcgtaa

SEQ ID NO: 271723 - DNA, 300 bp, Klebsiella pneumoniae; identical to SEQ ID NO: 212911

SEQ ID NO: 271724 - DNA, 2388 bp, Klebsiella pneumoniae
atgaaattcagtgaactgtggttacgcgaatgggttaacccggcgatcgacagcgaagcgctttccgatcagatcaccatggcgggcctcgaagtagatggcgttgagccggtcgccggcagcttcaacggcgtcgtagtcggggaagtggtggagtgcggtcagcacccgaacgccgacaaactgcgcgtcaccaaagtcaacgtcggcggcgaacgcctgctggacatcgtctgcggcgcgccaaactgccgtcaggggctaaaggtcgcggtagccaccatcggcgccgtgctgccgggcgatttcaaaatcaaggccgcgaagctgcgcggcgagccgtctgaggggatgctgtgctccttctccgagctgggtatttccgacgaccatagcggtatcatcgagctgccggcagatgcgcccatcggcaccgatattcgcgaatacctcaagcttgacgataacaccatcgaaatcagcgtcacgccaaaccgcgccgattgcctgggcatcattggcgtggcgcgcgatgtcgctgtcctgaacaaagcgccgctgaacgcgccggaaatcacgccggttgccgcgacgattgacgacgagctgccgattcaggttgacgcgccgcaggcttgcccgcgctatctggggcgcgtggtgaaaggtatcaacgtcaaagcgccgacgccgctgtggatgaaagagaagctgcgccgctgcgggatccgctccatcgacgcggtggttgacgtgaccaactatgtgctgcttgagctgggccagccgatgcacgcctttgaccgcgaccgtattgaaggcgggatcgtggtgcgcatggcgaaagaaggggaaaccctggtcctgctcgatggctctgaagcaaagctcgacagcgacacgctggtcattgcagaccataacaaagcgctggcgatgggggggatcttcggcggggaacactccggcgttaacgacgaaacccagaacgtgctgctggaatgcgcgttcttcagcccgctgtccattaccggccgcgcgcgccgtcatggcctgcacaccgatgcctctcaccgctatgagcgcggcgtcgatccggccctgcagtataaagcgctggagcgtgcaacccgtctgctgatcgacctctgcggcggtgaagccggcccggtcattgacgttaccagcaaagagaatctaccaacacgcgccaccattacgctgcgtcgcagcaagctggatcgcctgattggccaccatatcgacgacgcgcaggtcaccgacattctgcagcgcctcggctgcgaagtgacggttggcgagggcgaatggcaggcggttgcgccgagctggcgtttcgacatggagatcgaagaagatctggttgaagaagtggctcgcgtttacggctacaacaacattcctgacgagccggtgcaggcgggtctgatcatgggaacccaccgcgaagcggacctgtcgctgaagcgcgtgaaaacgctgctgaacgacaaaggctatcaggaagtgatcacctacagcttcgtcgacccgaaagtccagcagctgatccacgccggggaagaggcgctgatcctgccaagcccgatctccagcgaaatgtcggcgatgcgcctgtcgctgtggaccggcctgctgggcaccgtggtctacaaccagaaccgtcagcagagccgggtgcgcatctttgagagcggcctgcgctttgtgccggacaccaatgcgccgctgggcattcgtcaggatgtgatgctggccggggcgatctgcggcaaccgctacgaagagcactggacactggcgaaagagacggtagatttctatgatctgaaaggcgatctggaagccgttctggatttaaccggaaaattagcggatatcgaattccgtgctgaagcgaccaccgcgctgcatccgggacaatccgcagcgatttatcttaaaggtgaacgcattggtttcattggggttgttcatcctgagctggaacgtaaactggatctgaacggtcgcactctggtgttcgaactggagtggaacaagctcgcagaccgcgtggtgcctcaggcgcgcgatatttcccgcttcccggcgaaccgtcgcgacatcgcggtgctggtcgcggaaaacgtggctgccgccgatgttttagccgaatgtaagaaagttggcgtaaatcaggtagttggcgtaaacttatttgacgtgtaccgtggtaagggtgtggcggaagggtataagagccttgcgattagcctgatcctgcaggataccagccgtacactcgaagaagaggagattgccgctaccgttgccagatgtgtagaggcattaaaagagcgattccaggcatcattgagggattga

SEQ ID NO: 271725 - DNA, 984 bp, Klebsiella pneumoniae
atgtcacatctcgcagagctggttgccagtgccaaggcagccattaacgaggcatcagatgttgctgcgctggacaacgtccgcgtggaatacctgggtaaaaaagggcatctgaccctgcaaatgaccaccctgcgtgagctgccgccggaagagcgtccggcagccggtgcggtcatcaacgaggcgaaagagcaggtgcagcaggcgctgaacgcgcgtaaagctgaactggaaggcgcagcgctgaatgcgcgtctggccgcagagaccattgacgtctcgctgccgggtcgccgcattgaaaacggcggcctgcatccggttactcgcaccatcgaccgtattgaaagtttcttcggtgagctcggctttaccgtggcgacgggcccggaaatcgaagacgattaccacaacttcgatgcgctgaatattccgggtcaccatccggcgcgcgctgaccacgacactttctggttcgatgccactcgcctgctgcgtacgcagacctccggcgtgcagatccgcaccatggaaaagcagcagccgcctatccgtattatcgcgccgggccgcgtctatcgtaacgactacgatcagacccacaccccgatgttccatcagatggaaggtctgatcgttgataaaaatatcagcttcaccaacctgaaagggacgctgcacgacttcctgaacaacttctttgaagaagatctgcaggtccgcttccgtccgtcctacttcccgttcaccgaaccgtctgcggaagttgacgtgatgggtaaaaacggcaaatggctggaagtgctgggctgcgggatggtgcacccgaacgtgctgcgtaacgtgggtatcgatccggaagtctactccggcttcgccttcggcatgggcatggagcgtctgaccatgctgcgctatggcgtcaccgatctgcgcgcgttcttcgaaaacgatctgcgtttcctcaaacagtttaaataa

SEQ ID NO: 271726 - DNA, 357 bp, Klebsiella pneumoniae; identical to SEQ ID NO: 212908

SEQ ID NO: 271727 - DNA, 198 bp, Klebsiella pneumoniae; identical to SEQ ID NO: 212907

SEQ ID NO: 271728 - DNA, 435 bp, Klebsiella pneumoniae; identical to SEQ ID NO: 212906

SEQ ID NO: 271729 - DNA, 1929 bp, Klebsiella pneumoniae
atgcctgtaattacgcttcctgatggcagccaacgccattttgaccacgcagttagtccgatggatgtcgcgctggatatcggtccaggcctggcgaaagccaccattgccgggcgggtaaacggtgaactggtagacgcctgtgacccgatcgaatccgattccactctctctatcatcaccgcgaaagatgaagaagggctggagatcattcgtcactcctgcgcgcacctgttaggccatgccatcaaacagctgtggcccaacaccaaaatggctatcggtccggttgtcgataatggtttctactatgacgtagacctcgaccacaccctgacccaggaagatatcgacgcgctcgaaaaacgtatgcatgagctcgccgagaaaaactacgacgttatcaagaagaaagtgagctggcatgaagcgcgtgaaaccttcgtgaaacgcggcgaaagctataaagtttctattcttgatgaaaacattgcccatgatgacaagcctggcctgtatcatcatgaagaatatatcgatatgtgccgcggtccgcacgtaccgaacatgcgcttctgccatcactttaagctgatgaaaaccgccggagcctactggcgcggcgacagcaacaataaaatgttgcagcgtatctacggcaccgcgtgggcagataaaaaagcgctgaatgcctacctgcagcgtctggaagaagccgccaagcgtgaccaccgtaaaatcggtaagcagctcgacctgtatcacatgcaggaagaggcgccggggatggtgttctggcacaatgacggctggaccatcttccgtgaactggaaacgtttgttcgttctaaactgaaagagtaccagtatcaggaagtaaaaggtccgttcatgatggaccgtgtgctgtgggaaaaaaccggccactgggacaactacaaagatgcgatgttcaccacctcttctgagaaccgtgaatactgtatcaagccgatgaactgcccgggtcacgtgcagatcttcaaccaggggctgaaatcctaccgcgacctgccgctgcgtatggcggaattcggtagctgccaccgtaacgaaccgtctggcgcgctgcatggtctgatgcgcgtgcgcggctttacccaggatgatgcgcatatcttctgtactgaagatcaggttcgcgatgaagtgaacgcctgtattcgtatggtctacgatatgtatagcacctttggcttcgagaagatcgtcgtcaaactgtcgactcgcccggaaaaacgtatcggtagcgacgagacctgggatcgcgcggaagcggatctggcggtggcgctggaagaaaataacatcccatttgaatatcaactgggtgaaggggcgttctacggcccgaaaattgaatttaccctgtatgactgcctcgatcgtgcatggcagtgcggtaccgtacagctggacttctctctgccgcagcgtttaagcgcctcctatgtgggcgaaaacaacgagcgtcaggtgccggtcatgattcaccgtgcgattctcggttctctggagcgcttcattggcatcctgaccgaagagttcgcaggcttcttcccaacctggattgcaccagtgcaggtagtggtcatgaatatcaccgattctcaggctgaatacgttaacgaattgacgcgtaaactacaaaatgcgggcattcgtgtaaaagcagacttgagaaatgagaagattggctttaaaatccgcgagcacactttacgtcgtgtcccgtatatgttggtctgtggcgacaaagaagtcgaagccggcaaagtggccgtgcgcacccgtcgcgggaaagacctcggcagcatggacgtaaatgaagtgatcgagaagctgcaacaagagattcgcagccgcagtcttcaacaactggaggaataa

SEQ ID NO: 271730 - DNA, 234 bp, Klebsiella pneumoniae
atgaaaaacaatcgatataccatcgcagccctggcgctgtgcgtgctttcttttggcgcatcagccgccacgcccgttccgccatcgggtcatcaggatcatacccaggtaggtatcgccaaagccactgacgttgaggctggttcgaatattgcgcccggcgcccctaccaccggaaaatccatgaacgacgcctttaatgtgcatacgctggtggccggcgagtggtcttaa

SEQ ID NO: 271731 - DNA, 759 bp, Klebsiella pneumoniae
atgaagcttttaaagacagtacccgcagcggttatgctggcgggggggctttttgcgtctgttggcgcaatggccgatgattctgtatttaccgtcatggatgacccttccgctgccaaaaaaccgttcgaaggggtggttaacgcaggctacctggcgcagtccggcaacaccaagagctcttcgatgacggcggattccaccctgacctggtatggtaataccaccgcctggtcgctgtggggcaacgccagcaacacgtcgtccaatgatgagcgatcctcagaaaaatatgctgtcggcggacgtagccgctacaacctgaccgatatgaactatgtttttggtcagggtagctggctaactgaccgctacaacggctatcaacagcgcgatgttgtgacggcgggctatggtcgtcagatcctcaacgggccggtgcacagtctgcggtttgaattcggtcctggcgttcgctatgacgaatataccgacggggatactgatacccagccgctgggttatgcttcgggtacatgggcctggcagatgaccgataacgccaaattttcacaaggggtatcggtgttcggcgccgaggacaccacggtcaactcagagagcgcgttaaacgtggcgattaacgcccatttcgccctgaaggtcgcctacaacgtgacctggaactctgagccgcctgcgtccgcgccggagcataccgatcgccggacctcgctctccctcgggtataagatgtaa

SEQ ID NO: 271732 - DNA, 933 bp, Klebsiella pneumoniae
atgaccaaaatttacacgctcacgctggccccctcgctggatagcgccacgcaaaccccacagatctacccggaaggcaaacttcgctgcagcgcgccggtatttgaacctggcggcggcgggatcaatgtggcccgcgccgtgacctttctcggcggcaaagccaccgccattttcccggtcggtggcgctaccggcgagcatcttgcagccctgctggccgatgagcaggtgccggtcgagaccgtcgaaacccgcgactggacgcggcaaaacctgcacgtccacgtggccgccagcggcgaacagtatcgcttcgttatgcccggcgcggcactgacggacgatgaattccgccgtctggaagagaaggttctgactatcgaacccggctctctgctggtggtcagcggcagcctgccgccaggtattagcgtcgataacctgatgcagctggtgaaaaatgcgcaacagcagggactgcgctgcatcattgacagttccggcgatgcgctggccgccgcgctggacgtcggcaatattgagctggtgaaaccgaaccagaaagagcttagcgccctcgtgcagcgcgatctcagccaacccgatgacgtgcgccttgccgctcagtcgttgatccagtccggtaaagtgcgccgggtggtggtctccctgggtccgcagggggcgttaggcgtggacgccagcggcagcgttcaggttgtgccgccaccgatgaaaagccagagcaccgtcggcgctggcgacagcatggtgggcgccatgaccttgcgtctggcggaaaacgccagccttgaagacatggtacgctttggcgtcgccgccggtagcgccgcgaccatcaaccagggcacccgcctctgctcgcgggccaatacgcaaaaaatctatgattatctctgcgggcgttga

SEQ ID NO: 271733 - DNA, 285 bp, Klebsiella pneumoniae; identical to SEQ ID NO: 212901

SEQ ID NO: 271734 - DNA, 873 bp, Klebsiella pneumoniae
atgtggcaagcaatcagtactcttttacgcgattggcataccgaagacgctgaaatcgaactgaaaaccgagctgcccggtggagagatccattccgcctggcatttacgcttcggcgggaaagattacttcgtgaaatgcgacgaacgggaacttctgcctatcttcaccgccgagtccgatcagctggagctgctgtcgcgaagcaaaaccgttcgcgtaccgcaggtctttgccgtcggcagcgatcgcgactatagcttcgtggtcatggagtacctccctccccgtccgctggatgcgcacaatgcgtttctgcttggccagcagctagcccacctccatcagtggagcgatcagccgcagttcggtctggattttgataacgatctttccaccacgccgcagcccaacgcctggcagcgtcgctggtcggttttttttgccgagcagcgtatcggctggcagctggagctcgcggcggagaagggattgcactttggcgatatcgataccttagtcgatatggtacagcagcgactggccaaccatcagccgcagccttcgctgctgcacggggatctgtggtccggcaactgcgccttagggccggatggcccctatatattcgatcccgcctgctactggggcgaccgcgagtgcgatttagccatgctgccgatgcatccggaacagcccccgcaaatctatgacggctatcagtccgtttcgcctctgccgtcgggttttctcgatcgtcagccgatttatcagctttatactctgctgaacagagcgattttgtttggcggccagcacctggtaacggcccaacaggcgctggatgatgtattgatggagaaaatgcgttaa

SEQ ID NO: 271735 - DNA, 738 bp, Klebsiella pneumoniae
atgacccttgatttacctcgccgctttccgtggccaacgctgctgtccgtggctatccacggtgccgttgtggcggggctgctttatacctcggtacatcaggttattgaacagccttctccgacgcagccgatagagatcacaatggtggcgccggccgatcttgagccgcctccggcggcgcagcctgtcgtggagcccgttgttgaacccgaacctgagccggagccagaggtagcgcctgaaccgccgaaagaggcgccggtggtgatccataaaccggaacctaagccgaagcccaaacctaaacccaagcctaagccggagaaaaaggttgaacagccgaagcgggaagtgaagccggcagcagagccgcgtccggcctcgccgtttgaaaacaacaatacggcgccggcgcgtacagcgccaagcacctcgacagcagcggctaaacccaccgttactgctccgagcggcccgcgggcgatcagccgcgttcagccgtcctatccgccgcgcgctcaggcgctgcgcattgaagggacggtacgggtgaagtttgacgtttcgcctgatggccgcattgataatctgcagatcctctctgctcagccggcgaatatgttcgaacgcgaggtgaaaagcgcgatgcgcagatggcgttatgagcagggaagaccgggtaccggcgtaacgatgaccatcaaattccgcctgaacggcgtcgagattaactga

SEQ ID NO: 271736 - DNA, 297 bp, Klebsiella pneumoniae
gtgctttacgttatctacgctgaagatatcgccgattctctggaaaagcggctgtcggttcgccccgcgcatctcgcgcgtttacaactcttacacgatgaaggccgactgcttaccgccgggccaatgccggccgttgacagtaacgaaccgggcgcagcaggattcagcggctcaacggtgattgccgagtttgaatcgctggaagcggcccaggcctgggctaatgacgatccgtatatcgccgccggggtttaccgccaggtctcagttaagccgtataagaaggttttttga

SEQ ID NO: 271737 - DNA, 648 bp, Klebsiella pneumoniae; identical to SEQ ID NO: 212897

SEQ ID NO: 271738 - DNA, 207 bp, Klebsiella pneumoniae; identical to SEQ ID NO: 137704

SEQ ID NO: 271739 - DNA, 1461 bp, Klebsiella pneumoniae
atgacaaccttttacacggtggtgaactggctggtcattctggggtactggctgttgatcgccggtgtaacattacgaattctaatgaaacgccgcgctgtcccgtccgccatggcatggttgctgatcatttatatcctgccgctggtggggatcatcgcctatctctcctttggcgagctgcatctcggcaagcgtcgggccgagcgcgccagggcgatgtggccctcgacggccaagtggttaaacgacctcaaagcctgcaaacatatcttcgcggaagataacagcccggtggccgaatccctgttcaagctgtgcgaacggcgtcagggcattggcggcgtaaaaggcaaccagctacagctgctgacggaatctgacgacgtgatgcaggccctgatccgcgatattcagctggcccgtcacaacatagagatggtcttttatatctggcagcccggcggcatggccgacagcgtcgctgaatcgctgatggccgccgctcgccgcggggttcactgtcggctaatgctcgactccgcgggcagcgtggcctttttccgcagcccatgggcggcgatgatgcgtaacgccggtattgaagtcgtcgaagctcttaaggttaacctgatgcgcgtattcctgcgccggatggacctgcgtcagcatcgtaaaatggtgatgatcgataactatatcgcctacaccggcagcatgaatatggtcgatccgcgctactttaaacaggactcaggagtcggacagtggattgatctgatggcgcgaatggaaggcccggtggcgacctcgatgggcatcgtctactcctgcgactgggaaatagagaccggcaagcgcattctgccgccgcccccggacgtcaatatcatgccgttcgaagaggccagcggacatactattcacacgatcgcctccggaccgggctttccggaagatctgattcatcaggctctcctcaccgccgcctatgcggcgaaagagcatctgatcatgaccaccccctacttcgtacccagcgacgacctgctgcatgcgatctgtaccgccgcccagcgcggcgttgacgtgagcattattttaccgcgcaagaacgattcgctgctggtaggctgggccagccgggccttcttcaccgagctgctggcggccggggtcaaaatctatcagtttgagggcggactgttgcataccaagagcgtgctggtcgatggcgagctaagtctcgtggggaccgtcaacctggatatgcgcagcctgtggctcaacttcgagattaccctggtcatcgatgacgccggtttcggcagcgatctggcggcggttcaggatgattatatctcgcgctcgcgcctgctggatgcccgtctctggttaaaacgtccgctgtggcagcggatcgccgagcgactgttttacttcttcagcccgttgctgtaa

SEQ ID NO: 271740 - DNA, 330 bp, Klebsiella pneumoniae; identical to SEQ ID NO: 137702

SEQ ID NO: 271741 - DNA, 834 bp, Klebsiella pneumoniae
gtgggtatgctttctgccgctcgtctgcggctttatcatttacttttcgatcagaaccgacgttccggccgccgctttgaagggctgtgcggacttttcgccctgctcagcgtactggtgatatttatcgagtcgggactgggcacgcaatatcacctgacattagatgaatggcatattttcgtctggctggagctgctggtgaccgcggtctttaccctggaatacctgctgcgtatcgctacctggcccaatccgctccactatattttcagcttttgggggctgattgacctggcgacgattttaccgctgtatgtgatgtggctatggccggaaattagcctcaattatgtattcgcctggcgggcaatgcgggcgatccgcgcgctgcgtattctcaaactactgcgctttatgccttcgctcaacgtgttctggcgagcgattgtcagcgcgcgccatcagctgatcctgttttattcgtttatcgccattgtgatggtgattttcggctcgttaatgtatctgattgaggggccggaatacggcttcaccacgcttaacgcctcggtctattgggccatcgtgaccatcaccaccgtcggctacggagacatcacgccgcacacgccgttgggtcgcatcctggcctccattcttatcctgatcggctactccattattgccataccgaccggacttatcaccacgcatatgaccagcgccctgaatcgtcgacgacagcagcgcctgtgtccgcagtgtcagcagggcgaccatgacgataacgcccgtttctgccatgcctgcggtcatgccttgccgaagtaa

SEQ ID NO: 271742 - DNA, 1005 bp, Klebsiella pneumoniae
atgaacgccgtaactgaacaacgaaaagtcctgctcgaaattgccgacctgaaggtgcacttcgatatcaaagatggcaagcagtggttctggcagccgtcgaaaacgctgaaagcggtggatggcgtgacgctgcgcctttacgagggtgaaaccctcggtgtggtaggggagtcgggctgcggcaaatcgaccttcgcccgcgccattattggtctggtgaaagcgaccgatggcaaagtggcctggctgggtaaagatctgctgggcatgaagcaggaagagtggcgcgacgtgcgcagcgatatccagatgatcttccaggatccgctggcctcgctgaacccgcgcatgaccatcggagaaattatcgccgaaccgctgcgtacctatcatccgaagatgccccgtcaggaagtgcgcgatcgcgtcaaagcgatgatgatgaaagttggattgctgcccaacctgatcaaccgctatccgcacgagttctccggcggtcagtgtcagcgtatcggcatcgcgcgggcgctgatccttgagccaaagctgattatatgcgatgagccggtctctgcgcttgacgtgtcgattcaggcgcaggtcgtcaacctgctgcagcaactgcagcgtgagatggggctatcgctgatatttatcgctcacgatctggcggtggttaagcatatctccgatcgggttctggtaatgtatctgggccatgcggtggagctggggacctacgacgaggtgtaccataatccgctgcatccctataccaaagcgctgatgtcggcggtgccgatccccgatcctgatctcgagaaaacgaaaactatccaactgctggaaggcgaattaccctcgccgattaatccgccctcaggctgcgtattccgcacccgctgtccgcttgccggaccggagtgcgccaaaacccgcccggtgctggaaggcagtttccgccatgcggtttcctgccttaaggtagacccgttataa

SEQ ID NO: 271743 - DNA, 1014 bp, Klebsiella pneumoniae
atgaccatgattgaaacggcaaaagcgccgcaagcgcagagccacagcggactactgctggacgtgaaagatcttcgcgtcacctttaaaacgccggatggcgacgtcaccgccgtcaatgatctgaacttcaccctgcaggcgggcgagacgctcggcattgtgggcgaatccggctccggtaaatcgcaaaccgccttcgccctgatgggactgctggcggccaacggtcgcatcgggggttccgccacctttaacggtcggcaaatcctcaatttgcccgagcgtgagctgaacaaactgcgcgctgaacaaatctcaatgattttccaggatccgatgacctctcttaacccctatatgcgggtgggcgagcagttaatggaagtcctgatgctgcataaagggctgagtaaagccgaagcgtttgaagagtcggtgaagatgctcgacgcggtaaaaatgccggaagcgcgtaagcgcatgaaaatgttcccgcacgagttctccgggggcatgcgtcagcgcgtgatgattgccatggcgctgctgtgccggccccggctgctgattgcggatgaaccgaccactgccctggacgttaccgtgcaggcgcagatcatgacgctgttgaatgagcttaaacgcgaattcaacacggccattatcatgatcacccacgaccttggggtggtggcagggatctgcgataaagtgctggtgatgtacgccgggcgcaccatggagtacggtcaggcgcgcgatgtcttctatcaaccgtcgcacccatactctattgggctgttgaatgcggttccacgtctggatgcggaaggcgatgcgttgttgaccattcccggcaacccaccgaacctgctgcgattgccgaaaggctgtccattccagccgcgttgcccgcatgccatggagcagtgcagcagcgcgccgccgctggaatcgttcgcgccaggccgcctgcgcgcctgctttaaaccggtgggggatctgctatga

SEQ ID NO: 271744 - DNA, 909 bp, Klebsiella pneumoniae
atgatgttaagtaagaaaaatagcgaggcgctggaaaacttcagtgagaagctggaagtggaggggcgtagcctctggcaggatgcgcgtcgtcgctttatgcataaccgcgccgcggtgaccagcctgattatgctggtgcttattgcgctgttcgttaccttcgcgccgatggtgtcgtcgttctcctacttcgataccgactggggcatgatgtccaatgccccggatatggcctccggccactacttcggaaccgactcctccgggcgcgatctgctggtgcgcgtagcgatcggcgggcgcatttcgctgatggtcggggtggcggcggcgctggtggcggtgatcctcggcacgctgtacggttcgctctccggttatctcggcggcaaagtggattcggtgatgatgcgtctgctggagatcctcaactccttcccgtttatgttcttcgtcatcctgctggtgaccttttttggtcagaatatcctgctgatctttgtcgccattggcatggtgtcctggctggatatggcgcgtatcgtgcgcgggcagacgctgagcctgaagcgcaaagagtttatcgaagccgcgcaggtcggcggggtctcgacggcgagcatcgtgctgcgccatatcgtccccaacgtgctgggggtggtggtggtgtatgcctctctgctggtccccagcatgatcctcttcgaatccttcctcagtttcctgggactggggacgcaggagccgctcagcagctggggggcattgctcagcgatggcgccaactcaatggaagtttcgccctggctactgttgttcccggcgggtttcctggtggtgaccctgttctgtttcaactttatcggcgatggtctgcgtgatgccctcgacccgaaagaccgctaa

SEQ ID NO: 271745 - DNA, 921 bp, Klebsiella pneumoniae
atgttaaaatttatcttacgtcgctgtctggaagcgattccgacgctatttattcttatcaccatctcattcttcatgatgcgtctggcgccgggaagtccttttaccggggaacgcacgctaccgccggaagtcatggcgaatattgaagcaaaataccatttaaacgaccccatcatgacgcagtacttcaattatctgaagcagctggcgcatggcgattttggtccctcttttaaatacaaagattattccgtcaacgatctggtggccgccagcttcccggtttcagcgaaactgggcttcgccgcctttttactggcggtggtgatcggcgttgccgccggggtgatagccgccctgaagcaaaatacccgctgggactacgcggtgatgggggtagccatgaccggcgtggttattccgagctttgtggtcgcgccgctgctggtgatgatctttgccattaccctgcactggctgccgggcggcggctggaacggcggggcgctgaaatttatgatcctgccgatggtggcgctttccctggcctatatcgccagcatcgcgcgtatcacccgcggttcgatgattgaagtgctgcactctaactttatccgcaccgcgcgggcgaaggggctgccgatgcgtcgcattattctgcgccatgcgctgaagccggcgctgctgccggtgctctcctatatggggccagctttcgtgggcatcatcaccggctcaatggtcattgaaaccatttacggcctgccggggatcggccagctgttcgttaacggggcgcttaaccgcgactactcgctggtgctcagcctgacgatcctcgttggcgccctgactatcctgttcaacgccatcgttgacgtgctgtacgccgttatcgatccgaagattcgctactga

SEQ ID NO: 271746 - DNA, 1635 bp, Klebsiella pneumoniae
atgaccatcatcactaaaaagcgtttaatcgccgcgggagtgctatccgcactgatcgccggcaatatggcaatggcagcggatgtcccggctggtgtgcagctggcagagaagcaaaccctggtacgtaatagcggcgccgagccgcaatcgctggacccaaataaaatcgaaggggtgccagaggccaatattagccgcgacctgttcgaaggtttgctgaatacttcgccgaaagatggccacccgatccctggcgtggcggagagctgggataataaagattttaaagtctggaccttccatctgcgtaaagatgcaaaatggtctaacggcgagccggttaccgcccaggacttcgtatacagctggcagcgtctggtggatccgaaaacagcttctccttatgccagctatccgcaatatggtcatatcgttaacgtcgacgaaatcattgacggcaagaaagcgccgagcgagctgggcgtaaaagccattgacgaccacacgctggaagtcaccctcagcgaaccggtaccctatttttataaactgctggttaacccggcgatgtctcccgtctacaaaccggccatcgaaaaatttggcgaaaagtggacgcagcctggcaatatcgttaccaacggcgcgtatactctgaaagactgggtggtcaacgagcggatcgtgatggagcgtaacccgcactattgggataatgctaaaaccgtcattaacaccgttacctggctgccgacctcttccgaagtgacctatgttaaccgctaccgcagcggtgaactggacatgacttataaccagctgccgatcgaactcttccagaagctgaaaaaagagatccccaacgagctgcacgttgacccctatctgtgtacctattattacgaaatcaacaaccagaaggccccgttcaccgacgtgcgcgtgcgtaccgcgctgaagctgggtctggatcgcgatattattgctaataaggtgaaaggacagggcgatctgccggcctacggctacaccccaccgtataccgatggcgcgaagctgagcgagccggaatggtttacctggtcgcaggaaaaacggaatgaagaagcgaagaaactgctggccgaagccggctatagcgccgataaaccgttgaccttcaacctgctgtataacacctctgatttgcacaagaagctggcgattgccgccgcctcgctgtggcgtaaaaacctgggcattgacgtgaagctggtcaaccaggagtggaaaacgttcctcgatacccgtcatcagggcacctatgacgtggcgcgtgcgggctggtgcgccgactataacgagccaacctctttcctgaacaccatgctctctgacagttcaatgaacaccgcgcactataagagcccggcgttcgacaagattatggctgaatccgtaaaagcatccgatgaagcgcagcgcacggcggcctatgcgaaagcagagcagcagctggacaaagacagcgcgatcgtaccggtctattactacgttaacgcccgcctggtgaaaccatgggtcggtggctataccggtaaagacccgatggataacgtctataccaaagacctctacgttatcaaacattaa

SEQ ID NO: 271747 - DNA, 648 bp, Klebsiella pneumoniae
gtgactcaatcactgttcgatttttctgcatatttcaagtttttcatcggcttatttgccctggttaacccggttggcattattccggtattcatcagtatgaccagctatcagccggctgcggtgcgtaataagaccaacctcaccgccaacctgtcggtggcgatcatcctcctgacgtcgctgttcctcggcgatggcattctgcagattttcggtatctccattgactccttccgtatcgccggcggcatcctggtggtgaccatcgcgatgtcgatgatcagcggtaagctcggcgaagataagcagaacaagcaggaaaagtcggagacggcggtccgggagagcatcggcgtcgttcctctcgcgctaccattaatggccgggccaggggcaatcagttcaactatcgtctgggggacccggtaccactcctgggtgcatctggtcgggttctcactggcgatagcggtatttgccctctgctgctgggggattttccgtatggcgccgtggctggtccgtttgctggggcagacgggaatcaacgtcatcacccgtattatgggcctgttgctgatggctctcggcattgagtttattgtgaccgggattaaagcgcttttcccaggattgctgagttag

SEQ ID NO: 271748 - DNA, 2676 bp, Klebsiella pneumoniae
atggctgttactaatatcgctgaactgaacgcgcttgttgagcgtgtcaagaaagcccagcgtgaatatgccagtttcactcaagaacaagtcgacaaaatcttccgcgccgccgctctggccgctgcagatgctcgaatccctctcgccaaaatggccgtagccgaatccggcatgggcatcgttgaagacaaagtgatcaaaaaccactttgcttccgaatacatttacaacgcttataaagacgaaaaaacctgtggcgttctgtcagaagacgacacctttggcaccatcactattgctgagcctatcggcatcatctgcggtatcgtaccgaccactaacccgacttcaacagccattttcaaatcgctcatcagtctgaaaacgcgtaacgccatcattttctctccgcacccgcgtgcaaaagaagccaccaacaaagcggctgatatcgtgctgcaggctgccatcgcggccggcgcgccgaaggacctgattggctggatcgatcagccgtctgtagaactgtctaacgcgctgatgcatcacccggacatcaacctgatcctggcgaccggtggcccaggcatggtgaaagcagcgtacagctccggtaaacctgctatcggcgtcggcgccggtaacaccccggtagtcattgatgaaaccgccgacatcaaacgtgccgtagcgtccgtactgatgtctaaaaccttcgataacggcgtgatctgtgcttctgagcagtccgttgtggtggttgattcagtctatgacgcggttcgcgaacgtttcgccagccacggcggctacctgctgcagggtaaagagctgaaagccgttcaggacattatcctgaaaaatggcgcgctgaacgcggctatcgttggtcagccagcggccaaaatcgctgaactggcaggcttcaccgtgccggccaccaccaaaattctgattggtgaagtgaccaacgttgacgagagcgagccgtttgctcacgaaaaactgtctccgacgctggctatgtaccgtgcaaaagatttcgaagacgcggtagccaaagcagaaaaactggtcgccatgggcggtatcggccacacctcttgcctgtacaccgaccaggacaaccagccggctcgcgtggcttacttcggccaaatgatgaaaaccgcgcgtatcctgatcaacaccccggcttctcagggtggtatcggtgacctgtacaacttcaaactcgcgccttccctgactctgggttgtggttcctggggtggtaactccatctctgaaaacgttggtccgaaacacctgatcaacaagaaaaccgttgctaagcgagctgaaaacatgttgtggcacaaacttccgaaatctatctacttccgtcgtggctccctgccaatcgcactggatgaagtgattaccgatggtcacaaacgcgcgctgatcgtgactgaccgcttcctgttcaacaacggctatgccgatcagatcacttccgtactgaaagctgcgggtgttgagacggaagtcttcttcgaagttgaagctgacccgacgctgaccatcgtacgtaaaggtgccgacctggcgaactcctttaaaccagacgtgatcatcgccctgggcggcggttccccgatggatgcggcgaaaatcatgtgggtcatgtacgaacatccggaaacccacttcgaagaactggcgctgcgctttatggatatccgtaaacgtatctacaagttcccgaaaatgggcgtcaaagccaagatggtggcgatcactaccacttccggtaccggttctgaagttacgccgttcgccgtggtgaccgatgacgcgaccggtcagaaatacccgctggcagactacgcgctgaccccggatatggccattgtcgatgccaacctggtgatggatatgccgaaatcgctgtgtgcgttcggtggtctggatgcggtgactcacgccctggaagcttacgtttccgtactggcttctgagttctctgacggccaggcgctgcaggcgctgaaactgctgaaagagtacctgccggcttcctatcacgaaggttccaagaacccggttgcccgtgagcgcgtacacagtgccgcgactatcgccggtatcgcgttcgctaacgccttcctcggcgtgtgtcactcgatggcgcacaaactgggctcccagttccatattccgcacggtctggccaacgccctgctgatctgcaacgttatccgctataacgcgaatgacaacccgaccaagcagaccgcgttcagccagtacgaccgtccgcaggctcgtcgtcgttacgctgaaatcgccgatcacctgggcctctccgcaccaggcgaccgcaccgcagcgaaaatcgagaaactgctggcatggctggaaagcattaaagctgagctgggtattccgaaatctatccgcgaagctggcgttcaggaagctgacttcctggcccacgttgataaactgtctgaagatgcattcgatgaccagtgcaccggcgctaacccgcgctacccgctgatctccgaactgaaacagatcctgctggatacctactacggccgcgaattcgtcgaaggcgaagccggtgcgaaagcagaagttgctccggtaaaggctgagaaaaaagcgaaaaaatccgcttaa

SEQ ID NO: 271749 - DNA, 528 bp, Klebsiella pneumoniae; identical to SEQ ID NO: 212885

SEQ ID NO: 271750 - DNA, 408 bp, Klebsiella pneumoniae; identical to SEQ ID NO: 136625

SEQ ID NO: 271751 - DNA, 903 bp, Klebsiella pneumoniae
atggctgcccttaattctaaagtcagaaaagcggttatcccggttgcgggattaggcaccaggatgctgccggccaccaaagcgattccaaaagaaatgctgccgctggtagataagccgttaattcagtacgttgttaatgaatgtatcgctgcaggaattactgaaattgttctggtaacgcactcgtcgaaaaactctatcgaaaaccatttcgataccagttttgagctggaagcgatgctggaaaaacgtgtaaaacgccagctgctggaagaagtgcagtctatttgcccgccgcacgtgactattatgcaagttcgtcagggcctggcgaaaggtctgggtcacgcggtgctgtgcgcccatccggtagtgggagatgagccggtcgcggttattctgccagacgttattctggatgaatatgaatccgatctgagccgcgataacctcgctgagatgatctctcgcttcgatgagactggcgctagccagattatggttgaacctgttgaagacgtaaccgcttatggcgtggttgactgcaaaggcgaatccctgaagccgggcgaaagcgtaccgatggtgggcgtggttgagaagccaaaagctgacgttgcgccgtccaacctggcggtggtggggcgttatgtcctcagcgccgatatctggccgctgctggcgaaaacccctccgggcgctggtgatgaaattcagctgactgacgccattgatatgctgatcgagaaagaaacggttgaagcttatcatatgaaaggcaagagccatgactgcggtaataagcttggctacatgcaggcgtttgtcgaatatggtattcgtcacaaaacgctgggcgacgattttaaagcctggctggaaacggcggtagcgaagtaa

SEQ ID NO: 271752 - DNA, 1014 bp, Klebsiella pneumoniae
atgacgcagccattggcgggaaaacagattctgatagttgaagacgaacccgttttccgctcactcttgcatggatggctgacctcgctgggagcaacaaccttccaggcggaagatggcaaggatgccctgcataaaatgacggaggtgcatccggacctgatgatttgcgacatttctatgccgagaatgaacggtctggagctggtggaaacgctgcgtaaccgcggcgaacagttaccgatcctgatgatctccgccaccgaaaacatggcggatatagctaaagcgttgcgacttggcgtccaggacgtgctgttaaagccagtaaaagatttcgatcgcctgcgtgagaccgtttacgcctgtctctatcccgcgatgttcagttcgcgcgtggaagaggaagagcgtttatttgaggactgggatgcgctggtcagtaatcccatcgccgcttcaagactattgcaggaattacagccgccggtgcaacaggaaatgtcgcactgccgcgttcattatcgacaactggtgtcggcagacaagcccggtctggtactcgatatcgcgccgctttcggaaaatgatttggctttctattgtctggatgtcacacgcgcaggcgataatggcgtgttggcagcattattgctgcgcgcgttgtttaatggtctgctgcaggagcaactggcgcaccagggacaacggctaccagaaatgggaagtttgttaaaacaggtgaatcaactgctgcgtcaggcaaatcttccgggccagttccctctgttagtagggtattaccacagcgggctgaaaaatttaattctggtgtcagcgggacttaatggcacgctgaatacaggggagcatcaaattcagattagtaatggcgttcctttggggacactgggtgatgcttatcttaaccaaattagccaacgctgcacctcgtggcagtgccaaatttggggggctggcggtcgtttacgcttaatgttgtctgcggaatga

SEQ ID NO: 271753 - DNA, 903 bp, Klebsiella pneumoniae
atgagaaagcttaaaattggtctggcgctaggtgcgggagccgctcgcggatggtcgcacattggcgtcatcaacgccctccagcgggccggtattgagattgatatcgtagccggttgttctatcggttcgctggtaggggcggcgtatgcctgtaaccgactcccggcactcgaatcatgggtctgctcattcagcaactgggatgtcctgaagctgatggatctctcctggcgccgggggggactgctgcggggggaaaaggtattcaatcattaccgccgcattatgcccgtcaccgagattgaacgctgcgagcgccggtttgctgctgttgccaccaatttaagcaccggtagggagctgtggtttaccgaaggcgatctacatttagccattcgcgcctcctgcagtatgccggggttaatgtcgccagtaaggcataatggttactggctggtcgatggcgcggtggtcaatccggttcctgtgtcgctcacccgggcaatgggagcggatattgtgattgccgtcgacctgcaacatgatgcccatcttatgcagcaggatttgttctcccttgaaacgccgcggcaggaagcggaagagaaggaggggccatggcatactcgtctgcgcgcgcgcttgacgcgaatgagttcccgccgtacggccgtgacgccgacggcgatggagatcatgaccacctctatccaggtactggaaaaccgtcttaaacgcaatcgtatggcgggtgacccgccggatatcctgttgcagccatactgtccgcaagtttcgacgcttgattttcatcgcgccggagaggcgattgccgcggggcaactggcggtagaaaagaaaatggatgaattattaccattagtgcgtacagccgtttga

SEQ ID NO: 271754 - DNA, 459 bp, Klebsiella pneumoniae
ttgtcgcaattatgcccctgtggcagcgcactggagtatagctcatgttgccagcgatatctgtccggcgctgagcttgcgccgggcccgtcacagcttatgcgctcccgttatagcgcgttcgtcatgaaagacgctgactatctaatcaaaacctggcacccgtcctgtcaggcgcagcaatttcgcgccgagctggagaaagggttttcccagaccgaatggctgggcttaaccctgttcgccagtgatgaggggcgagctccaaatgaaggttttgtcagctttgtcgcccgctttaatgacaataaccgccctggcgccattattgaacgttccagattcttaaaagaaaatggacagtggtactatatcgacgggacacgaccgctgattggccgtaacgacccctgcccctgcggctcaggtaaaaaatttaaaaaatgctgcggccagtaa

SEQ ID NO: 271755 - DNA, 951 bp, Klebsiella pneumoniae; identical to SEQ ID NO: 241873

SEQ ID NO: 271756 - DNA, 198 bp, Klebsiella pneumoniae; identical to SEQ ID NO: 139683

SEQ ID NO: 271757 - DNA, 837 bp, Klebsiella pneumoniae
atgctttatcatgttgttataaaagagaaaaacaaagaaaagcgttactatggtgaacataaaacagatttaactaaagagcagttgatagcacgtttcattgagccgtatgaacaaggcaatcccatcacggtaaatggaatgactatcctaccttctgaaatcgaacggatagtcgtacgggctagcgaaaacacgatcgaatcttacattcccgccataaagatggaagaccagcgctcctcagtatcagtaattggcggaccatcctatatggtaagagccgtttcccgagctaaagacgtcactgatgaatttataaccggccccgccggacataaaaaacaagctacaagctcccaagtttcaaaaaaggttcgtaatcatgacgtaaccaaggtgttcattgttcatggtcatgatgagaatgcaaaaatcaaagcagccagattcatagaacagcttggtttcaaagcagtaatcctgcatgagcaagttagctctggcagaacaatcatcgagaagattgagcaatattcagatgtcggctttgctgtagtgctgtatacaccagatgacattggtaatcaaaaaggcaagtcagaacaattgaaccttcgggcacggcaaaatgttgtattcgaacatggttatctgattggcaaacttggcagaccttgtgtcacagctctagtggatggcgatgttgagttacccaatgatattagcggtgttgtttatacaaagatggatgaggctggtggatggcgcttagctcttgctcaagaattaaagcaagctggttatgacgttgacatgaacaaactgtttgtttga

SEQ ID NO: 271758 - DNA, 1077 bp, Klebsiella pneumoniae
atgtccgtaaaaatctatgcgatgtacaacaacaagggtggcgttggtaagacaacgcttggcttcaacatagccacgcaatacgcagatgaaaacccaagcacgcaagtcttggttattgatctatgcccgcaagcaaacatctcgcaatacttgctgggtggaggagatcggggttatgaaaccaaccaagaactgcaatcgtccagaacgaggaaaaacgttgttggattcctggactggctacttgatggtaactcagactttactagcatacgccgtcccttcaaggtcccggtacatcggtacaatgatcagattagtgaaaatctgttcttgattgcaggggactcctttttagaatcactgactctcgctctgaactatgctgtgatcaacccagcgaacaggtatgcatggcgagagtatatgacagcttttcgtcgtttatgccatctagagcatgatactgaagagtatgatgatttagtggtatttattgactgtaatccaagcttctctatttatactcaaatggcactgctttcagcagataggcttgttgtcccaatgatggctgactatagctctctggaaggcatgaaagggatcatgatgcttctatatggacattatccatcctcagcagcccaaacttatgctcaaaagttcgtaaccttccatagccaagcagctgataataatctagaactgcctaaacttgatcgctttatcttcaacaactacacatcaaacaaaggtgtagctactgcctatgactcgattaaagaagcgctatgtgaattcgcatttgagcagtatcttcgttttcctgacttgttcacttctcgtagcagaacaattcgaactcaagcaggttgggagcgggagtttctttccgaagtaaaagacttccacacttcaggtaaggtttcagcgagcttaggaattccgctttttaaactacctgcacagacgcactacgagatgccaaacggtgaagtcataaatgtcgtaagagaaagatatcgtgaagcccgcgaacacgtcgatgaactcgtcagcaaattttgctga

SEQ ID NO: 271759 - DNA, 339 bp, Klebsiella pneumoniae
atgagaaaaagaatcgacttaatcgttatgctgcttgcaagcatttctaccacagcaacagcagccgaaaatgtatacgtaaaactatcatgcgaaaacaacataaccgtagatatcacactgaagaaacaggaagaaatcggatgggccgatctatcaactccaaacggaacgcgacgagctaagttctttatgggagcagaggatgataagggggttaacagcctgacattctctagcctaggcatcgcattcaacattgactacacagctgataaaaaattcaccctcaaaatgattagtggcgggagcggcgaatattcatgcgaagtgcagtaa

SEQ ID NO: 271760 - DNA, 1050 bp, Klebsiella pneumoniae
atgatacaagtcaaaaagagctatccggtaaatacaactctcccacgtaattcgatgtttcgtcaggataatgatgggaaatggcaattaaacctctatatcctgtttaaaaatctaccgaagccgcgtggttcgagggcgatttggtataaaaccagccagagcatggttcaaaaattacccagtaacttcttcgggcatgaaattcgtgagataggtgccgttctacatgaccaaatcggcaaagaaacctggatttcagcccgttcagccttagtcttattgacttacggttcccgaaatcacaagcatctagaagttgctcagaaggtcgaacaatacactggcatgaggctttctcgtccaaaagggctcagtcggagagaggttgtctttggtcacaaactccgtgaatttattgatgctgaacttacgagtatcacctacggtgattatgaactgtattcccagcatcgcatgtgcaatggcaagtactacgttgattttgccgtaaaacattactggaatggtaatgaggacagttcaaactaccacttgtaccttattgagtttgatgaagaagagcacgctttagccccaaacaaggcagccgatctgattagagatacagaaatcaaaaaagaggctcctcacacgacaatcatcagggtcaaacatgatcaaagtgatgattggttcgatctagtgcgtgacaacaatcgccttattggctttgaatcagctttattggacggaatcatctccgcctgtcgtacagtcgaaggcgattcactcatcattgattcaaactcggcaatgaatgcatatgattctagaaagaacatgaatgcagatatgctaacttacgataaacaaccgctgcggggcattaaagaggcgctgaaaaaatgtggcatccgttataatgacggcagaaccaagaagcaacgccagttaaaggtgccactggaatcatttgctaaagctcttcaacgttggttacctgccaaaagcgtcgagcacatccttagtaacctaagatcaagctaa

SEQ ID NO: 271761 - DNA, 1704 bp, Klebsiella pneumoniae
atgccatcaaacagcatcccccattacctctataagcgtaaccacacttggtggttcaggaagcgttttgtcgaacaaggcagtgcaattgaatttaggatgagccttaaaacagcaaatctagaccgtgcacgtcttcttgcactacgtttattgcctctttgcttgagattagttagatctttgggggcccccaaccagaagaagaatttgatggacgacaagacaaaagaaaccattgatgcagttctcagagcacaagttgccgaatggacagcagaagaaaccgaacgctggttttcacgttcagggcgcacggaaggggatctcaaccgactactcgaagacattgatacactcatgtctgatctgaaagagcgtgtggcgtttgatgatagaccccaactccatcaggcagaagccaacactgtcctagataaattaccccacctgaaagcttcgcttagcgagtacgacttgcaggacatcgcccgtgaagtagcccatgcgaaaatcgaatcattgcaagagacacggaatatcattcttggccgcaagtccggttggcatcgagcctcttcatccgtggttcctgtgacaacagcccctgagcaagaggttcatcttcttgctgatatgatcagcaaatatcagggggaaaatgaaatcaagaaacacgttaaaaaaacacaaaacaaatacgctcaatgtttagcattaaccatcagtttctttggcaatgtctcggtaaacagcataactgtagccaaagggcgagacttccgtgaaatgcttttgactcttcctgttgggctagcaaccaaagacatgttggataaccctttaccagagttactatctcaaattaaggcaacaaaatttatcacgacagcaaccgcaaattctcaccttgaaaaaacacgtagattcttcgaatggatgcaagctacgggacatttaactaatgagaacccgattcctaaagagccgctaccagctcctaaacgtaacaacaaagctgcaaggcactcaatgagtgatactgatgcaaccagagtgttcagccacaggattttcacccaacatcgaggagttttaaccaaaaaggctatccagcatccacatcatttttggcttccccttctttgcctgtttaccggaatgaggccaagcgaggcatgccagttatatgccgaagatgttgagcttgttggcaactgctggtgccttcgcattgatgacagatttgaaggacaatcacttaaaacaccgagtgctcaacgctatgtacccattcaccacaagtttgttgaaattgggttcattaagtttgtcgaagacattcgagcatcccaaggtcaagatgtcaggcttttccctgaaattacccctgtacagggttatttttctcatacacccggtaagtggtttaaccacaacttgcgtgataagcaaaaccttccaaaagaagcgacgctttatgctttccgtcatgcattccgcgataagctctttgctcagcatccatcaccagaatatctacaacggatgatgggtcaccaaggaagtgactacggtctccctcttcctaccgacgtgacccaaatgaaacatcttattgataatattgacttttcatccatcacctcgcaagtcaggccatacacatcacttcaattgttccagagcttcgaggtagcatga

SEQ ID NO: 271762 - DNA, 1995 bp, Klebsiella pneumoniae
atgctgcaacgcctgcggcaaatcagtatcagtagcagtctgcgcggggcatttctgacgggggcgctgcttacgatgattgtcagcagcgtaagcctctattcctggcatgaacaaagttcgcagatccgctattcgctggatgagtattttccgcgcatccatgcggcttttctgattgaagggaatctcaacctggtggtcgatcagctcaatgaatttctgctggcgccaaataccacggtacgactgcagctgcgcaaccagattatccagcatctggacaaaatagaacggctaagtcaggggttgtcgccggcagaacgccagcagttgggggtgatattgcaggacagccgcgagctgctggcggaactggatcgcgtgctctacaacatgtttctggttcgtgaaaaggtgggagagcttgcggcgcggatcgactggctgcacgatgatttcaccaccgagctgaattcgctggtgcaggattttacctggcaacagggaacgctgctcgatcagattgaagcccgacagggggatgcgaggcagtatctgaaacgcgcccgggaagtgcagaacgaacagcagcaggtctataccctggctcgtattgaaaatcagatcgttgacgacctgcgcgacaggctcaatgaactgaaatccgggaatgatgacggcatgctggtggagacgcatatccgctatcttgaaaacctgaaaaaaacggcggatgaaaatatccgtgcgctggatgactggccgagcaccattaccctgcgacaaacgattgatgagctgctggaaattggcatggtgaaaaataatatgccggataccatgcgcgactatgttagcgcgcaaaaagcgctcgtggaagccagccggtccagagaagcgacgctggggcgcttcagaacgctgctggaagcccagcttggcagcagtcaccagcagatgcagatgtttaatcagcgtatggcgcagattgtccgggtcagcggcgggttaatcctggtggcgaccttgctggcgctgctgctggcatgggggctaaaccattattttattcgctcgcggctggtgaaacgctttaccgcgctgaatcaggcggtggtgcagattggtctgggccggaccgaggcgaccattccggtttacgggcgcgacgagctgggacgtattgccggtttgcttcgtcataccctgggtcagcttaatgcgcaaaaacagcagctggaacaggagattggcgagcgaaaagcgattgaggccgatctgcgcgccacgcaggacgagctgatccagaccgctaaactggcggtggtggggcagacgatgaccaccctggcgcatgagattaatcagccgctgaacgcgctgtcgatgtatctttttacggcgggaagggcgatcgaacagggacaggcggagcaggcgcggacgacgttaagcaaagcagaagggctgatcaaccgcattgacgcgattatccgctccctgcgccagtttacccgccgcgcagaactggaaacgccgctgcatccggtcgatttgcgtcagacgtttaccgtggcgtgggaactgctggcgatgcgtcataagcctcagcaggggacgctggtgataccggatgacactgtctggatcctgggggacgaagtgcgggtccatcaggtgctggtgaacgtgctgtccaatgccctcgacgcctgcccgcacgccgcgcaaatcaccgtgagctggcaaatccagggcggaaggctgtgcgtgttgattgccgataacggccctggctggcctgcggccttactcccttcgctgttaaagccgttcactaccagtaaaaccgtggggctcggaatagggctttcgatatgtgtttcgctgatgacgcaaatggaaggggcgttgcgcctggcgtcgacgtttacacgcagtgcctgcgtggtgctggaattcaatttgacggatgtaaaagatgttgagtaa

SEQ ID NO: 271763 - DNA, 996 bp, Klebsiella pneumoniae
atggataaacgttaccaggttttcgtaagttcaacttttacggatttagaagaagaacgaaaacacgtcatacaaactctgatggaaatggattgcattccagcaggcatggagttgttcccagcaatcgatgaaggccaatgggagttcataaaaaaagtaattgatgactgtgattattatctgctgatcattggtggtcgttatggctctgttgcggaagatggtttaagttacaccgaaaaggaattcgattacgctgtttcaaaaggtttacgcgtcgttgttttggtacatgagaatccggaaaatctacctttagccaaatctgaaaaagattctgaactcagagagaagctagttgcattcatagagaaggcctcaaccaatcgtctcaggaaaacatgggcaacagcaaaagacttaccagggttagtagcccttagtatgagcaagacaatgaaaacgtatccagcagtcggttggattagggcaaaccaaacttctaaagaatccgatttaagagcacttatagagttacaaaaagaaaatgaacaacttaggtttgatcttgatcaactcaaagcacatagtcctaaaattgaagagttgaacctcgctgattttgagagtgttttcgagtttaaatgccaatccacttatttacagaatagccgtgaaaggttatcaatatgggatgcaaggatgtcctggaaagacatttttgctcttatctcgccctatcttacacaacatctcaatgaatcaattgtgtcgcgaactttgggcgatgcagccaaagaaaaagaaaatcaaagcggaagctcacctaaggtcgtatctcaagatttgaaaactatctctatacaattacaagcatacgggctaatcaacgttgaaaatctgaggaccacaacaggaaaatatgacttattttggactttgaccaaaagcggtaaagatttaatgattaaaatccgaacaataaaaaaataa

SEQ ID NO: 271764 - DNA, 564 bp, Klebsiella pneumoniae
atggccgggcttgttgttttcatcatttgtgtgatccttgcagtacttactttcaggaaagtttcaaactattccagaaataaaggtcggggaaagttccttacttcgattgcagcgttagtcatgagctttattgtttttgtggtttcaataggaattggttccggggttgtttcacaggataaaagtacggatataaatgctaaggcttcaacggtgagcagtacggaaacaaaaaaagccgatgtttataaatgcgataagtttgatgcgataacccaaactcgacaaggaaaaaaacataattctggttactattcagataaaagtattttagttgaatatactatctcagatgataagttgttcagtcgaatgccaattccaggtgataaagatattactgatactgctaaatttaatgaaatcgcagcagatggatcacgcaagtatgggaattcatcaagtaactattttgtatcagtgcttaatgatagtaccataaaagtaattctcgttgattttaaccataatggaacaattacacagatttgctcgaaatag

SEQ ID NO: 271765 - DNA, 1779 bp, Klebsiella pneumoniae
atggttgagatcgaagatcctggcgtcagtgcttttcgtggcaagaataccaacacaggaaaattaggggattttatagatgcagttaaacaaggagctattgcctctgattcctggctatacgtggaaaatctggaccgcattacaagacagaatgtaactactgcacagaaactgtttattgaattgttagagttaggtttgacactcgtcacaggcatggataagcgggtatatacacttgattctgtaaacaaaaatccaacagaattaatgatttcactactgcttttcagccgtgccaatgaagaatcagaaacgaaatcaaacaggactataggcaatgttgttgctttggtcgaacgtcatcaagcaggattgccagtaaacattaagtcagttggtcgccatccgttttggatagatgattcaggttcgcaatatgaagcggttaaagaacatccggtttactggagtatcgcccgcgaagctatagacatgtttttagatgggaatggcatctatacagtaaagcgttatctcgatgaaaaatatcctaacggtttaaaggataaggagtgggattatcaagttttaaagaaaatgcgtgataatcgtgcgttgattggggaaaggactatcaatgtcggtggtgctacttacaaacttgataactactatccgtggttgtgtaaagatgaagcagagtttttaacgctggctgaacgtaagcaacaaaacaactacaaagctaagaaagacaaaacagaagaaatcaaattgttgtcagggctacaggtgttgcggtgtagtaaatgtggaggaacgatgcattccttcatgaatcatggtagtgctcgctacatctgtacgaatggggttcacctacagaaaaactgttctggctggtccatatcagctcaattagttgaacactgtacaatgatttcactcctgatcggttacatggacaagagtcgtaaggatggtattgacactactgctatagaagaagaaattagtagaaaagaaatattgataattgatctggaatctcgcatagcaaacatggctcaggcaatagctattgctcctgatgttagtgcactagcagttcaattaaatacttttgatttagaacgtaaaaagactgttctggaagttgataagttgaaagaacgcttacattcattgaaaggtaaaggatctttagaagtagatattactgatttcctgatgcttattcagtggtcggtgtttacaaatatggaggatgctgacagaaacaaaataaggaaaattattagctctataatcgaaagtattattgttgaaaaagcagatggatgtataactataaaaataaagtgtcatcataaagatgaatggctagtgtttggtggagtcaacagaaaacctttttgggcttttactatcgagtattccactaatgatgcaaaagaaattgaaggaggagactcttcaaattttgttagtaatccgctatttcagaaggcagtagagcaactggatagtatcaaacagagttatctaaagcttttcgagactgccaacactatgttaggagtcgttggttatagtgatattcgaggggcatcattctggcctaatactggacagtatgaacgtgcgaatgttgagtatgatggaataacttatagcattgcgatgaatggccgggtttcgaaggcaataaccgcagcattggaagcgactggattgtcgcgtaaagacttcatagagcgttataaggtatga

SEQ ID NO: 271766 - DNA, 879 bp, Klebsiella pneumoniae
atgaaacttcccaaagatagcattatcaacaagttcccggacctacatatccatcaaactattgacgaaattagagacctattgattaacggatttgatgattcccaaaaaacaatctttttatgtgggaaagataaatctgacaaaaaaagtcttcgatataaattctcgacatttctttctcaagagaaaggtatcactctaacttatccagaggatttgtttgaagatctcctagaaggtcagggaaagaacagtttgctatcgctagaaactcaacttgcaaactctgttgatcttatagttcttatacctgaaagtccggggtctttcgctgaattaggtgcattttccatggataaagccctagccaacaagatgcttgtgatgagaatgggggaatttaaatcagggaaaagctttataaatcatggacctatacgccttgtcagaacccatggcggggaaatatatgatattccaaagaacttcgatgaaaagaaccccgaacatgtaaaattagtacttggaaaaattaaagaaactcttccgagtggtagaaagaagaaaaagttggacaatatcttattatattcacaacacgtccttcttttaatctatttatttgatgatttaaatttacgctcggtgtataaaaccatggagctgatcatggagagaaagtttgacaatcgagataatgttgcctgtaaagctgcgacacactccctcataagggcaggaatgattaaccaacaagagggattattcagtataactcaaatcggttataactcaataattaatagtttctacttgaaatcatcacttgctgaattaagggcgaaaattatgaataaacaatatgctagacaatga

SEQ ID NO: 271767 - DNA, 1794 bp, Klebsiella pneumoniae
atggcatataaaaaatttagcgatagctcatttatcagtgcattagatcagcgtacggaccttgaaagatttaaagaaaatcgatgtgcagtatttgccttagagttattttatggaatagatgatccattaaatgaaataggtcctgctataaccgctggaggtgatgattgcaaaattgatcttctttatataaacaaagaacaaagatcaatagttgtaatacaagcatatgaagcacagacgtttaaatcgacagccaaaggtaataagggtgcggatctttcttatgcaatcggtgtactattctcaacgcctctgaaggatatacccgaaggaataagaccacacattagtgaagcaagagatgcaataaaaaaaaatgaaattagcatgattcacttttggtatttgcataattgtccagaaagcatacaaataaaacaacaaatgctacctcttctcgagtctggaaggagtcagttaagagagcaatttaaatctattaaagatatagatgtaagtataaaagaaataggtttagaaactttagatgaatattatagatcatccaaaaatgctatattaatcgaagatgaatttatccttcccgataacacttttgggtatataaaaaatggggatggatgggaagcgtttatgaccagtatcactggtgaatggttatcaagcctttacaaagaacataaagacttgctttttagtgcaaacgtacgcggctttatgggtgcaaataataaagataaggataaagtaatcaatgcaggaattcagaagtcggctaaaaaacaaaaaaacgacttctttgtttttaataatgggattactgcattagtacatgattatgaattagaaaaaagcaataacggtataacaggtaaaataaaaaaaataagggggctatctatagttaatggtgcccagaccacaggctcacttgggacattggatgaaaaaggcttagaaaatatattcattggtataagattcatcaaatgctctaatttacaaaaaattcaagatataactagatttaacaatagccaaaacatcgtaatcccttctgatttcaaagctaatgatcctatacaaaaaagattacgggaatcatttaaaaaaataaaaattgctacttatgatggtggtttacgaggacatcaactagctggcgataaatcattacgtatagatgctcatacagctgcacaagcattggtatcttggcatggaaatcctaaagatagctaccacaaaaaaacaaaaatttgggatgatccagaactttacaatattgctttccaaaacactattacagctgaacatttgatatttgtatttacgctccttgaggcatgcaacctttacaaagaaaaccttctggaaaaaatgaaacataagactataacctctcatgaaaatacagttttatcgctgttaaatgaaagaggttcgtccttcatgattatccatgcaatatctcatttaatggaaactattttagaacaaaaaatatccaaaaaatatgccatatgttttaaagataacatgactcgtgatgattgtattactacatggattgatttgattgaaaaactttcccatcaattattaatacttaaacttggccttaagaaaaggctttcagtagaatcagaaataaattcatctacagagtccgtagtaaggaattttgggacatcatttattgcaataaaaggtatgatgcagggtatcaatccgtatatggattttgtaaacaaagttcaaaactaa

SEQ ID NO: 271768 - DNA, 879 bp, Klebsiella pneumoniae
atggttttaattataggacagactctaggtattattgggggggtaagtaatttttcttttaatcgtgctatcgcaaacaccggcgggccatgggaattggctgctgtgtcagcatttcttatgatgtattttttagtgaaacgaaatcctttttttggtggtttttcgggggtgattttactacttactcagtcaagaataacattagtcgggacgttgattacaatactatttagaaatctaaaattaataacatctcttcttaagaaaaaaatagtactcctttcatttattggtcttgtaattgttgggttgtcttccgttacggtttctttagttattaatggtcaggataataatgattccacaaatggcgtaactgctcgatttgaatcatttggaaataatgacacaatatctactattaatgatatatttactaatactagtgctgccgcaaataggcaggattattttaacagaacttacggtgatggattaaatgatatcatagctaatgcaggtaacggtgatgctagcgcttttatacgttttactcgctgggttactttgataaaaactgctagtgaaaatattataaactttcttattggattaggcccgtcatatgcaggaatggcagttgatggtaattacgtaagaatgtttgttgagacagggttaatcggtttacttgcatacattatctttttggtttcttgccttaaacatattaaacaaaaaatacttaaagactatataataatattggtaatcacagcattatttatagatatatttgtaacctttaaagcaatgttctttttgtggttcttttatggttactatctttcacgaaacaatagggatgaggtgtag

SEQ ID NO: 271769 - DNA, 360 bp, Klebsiella pneumoniae; identical to SEQ ID NO: 196343

SEQ ID NO: 271770 - DNA, 705 bp, Klebsiella pneumoniae
atgaatgctaatgggaaatttgacttatggttggttcgtataagctacctggctcaagtggggctgttttttttaaccaccttcactatttattacacagtgatacctatttatcaaaatgcttccttacaagagtcgattgcaaaaaaggaaatagaatataagcaattagaaagaaaagaaaacgaactttatgttcacctccgttcagagtatttaaaaagaatttctattgttttaataaccacttgttctccaactaatatttttatgagacaaccatctcgtgaggaaatcggcaaacctcatgagcagcaaatgggtgaattgagagctgtttttgacagcgatgtagggaaatgtttaagagaaacggcttcaaaaagctcttacttaaaagaattaaaaattaatgatcagaaaaaaatatcatccggcattgataacattactcatggtataaatagtctgcataacaaatatagcgataaattaaaagatacatccggactgttacagcttggaagaacgaaggcaagtcatagctctgaactcgaaaagttccttatcgctcatggtctagatactgatgagtcaaagcttcagttagagcagatttatataagagctggcgcttatagcttggttgcagagtacggtttcaaaattaatgatctaatatcagagcaactactttctgaataa

SEQ ID NO: 271771 - DNA, 846 bp, Klebsiella pneumoniae
atggcaagtaaagttgatctatatcttagtcgcattagtcacctctcacaatttgttttggttgcttttgcgatctttgggtatttttacacagttagacctatatatcaaaaagagttattgtcagaagaaatcgcaaagaaagaagttgatttgaatacattaaaaaacgagcttcacaaatcaactgagcaactatcaaacaatcagacagctcaaattaaactacgtgaagatattgaagttctaaagcagcaatttaaaatttcagaaaatgagttgaactctgtaaataaagagttggcagcctcaattcgtgagttggatagacaaaaaaaattagctaaaaaggctattgacgataacaagaaaaatctatcctctgttttttgggagaattttgatggtttggttgcgctaacatatataaaggatagttaccacagtgtaaacactgctggtgaaaaagaaagtaccgacttcaactatgacgagttatatatcacaccctacattgctattagtaacgcaattaaaatgggagggcataatttttacgagagtgcccaaaacataccgattgatattcgacgagagctattaaacaaaatatccatcgctactactaaaaataaagacatcttgagtaagtatcctgatgggtttcattccaaaattagagagttcaaaagggaaattgataaatataaatcaagtaaggatatcaatgagcagatgaaggcttacatgattgaaaaggatttgcggtcatatttatatgcgcaaaagaaaatatccatgaacattgctacagatttcatcaaaacaattaaaaatagtaattaa

SEQ ID NO: 271772 - DNA, 2940 bp, Klebsiella pneumoniae
atggatacagatctccagtggttgctaagtcagagcgaatcccccattttagaatttaagcaagagtggtactggaacgactcgacagaaaaagaagaaatgaatgtaaaatggggcgagtttttaaaggacttagtttctttatttaacggttacttaggatatgttggaaagcctagatatttggtatttggttattctgaaagtgaaaatagaacatatgatatcgatacggctagtattaagcagctctcgaatttaatcgtgtttaaaaaggacctattacgccgcctagagggattaacaatcccaaaccatctccatttctcaatagaacaagttgagcatgatggcaataaattaataatatttgaaattacccctccagcttatttaatagaattaaagcgagagttacaaactaaaactaaatcattagattctggatctgtccttcttcgcaaaggccaaaaaacagatgaagtacgaacagcttcacctgcagaaattgaaaacatcaaaatagaattaaacgactttagaacaagtgctaattatactaaattttacacagaaaatgaaagcccaatatcaaaagacagaagcattgaaaaaactatccaatcatatatggataagaatacaagttattctttagctgaaggttttccagtaaaaaccaaatcatggaaagaaaatgttatatatgaaatatatagactcaatgatgaattttctggagtaaaagagtttatatatatacacgaaaatgctaatcaaggaaaaacactagctgatataagaaataaaaaccatttgattaatcagaatagcgcaattatccttatagagaggccgaatataaaagatattgataaacgcaaagaaaatctaaagcgtctattttctacaaagtacgtttactttatcgatgaatttggatatgagtttttatataaagattgcatgcttccatatgagaaatttgatcagtcagatttcgtggatagtttttataaaaacgaacaagaccaaaatatttccgcattagaacgagtcaaacaatggtttgactctgaaaatgaacctctttttgttataagcggacatggtggtattggtaaaaccacaattgcaaaacaatttcttgattttgtctatgaaacacataagtgtggtgttttatttattgattctaaagaaatcataaatgaattatctagaaagtttagttcaaaaaacaaaatatgtgacgtgtatgatttctatactgcattgatggattctgatgatgcagaggattcgcgattcaacagagaattgctcaaactttcaatcgacaacggaagtttaataattgcattagatggggttgatgaagtaattgcaaaactaggtgataaatttgatgtggaaaaatttatcacttccatttttgatgaatactcatcagagctaaataaaactaaaattttaattacttgccgagatcacttctggaatgatgtccgccgcagtttaatcgttccagagattaaaataagtccttttaatgagcaattagctttggatttctatacaaaaaaattaaataatgatcagaagaaaatagccaaagcactagaaatcgctgagaagtttgcaatagaacataacgaaaatacaaaaaaatacattccgttcctagttgatattattgctcgcattgtaaattcacctacattttctgggttaaatcaaatagaaaaaaagagtgaatatctttcaaatgttcacaatgttgacattttaatatctctgatatgtgagcgagaaattgtcaagctaggaacattttcagtagacaaacaggtgttattttttatgaaaatggcatctgaaaaaacaaatggaatttctatctatgatgttaaaagtgttttatcggaaataaatgtcgataacaatgacttgattatagaaaacttcaaaggtcaccctttaatagatttccatggaaataagtttaattttagatacgatgtttttgatatctactttaaatctcttcttatcgtcaattattttaaaaaattagatattttatcccttaatgaaaagatgattgatactatctcgggctatttaaaatatgatagcagtttcactcgctcagtctcggaaaaactatcattctcagatgatttgctattattcctgttggagaatattgaagtaataaaaacaaaagactcggctaatattgaattattcatatcatccttggttatacttacgcttgacataataaatcttgatccagcttatcaatttaatactgaaacaagaacaaaaataatagagaagcttttttcagattcagaagatgtaatagatggtttgtgtcttacagatgtttttggtaattctagtaccaaagctatatttgattttagagataaaaaacttctaaactgtcattttaacaattatcaatacttttgggagtgtctgatgaatctaaacactcgttttgaaagatcgacatttaaagatattgatccaagggagggagtaaactataccctctatgataatatgttttcgaatgattgtgatctaaatttaattaagcatttgatttcagaaaaaaaacaagaagcccaaaactctcttgattcaattcgcactgatgttttgaaagcatttaaaattttttataaaagaggtaatttttatcctcgaaaacaagaagaagttcgcaaaaaactttccactataaccattctttcatacatgatagataacaatgtcatagttaaattcaaagaccccaaaaaaccaacaatgcaacaatacaatatatcaccgaaatataaaacagtaatagattttattgagcaaggaattccttcagaggagttatcgactttggttaatgatattcaactgagctgttga

SEQ ID NO: 271773 - DNA, 453 bp, Klebsiella pneumoniae
atggaccaatgtaaaaatgacgttatattagaacatatcaaaaattatagtaaacatattgatgaatttagaactcaggcaaactcacaagggatctggttatttatttcaactcttggatgctggagtgtaaatataccactgattaaaattatcgcggcattcttgttattttgtatatttatatttaattccaaacaggaaatgactgacaagagatcgtttcataaaatagaaaaagatatagaaaatgatattgatagtaacctaacaggagacaccaagaaagccaggttatatgacttgggattagttgaggaatatagaaaatcaattattccagttctaaaaacgtcaccaatatttattgtatgttatattttctattctattagttttttggcgtttttatccaacctatttccccggatgaaattaattttcaccttttga

SEQ ID NO: 271774 - DNA, 927 bp, Klebsiella pneumoniae
atgaaaaatgaaagtattattttaattgatgaagtataccaagatttttcagacaaaatagcaaacctcaatgattttttacacactgtcaaaaagaacactgaaaatattgctttggatattgataaaaaaagacaaagaattgaagaggttgtacctcaaactgaacatgataaatatgtaaaagacataataggaaaaacattcaggagtcatcttttttacaacccttatactgaagagcctaattcctatgggcatagtgaaatagatgtttataaagaaatggagctttgcctgagccttaagaataaacaatatcaatggctgttaactgaggcttacgagctttttgaggattatattgaatccatttatgcttgtgctggtcttatagataacgatttctggcctgcttctgactatggttcaattagtgtttcagaaataaaatccaaggatttttcttggtttcaaaccacagcaagcaagaaaaaagaggcaacaaaagcagttcttcataaattaaggacagaaatagataactttgctaaagctgaggcaacaaatccgttgaagcggaattatcgcttttttattactatgattgagaatcttagacatataattgtacacaatggagggtattttaacgatgtcgagctgtttattaaaaacacaattcagaaatcagggattaatggtaagaaggcgcaggattttgaaaataaaataaaatactttattggtaaaatacatgaaaaggatgcggtattattacttgaagtgccatctactaaatatccaccacatatgaacgcgcatgtaagcaaaataaacttccttattgaagttttgatggagtattcatttataattatgactgagttgaaaaaccatttttcaatttcaattacaaataattag

SEQ ID NO: 271775 - DNA, 333 bp, Klebsiella pneumoniae
atggagaaagatcattttaaggcttctgcacagtatgatgattggaaaggcagtgttgcggcagatggtgcggatcaagaggattttagcgattttttgagagataaagggcttctgaaagatggggagattgttaaagccatttctttttactctggacagcgatacctaagtgttaacgcatatatcactgatgatgaatacggcttacgaaaagtaagagttgatatgacgctcgatgaattttttaaaacattcaaacgtttttcgattaagatttcccggaaaggcgagcttgataaccaggatattgagtattacgaaaaagaataa

SEQ ID NO: 271776 - DNA, 321 bp, Klebsiella pneumoniae
atgagttatgctgttgatatatacaaagattctatattttcagaactgctaattagtatcagggttgaaaaagaatactttggacgtatggattatttcctacgggaagttgttagccaactggaagctaaaggcatcattcaagataggaaaaatgatgatctccatagtttaatattggttgacgcaataggatttcaaaccgaggaacctatcaaaggtgaagttacaaagaaacccgccggatctaatgaagaaatacctatagtaacatatgtttcaaaattcagccttggcataccagagagcttaaggaagtaa

SEQ ID NO: 271777 - DNA, 141 bp, Klebsiella pneumoniae
atgcaactgacagaacagaccgagaccgccaacgggactctgtgccgctattccaattcaatctacgattttgtgtacaaaacgaacagcaagcattgtccatcagtgaaaaccttcaatacgaaggattcaggaaagtaa

SEQ ID NO: 271778 - DNA, 1011 bp, Klebsiella pneumoniae
atgataagtgttgcattttttaataataaaggtggtgtgggtaaaacaacgcttttatgcaatcttgctggttattttgcaaaagttaataaaaaaagagtgttaataatagatggtgatcctcaaagtaacgcgacatcttatcttttggacgatgaaactttagattctatatattgttctagtaatggtttcaatctttatacctattatgattcaatttctagaggccttgggtatagagatgttccaatattaaagacatccccacgctttggcgttgatctgataccgggtcatcctaagtttgcattaagagaagattttttggctaaggattggtcggagactttattaggtgaacctcgagggatgcaaactacatttgcgtttaggcatctactagatagtttatctgatagatacgattatattatggttgatatggggccttctcttggtgcaataaatagatcaatactgctaggcgtcgattttttcctaatgccaatgtctgctgatttgtttagtttaatggcaattcaaaatataaatgaatcattaacaacatggcagtcacaattacaaacatctctttcattttatgaaagtaaaaatggcgataaatataagttagatgataaagaagtcaagtggaaggctaaatttttggggtatgtaacacaacaatatacaacaaagacttatcatggtgaaagacgagcagtgaaatcttacgatagaatactgcaacaatttccggataatataattgtccttgaggataaatttggattgtcagatatatcaacgtctaacttgggtcttttcccatccttacatagtttggtgccaatgtctcaattagctcatgctccgatattttctttaaaatcatcagatggtgtagttggggctcattttgtaaaagtcgacgaagcatcaaaaatgtttcatgagataagtaagaatattttagagaggtttaataagtttggagtttccaaatga

SEQ ID NO: 271779 - DNA, 849 bp, Klebsiella pneumoniae
atgattgattggcctgaacaattaattgatgacttgaagaataaaagagttgttttatttcttggttctggcgtgtccaataacgcagttggacttgatggacagagacggcctaaaacatggaggaatttccttcacaatgcagcagagcgtcatcatgcacttgatgaaatatcttcatatttagatgttaatgactttcttacagccttggatttactcaagaataaaatctcacgagatgattatgctcgattgatatatgaagaatatattgagccaagatatggtgaagcacctattcatgaagagatttataagttagatgcaaaaatagtgttaactccaaattttgataagatatatgatttatattctggttcaaaatcccgaggaactgtagtaataaaaaactattacgatgctgatcttccaaggtttataagaggagataagcaggttgttattaaaattcatggttcatctgatagtgttgaacaaatgatttttggaagaaaagattatgctttagcaaggacaaaatataaatcattttatgaaatgctaaagtctttgatactgacacatacttttttatttatcgggtgcggcactgatgatcccgatataaggatgctattagaagatatccaatttagcgcagttaatgcaagagaacactattttttatctgctcaaggtagtatcaaaataggatttaaaaccgtattggaaacaacaatgaatctgaaagtacttgagtatgactatgatcctcaacagcgggatcactctgacttaacaaattcattaagagaattgaatttaattcttccctggaatgtttga

SEQ ID NO: 271780 - DNA, 324 bp, Klebsiella pneumoniae
atgaatacaactaaccattacaacgatattttttgccgtcgcctgaagcaggctcgactggcaagtgggctttcccaaaaacgactggggatcgcagcgggtattgatgaatttgtcgccagtacgcgtattaataggtatgaaaaaggtgtgcatgaaccgggaacggagattgtgcagaaactggccgaggttttgcgagtgccgttagcttacttctatgctgaggatgatgatctggcggagttgatgttggtttttttatcgctaacacaacaagaacgtactgaagtcatgatttatgcaaaaaataaaatcagttaa

SEQ ID NO: 271781 - DNA, 1089 bp, Klebsiella pneumoniae
atgcctggagttgcacgtaagacgaagaccaaacctgtttttctggaattttttgccgggagcggattggttgcgcatgctcttcatccattctttcgtgctggctgggcgaatgacattagcgaaaagaaagcgaaggtttatcgggaaaatcaccctaaagagacatttctgctggggtcaattgctgatgtcaacggtgataccttaccgaaggcaacgctttcctgggccagttttccatgtcaggatttatcgttagctggtgctatggctggtattcatgcggaaagaagcggtctggtctgggagtggttaagggtgatggatgaaatgcccgataagccccctttgttggtcgccgagaatgttaccggactagtttccgcccataatggcgaccattatcgtctgcttcataatgcattggttcagcggggttaccgtgttggcgcgttgttactggacgctgtgcattgggtcccgcattcccgtccccgtatttttgtcgttgcagcgcgttcagatttggatattcctccatctctgatggcctcagagcctggatgggcacactccagtgcgatacgttccgtggctaatgggctggataactggatctggtggaatttgcctgaaccgaagcgaagggttgaaaaccttgcggatattctggagtgggatgcaccctgtgatccgcctgagactgctcagcgtaatcttgctctggtgccggaagcacactttaatcggctgcattcagaagggttcctggttgcgcctggatataagcgtattcgtaataaaaaacaggtgctggagttgcggtttgatggcgttgccgggtgcttaagaacaccaaaaggcggtagcagtagacagttccttgtgttgaggaaagaaggggagctgaaaacgcgattactgactgttcgggaaaccgccagattgatgggggccccggactcgtttaagctccctggaacgtacaacgatggatatatggcgatgggcgatgccgttgctgcgcctgtagctcattatttggcaaagcatttattatcacctttagcggcggtttcattatga

SEQ ID NO: 271782 - DNA, 930 bp, Klebsiella pneumoniae
atgacggatttggcgagtcggctggctgagtttcagaaggcaaataaattaaccagtaaaggaaaactggcgaccatgttgtttgtatcgcgactggcgaagaaagacggtttgccgcttgatcattctgttctggtgacggatcgaaaaggacaggtgcagggattaggcaaatcctccgttcaggccattttgaaagagtatggtattttgcgcgtccttgcagaagaaggcggacggaccagccgcggcagtttgggtgatatgcagaattatgttgatttcctcaatcagcttcatagcgatggagttgcggatactgttgcgattgagctttggtgggttgagcggattaaagactattttgccgcacagccctttgtactgcgttacgatatgagtaagtctctgcgctatattgttcgggatcttattgcacaggcgtttaaacgtcaaaaggaaaaccctgggactatgtatgcaggagcagtattgcagcatctggtaggggcaaagttgtcggtagtgcttgaacccggtaaagtcaaaagtcatggtttttctgttgcggatagcgtcagttcacgcagcggtgattttatcattgatgatgttgccattcatatcactacggcaccgggcgaagctctgctcagaaaatgcaaaaggaatctggaggctggaataaaacccattatagtgacgacatatgatggtttacctggtgccgagtcattagccaagattcaggatattgagggacgggttgatatctgggaagctgaacagtttattgccgctaatatttatgagcatagccagtttgatgtatcgcagaggaaatgtacattggagaaaatagtggaagaatataacaatattattagcctctgtgaaacagatccaagtttaaaaataattatcggataa

SEQ ID NO: 271783 - DNA, 501 bp, Klebsiella pneumoniae
atgactgacaccgtggataaaaataaaagaagccaaatcatgtcgcgagtacgtagtcaaaatacacgacccgaattaataatacgcaagacgttatatgcacaaggtattcgctatcgactttacagatccgatctaccagggaaaccagatttgtgtcttggaaaatataaagccattatttttattcatggctgcctgtggcactggcatggttgctctcgtagccgaataccatcaacaaacacagaatattggaaacaaaaaatagtccgcaaccaaaatcgcgatcagaaacatatccgacaactcatcagtatgggctggcggattttaattatatgggagtgtgcaataaagaaaaaaacaatagcacaaacatcctcattaattcatgagtggctactcaatagggaaatgctttacaatcaaattgaacctctcaataaaaaagaggttcaactgaatgagctagatttgttatccgataattatttttaa

SEQ ID NO: 271784 - DNA, 834 bp, Klebsiella pneumoniae
atgcatgtttttgataaaaatggagttgagctgaacgcacagtgctcagtagatgaagaagatggggtttatggcttaatccttgagtcttgggggccagcacacagaaacaaagattacaatcttgctctcgattgtatcattgagagactgattgattccgatatagagaatgtcgttgtgtatctggcctcatcaacaaccagaaaaaatataccgtccatggcagaaagaaaaatccatcctggtgaatatttccctctggcaggtaatagtcctcgcgatattcgtcaagaaatgtgtagctatcaggctcatttcagtagtacaggtagaaaagcagttccttcgggtaacaggaccaagcgaataatgataaatgttcctggagtcaatagcggcgaattttgggaacccataatatatggagagtcattagaactctttcaacctacagatgatgagaatattctaaataaaagagttgctctattaattaaaaaaactttaagcgagccgaaaggatataaagagccaggggcagtagagcgacttcaaaagatccatgttcgagatcctatggtgaaagcttggatcttgcagcaaagtaaggggatttgtgaaagctgtggtaaaaatgcaccgttttatttaaatgatggaagcccatacctggaagtgcatcatgtgatacctctctctttagccggtgctgataccacaagcaattgtgttgcactttgccccaattgccatagggctttgcactatagtcaaaatgcgaaagagctaattgagatgctttatattaaaatagatagattgcagaagtga

SEQ ID NO: 271785 - DNA, 702 bp, Klebsiella pneumoniae
atgtatcgtatcacgcagataatatcgttactcagtaattcgaaatctgcatctgtaaaagcatggagtaagggggagcgtgtagctaaaaaatgccaatattggttcttaggtcttgctgtattgtcttttgctatatgtgttgggcttgccattgttaataataaaatccctctgtcacagcctactaaacatatggtactttatttgattttgtcaactcagttatttgcattgctgtcatttttgcctgatatcattattggtgtcttaatattaattaaatggcgacagcatatgttagtatcactgacacaggaaattgataaagatgaaaaaaacgccaagcgtttgatggagtttagtgaagctgaacttcaatatgctaagtattggattgagctaaaaattaccagaaatgattcaaggttgaaacttttttttggggataaaacagctgcacttgctcttctgggtttatcatggcctgttataaaggaggtgggaggattagaatgggtatcatcaacatttagtcatttcttggctccggggcatattctggatactatcatatggatgtgtttggcattattgttaggactgtctttaggtggcattatgatgaggggggttaatgaaaaatataagtaccaggtatcattaatagagttggctttaaaattaaaaataatgtcatag

SEQ ID NO: 271786 - DNA, 633 bp, Klebsiella pneumoniae
atgagcgaacaacgatctccgccttcacgtccggcacagggaccgattggctggctgctgtcactggttgggcgggttgtcggactggttaccggtgcgctggtgttacgagtggtgctggaactagcggggctgtatttctggtggccgcaggaggcgagcaggcatgtttttcaggtgatgagacgggagcgggtggaactggttattgcgttgcaatcgcatccatcgggggatgaaatactggtgctgctggaaaaaggagcaactcacgtgcttatggctaacaggctcctgcagaaaccgttcaccaccctggcttatacgctggtgagttttatgctacgcctgatatggcttgccgctatgctccccctgctttgcctgtgtgttgtaatcgggctggccgaaggtctggtacaacgggatttaagacggtttggctccgggctggagtcggtttttcttcaccgctacgtcatcaggtccggcagttcagtctccgccatgctttgggtgttttatctggcacagccgctgtttctgcctgcgatgctggttttactgcctgcggccttatgggctgggattacggtatggatggtggcagggagttttaaacgttggttataa

SEQ ID NO: 271787 - DNA, 1410 bp, Klebsiella pneumoniae
atgaagttttctgatgcgtttcatattgaacatcaacaagcaagtttagattttattgatatccctttagacacagacttgcggttttttatagacccaacctccataagagcgctaaaaaccaaatggggtaataatctagagaaattaattcaagaatacttttcagatatcatggcaagtattaagcatggtgatcttaaacgagctggcatcctgctttcatcattaagagagtcaaatgcatttcatttgggctattctgcaaagaaatcttctggtaaagcattaggtgaaaaaactgctcaacttattttagattcactgataaatagcaaagctgcacaatcaggcttattaaaagatcttgaagatactgcattaacgataaatggcattgcatcagatagaatatcagattctgtttgtaatatactgaaattaccattcatagaatacacccagaaaatatgtgatttttatggtgtaaatatgtcggaggtttcaggagttcggttatgggatcctaatagcggacgatggggtaagaaagcatttcacctaccagttcataatggtgaagaggtaatattaatacctaaaatattagcacgcgaaaaaattgcttactctcatacctcattttatcgaaaatatatcattcctgaaataagagctgaacatctcgaatctggttcagcactcgttgctctcttaagaggaaaaccgacggtaacagctaagaaaattattgaggaatttggacaatcaaaggattttattgaagggcaaatcgttaaatatccaaattcaataagacagtataaagaggagcttttactttcaccaccaccaccacttccgcataatagcttcgatgactcgaaaaactctgtgacggggcctttatcggaggatatcaagaaattaaaatcggccattcataatagtgatattgaattatatatagatagcattaagaagttattgttaactatgttttatccttctcttttctatccaaccactcttaggaatgatactcaatattatagttttactatgctaaatgaggctcgaggaggattcttttttgatttttctgtttttggcattcaagctgagaaaatcttaataaatattataatgtcgagcaagcatcttgatgttgaatatcttgataaagttgtccatgatatggatagtgttgatacttcagtttgtttattggtttgctacgaagttgctaatgatattcttcataagaatttaaaaagaatcgccaaagataaaaataaatacatatttattttgaatagcaatgttatcaataacatcttagatgagtatctaaaaattggagagcagcatttcgacgtactcagaagtaaatttaaagagcttaattag

SEQ ID NO: 271788 - DNA, 1350 bp, Klebsiella pneumoniae
atgccctcaagcgacaaaatgttagaaatcagcaaagagcaattcgaggtttatttttatggccgcacgccatatgttaaaactttttctaaagaaatatcatggtttaaatatacaaaagacgacgtaactcttttagcaacaattgtactttgtaacattgataatgattacaacgcaataattctaggtagagatttagataaaaaatttagagctataaaagtcatcgcttctcgcgaatcgaaagacattttaattgctgatatggaaaaggccatacctgaattattatcactacataaaaacggtcgtttcatacaaggtgatgaatcagaagcagcgttttctattttccttgctaaagtgcctgagcacaagaaaaacgtctatctacaaatgttacttgaagaaccaaagcactatcccgcatttatagtcatgcaagaattggcttattggttcaaggatcctgatgggatttttataagagactttcaaagctcctcatttaactctcgtttatttgaactttatcttaacgctattttttatgaaatggattttataatttgcagagattatgcccaacctgattatattatatcaaagcatgggattgatattgctgtagaggccgtcacagtagccgaacttgtggaacccactgaaaaattggtactcgaccaaaacgaacttgaggatcttcaaagatatgtcaaagagcagatgccattcaaatttgcacgtactcttttaaacaaggttaggcatagaccagaacctttaaaagtctgttactgggaattagaacataccaaaggcaagccctttataatggctttacatgattattcacgtcgactttcaatgagcttctcaatgccagcattacagagctatctgtacggggtagatattgattctggaagtaaaattgaacagcacacttttggaagccgaagtatacagtctaattttttcggttctaataaaaatgagaatgtttcagccgtattactcgcaacacacgccacaatcccgaaattcgatagaatgggagtagtagctggaattgaacaaaaaaatgtcaattccatagttagaggtgtcaaaactgatgaaaactgcaatccaataccttttgcaacaatcgtgaatgacccatcatatgaagaaccttggtgtacagcgatgtatatgttccataatccgaaagcattaaaccctatcccccctagtctattcccaagagttattcatgtttttgaacaagatggagaaatagttcaatattttccacctaattatgtaattacatcaactacgcaggtatttgaatttaaatga

SEQ ID NO: 271789 - DNA, 369 bp, Klebsiella pneumoniae
atgaacgaacaggccaacaagatccttgtcgacctcctgcaaaaggcaagcgacggtattgacgctgcagtgtcatttagtcaggcgcagattccagacgttattagccagttgatgacatggaaaatgcttcagtatggattacggattgggtcatttgctctgcttctagctgtggcagtgtggctactcaaaaagtacctcaacgaagaatccaaatacgcgccggccatcgtccctataagtgcgctattcgcggtgttttcagtagttgcggtaaccagcaacataggcaatgccttgcaactttggattgctcctaaagtatggatgattgagtacgctgcctcactgatgaatcagtcgtga

SEQ ID NO: 271790 - DNA, 498 bp, Klebsiella pneumoniae
atggatatgaaagaaccaacagagcaagaattgcgagattttctccttcgaaaatattacgaagaacagctcaacgataagaatgatgctctgaataatatcgagcaaaaagtaacggatcgataccgtagccgccttagatcggtggatgctgagatgctgtttaagtatctatcggaaaaaggtgtttcaaggcactgccaagcatgtggctcggagaagttatctgtaccacaaaccggctatatcaaaactgaacagttgccaaaagactttgatgccttaggggaggctgagaggggcatgatcgaagatgcgctctccgccagatatgtccagtacgtttcattcggtaatctgaacagtatcgttggacttagaaaaagctattacatggtgaattgtcttaattgtggaaatctgagcttatatcgcgccagtggtgtccttaagtggctcgaagatcaaggaagcgcggaggcgaaaagcaatgagtaa

SEQ ID NO: 271791 - DNA, 1341 bp, Klebsiella pneumoniae
atgaacttaaccccatatacaaatggcgtgcattccctagctgaagggctaaggtgtctacataaattcattgagaatgatcaagatccttatcttatgaaagaagttgtaatcaagatccaccatgggatggaaactttattaaaagatcttctttttcaaagaaatccaatctttttgctaggggagaaaacgaccgtttctcagataattgagtattataaagattattacgaaggtaaaaatgactatctttttgatgacgcaaaaactataaccctcgaagaaacgatcataagaattagtgaattaaaaatagcatcaggtatcggcaggaaagactatcaacaattaactaagtcatttaaatcactaaacgccactagaaataagttgcagcacttcacaatgaaagctaatgccgatgaaataattagagttcttgcaaatattattccaagtacggttgatatactgaaaagatactattcaagcagtgagttgaactcttatcaacagagaattaatctaattccacatcagccattaccaggaatggaggagctttttggtgcgcgtcatgatatcgaaaatgatctaaatattatttatgcagagtcaactgatataattcgactaattgaggttaaatatggtcgtttactcaatgaagcaataggaaaactacaggggtctaccacggaaaaaattcaactgattttcgaattagaagaccgtgggcacgttggccccccaccatatatgccgataatcgttcttgaagggtggttgagggaaaaatttgaatcttacaggaattctacatcttcaagagtaattggattagacgaggaagaggaaataacagcagtatataattcaagtttaagtatttcccaacctgaaataataacggtagcaaaagagaggcatcagaatacagtttcaaaaatgaatattagctgtgaatcttctctggacgtattgagctctagtattttcaatataccaaatttaaatgaagacctttcatttcttaaattacctaaaataaatatattgttgcaactcgaatgcactgtaagtggtatgtatgataatgcccattttaatattgattcgattattgatttaaaaggttcattgaaggtggaagttgtttcttatatatatggtgatccagagggagtgccatctgttaaagggatttatgatctggaccttaataatgataatacatttttaagcttccatgcttttgttgcgtcaaacggcaagattagtgatcatcattttctgagaataaaagtagatgatgtggcaaatcttgtgtttgagtaa

SEQ ID NO: 271792 - DNA, 564 bp, Klebsiella pneumoniae
atgcgcagcgcggaagcctcttccggtcggctgtcggggatcaccgtagcgatacgacaagtatggacgccggaagagtgcccggtcgaattactcccctatctcgcctgggcactgtcggtagatcagtgggataaggactggcccgccgaaaaaaagatagtggcaatacagcaatcttactggcttcatcgccggaagggcacgcgcgcagctgtgcggcgagtgatcgaggatatgggattctctgccgcttttgctgagtggtttgatgtcggggatgagccaggaactttccgccttgaagtggatgtgagcgatgtagggattgcaccaagaacccttgatgaactggaacgcatggttgacgggacaaagccggccagcaggcatatggctcagatgacgctggcgaacagagctgagggggccgcgtttaccggcgcggcggttttcgatggcgatgaggtctcggtatatccgccagagtacgaacccgacagcggtattttttataatggtgtcttcccgtacgaaggcgatgtggattttataggtgaataa

SEQ ID NO: 271793 - DNA, 198 bp, Klebsiella pneumoniae
atgcctaagacaataggccctatcaccttgactcttgatatgagaaagcaggttgcacgttcgcgcgaagtgcttgaggagttgcagcgtagagtgagtgagcttagccctcggatatcagaggaggacgcgctactcatcctcctcctcgatatgacatttgattacctgaatgctaggaaatcattggtggattaa

SEQ ID NO: 271794 - DNA, 603 bp, Klebsiella pneumoniae
atgaataagatatctatagcatcacttattacagcattaattttcatttcatttagctataaagtaaatgctaatgatattgaaaattcatcagcaaatcctgtaacccactcaatacccacatcattaaaaaacccctataacagttattcgggcgaaactattaagtatgaattgaaagtttatgagaataaaagcaccaagatatatgatgagaaaaaaaagaccggagtgtttgataataactctaatgcgataaatgacatagatcatcatactttcaaatttatcacaataaaaatatctcataataattccttggaattactcacttttaaggaatcattaaatcctgaatcgataccatcaggtaataattttttaatgttcgttcaaaagttagataaagaacattaccaatatgttttactggaactgccagattttcatggcagtagtaattattatctagacaatccaataaagagtttattttatgaaagaagaaaagtaataattagaaaaggtcaatcattaagaatagagatcagaaataatggagtacaacggatttatattctaaccaccaaagaacaaagttaa

SEQ ID NO: 271795 - DNA, 2331 bp, Klebsiella pneumoniae
atgcaggatatcattctaatcggcgatcatgatataacgaaaacggccagcgcgtgcacgggtggcgtaggtaacatgactctcaaccctgaaggcgaaatcgtttcaggggtaaaagttaaagattttaactgggatcgtgttgcgatgcccagtcagattgaagcgacttacttcaatcagcagggtcacgcgtttgataataatgcattagattataaatatataacagatttcatggtgaactcatctggtgtccccacacgagccggaaattttaaccgtgtcaaagaagacaattgtaagtatgagtccgggaggcgcggcgtttaccgcaacgcctgcgactggacaaccttaaccaactgcgaaatcatcaaccgcagggcatggcggcagtccggaaacgttgatggaactatcccggaatacatagcggtatgtaccggaactgctatgcacgttgctggggggtactggggccccgcagcagcaaaagattataacggtcgcctcggaacggtctatgggactgcacaaaaccacgtattcagtggtgtgtacactgaatggacttacaacttctacactgtttcacgctggggctttaacggcaaggcaagccgactctttagtctgcatcttgattgcataagcacgtataaagatgacgccagaaattactgtatgctccggtttgaaggcggttgcttcccgacaacggatgatggtggtaactcactatacccggacggcttctatcattacgatacgccaaacggtctgtcgggactgtcatttaatagtccgttacgcgactggggtgcatttcatcacgggggttatgataataaattcgggccgtataactggtttgttggtgcaggtactgactgggattcatggcgtgaccggccttatgcaaaggaaatgtttaacccatacggatttgcgataaatgctggtccggcgatggccctatgggccaacccatctataaaatcagagatagggatttggattaaagacccgagcggaaactttgatccccaaagagtttacgcctggataacagcggcagggcaggaaagcacaggcaatacggatacagctctttacaaagcccaggcagaactgtgggttgattttaataacgggtataagttattaaaaataacaaacaaacgccttacagcctgggatggactgtttagttatcagcggaactgcggtatttactttgacgttccagctgatggaagcacgccgatcgttgttaaggccatcgaggcttacacgggtggcatacctgtattccctaacggctgcggaaattacgttcctgaatcagccgcaaatagcattctcagcacagccaccaatatagtaggagcgggattctctattggtggtgggattttttcacctggtgatattgttggcccatgggttcatgcgagacggacgaagtctgattacatcatctccccgacgctgaccagtggttacacgctggatcaaaaaatggtgacaggtggttgcacgctggaagccgcatttaaagtggcattcagcgcgaccgttgaaacggtaaatagtaatgccacaacaataatcagcatacctgccgcttatttgccttacgttgctgtgggaataccgctgtatatcaccggcggctcatcaaccggcgtgaccggtcaagttcggctgattaagcgtctgctgaacagtgacggaacatcgtctaaccgttacctcgtacaaggaaacaccggggcggtgggtgacactctgaccatcgaccaggcgcaaattccgccgtacacgttctataatgaccgcaacttcaatgctgttaccgcgacgtcagtgactgtcaacggggtgtcggtagcaaacgcccacaggtctacatactcttcagccattggctatggtggcgcgtcaggagctaaagccctggagttctacgtcaatggtggaaccacctacacgcaaaggattgttgccacgtctacgacggtaatgagcctggaaaccggcgggaacttgtcagtaaacgggaatacctacccgaatgctgacggcacctattcgcttggcaccccatccggtcgctggtcgcaggtttttgcatcgaatagcgttatcggaacgtcagacgagacgcataaaacccgcccccgggtagacaccccggcggaaaccgacgcctattatgaaatcgggcagctccccggcgtctggcagtggctggaaaaatatatggtcgaaggggagacgcccgcctgcactccgggccgaccgtgcaggcggcgattgccgtga

SEQ ID NO: 271796 - DNA, 894 bp, Klebsiella pneumoniae
gtgggtgacactctgaccatcgaccaggcgcaaattccgccgtacacgttctataatgaccgcaacttcaatgctgttaccgcgacgtcagtgactgtcaacggagtgtcagtagcaaacgcccacaggtctacatactcttcagctattggctatggtggcgcatccggagctaaagcgctggagttctacgtcaatggtggaaccgcctacacgcaaaggattgttgccacgtctacgacggtaatgagcctggaaaccggcggaaacctgtcagtaaacgggaatacctacccgaatgctgacggcacctattcgcttggcaccccatccggccgctggtcgcaggtttttgcatcgaatagcgttatcgggacgtcagacgagacgcataaaacccgcccacgggcagacacgccggcggaaaccgacgcctattatgaaatcggacagctccccggcgtctggcagtggctggaaaaatacatggtggaaggagatggcgcccgcctgcactccgggccgactgttcaggcggcgattgccgtgatggataagtacggtcttgactggcgggaatattccgcgttctgctatgacgagtgggatgcacaggatgcgattattgagacgtgggatgacgagtgggaggtaaaccccggcaccccagctgaactggacgaagaaggtaacgtggttgttgaggcggtaccggaaacgcgcaccctcatcagagcggcgggaagcaatgttatccaggaagcgcgggaggccggaagcgtctacgcattccgtaaggaggaactgctcttctggatcagcagggcaaccatcgcaaaacagcaggatattgaaaaacgcctggcagctattgaagccagtatgtcctcgtaa

SEQ ID NO: 271797 - DNA, 849 bp, Klebsiella pneumoniae
atggaaaatcatataattatttacccagaaatgtatctggatcataataaaaaatcagtgcaactcaccgctaacctatcaccacgaaccttaatgatttcggctttgtattgggataaaattttaacgcctaacaataacttttattatgcggcatacgaggttgtggaggaatttagagagttaaacaaagccggatttattttaatggacatccttgaaataaatggtggtgggtatgttagtgatataatttataaagaaaacaaaaaatatgtatttgaaaagctaaacagcaaaaaatctaacaccacaataaatgatgcgtatggattgttttccaatgacaaagaaaataccttaccagatcacggcgaaatagttaacttaataaatgcaataccagagccatcagtatcaacaaatatacatgacatacttgagttcaggcttaagcgtggcgatgaattaaaaaacctcatgataaagcttaatgagtttgaattgagaataatgaaggcagaaaacaaagaaatggaattcaaaatgatcgttaatgaactagatagagcttgttatgatataataaagctatacaaagaaagcaaaataaaatttaatttatcaaatgtaaagtttaatttctcaattaaggaagtaatgaaatttgcaggctcagcatatggaggagctattgcaataggacttggggaaactaccgcattactaacagccatggctgccggagcagcggctacattagagataaatgctgacatatcttacaagaaaatagataaaacctgtccttttaattacataggaatgatgagcaagaagctatcatga

SEQ ID NO: 271798 - DNA, 360 bp, Klebsiella pneumoniae
atgttcagtttcggctttaggcagcacaccattaatcaccaggtattggtttttcaggccaattgcggcgagttcttcatgggtgcgggcgacttcctgcagcgtagatttttgcagtcgtgcaaccagaaccaggcgggtacgttcaggatcggacaacgcctctactgcatgagcatactgctcacgctgcttttccagcccggccattgggccaagacaggaagcaccatctggattactttcaatgaagctactccaggcaccgggaagctggagaaggcgaatcgtgtggcccgtcggcgctgtatcaaaaatgatgtgatcgaaacgggtcagcagggaagcgtctgtcaataa

SEQ ID NO: 271799 - DNA, 273 bp, Klebsiella pneumoniae
gtggcaaaactgcttacgttgcttcaatgggcgtgtgcccactatgaaacgccgccatctttgtctacattacgccgctggacccgggaaggccggatttatcccgccccggagttgcacgggaaagagtataaagtaactcccgacgcgcaatatgtagatccgagcaagaaaaaactgaagccaaaaccgaataactttgacgtgccaaaacatggcacattactggagagactgactcatggcgaaaaggcccgcacgttacgacgctaa

SEQ ID NO: 271800 - DNA, 618 bp, Klebsiella pneumoniae
atgtcagaccaaagcaaatattatgactattacatggttgaaggtgaaaatgtgaaaaacctcattgatggatataacgctatcaatgaagaaagaaattcaatccttgctaatgccgccgaatctgttggcgctgtagcatgggcactgaccagcagttggggtggtggcggcgggcttattcagggatttgcatgggataaagacttccagttcccctgccctgtcaccataaagcgggaggatttctttgatgggaggcgtgttgttattgctcgcggaaagggaaacacaaaagaaggaagggcatataacaaagaactggatgccgttatgggcgacgccaacctcaaattaaaggcattgccccaatggaaagattacatcgttaaccattacggaattatgcgtaccggaatcggtggtcagtctggccgtgggttcggatttgccatgctctccacgtatggcggtaaacaccctggcagggatgatgcgcttctttttggcattccgaataataatgacgaaaagcatggtgagattaccatccccgcaaacttcaagaaattaacctacggcaaattttacgacattgtaaacggtgaggctgattag

SEQ ID NO: 271801 - DNA, 342 bp, Klebsiella pneumoniae
atgggaagactcgataagtttatcgtcttcagcttggatgccctcagagacaattcaggcaatcaaattatctgcaacgtcgacttactccgctctctttattctgctggtcacgacatcatcattttagccgacaaacgaaacaaacaagaccgccagtggattggcgaattatatatgctcgcatgggatatcgtcatgcctgatgagctgaatttaagttcaggcaatgttctgtttgcatgtgtaagtgatgaatgtctgcatgagcggttaattgaggccggagtagtttgcagcctgtataaatcatatatgccgtctgttgagcaggcggcttga

SEQ ID NO: 271802 - DNA, 204 bp, Klebsiella pneumoniae
atgccaaaatttcctcagaacgcgatagttaaacacgtatccggtgacattcgcggatatgtgatgaacatattcgaacagcaagatggctcaccaccctactacttcattcaatgggatgatggcaatccttcatctcacccggagaaagagcttcaatgggcaacaacggaacatccagtgatgcataaatctatgcactaa

SEQ ID NO: 271803 - DNA, 369 bp, Klebsiella pneumoniae
atggattacagcaagctttcagattttgaaatcgataaggccgtcgcagatgcgttgggtattgaatacgacatcgcaataatgttcgttaatccggtggataaaatcaacgggaatcatgttgaggagtatgtcaggaagaagataaccagcaatgaaaagcactggaggcgcttctcaccaacaagaatacccaacgatgcattccctattatcgaagataatcgcatctcgatacgcaacagatatgaaggtgactggaaagctgaaaatgaatggggtgagtctcattttcatgttgcctgcaatcctctcagagcggcaatggtcgtttttttaatgatgcaggatgctcgaaatgaaaaataa

SEQ ID NO: 271804 - DNA, 177 bp, Klebsiella pneumoniae
atgatcggaagaaactacgaccccacaatattccctgatgatttatcaattcgccacagaatggacaaggtaccaacgaaggaagaactggccgggcgcgacagttttccaagcgtgaacgataacaagtatctggacgcaattttgaagagcaagaagaaagagaggatggtgtga

SEQ ID NO: 271805 - DNA, 138 bp, Klebsiella pneumoniae
atgatgcttacgatgtctggcggctgcatcctggccgcctattacaaccctgaatctgaacttgaacgtaaggttcgccagttaattaaagccgccagaaaggtaatggaggacttatgtcaaacattaagccaatag

SEQ ID NO: 271806 - DNA, 273 bp, Klebsiella pneumoniae
atgcccaatagagggtcatggaatggcggctggtctggggctagtgacaagtacgttaagagccgagagttgcctttgaagggcagcgataacgttaaggatggcgcttgccattactataatttcggcgatggttggggtgccggaattactgtgaaaattgtcgatggtgctaaagcaaaaaatgcagaaattaaaggcagtaaaggtttctgcggctacgactggatgattgatagcatcattaaaaacgggaaaatcatttctgaatag

SEQ ID NO: 271807 - DNA, 237 bp, Klebsiella pneumoniae
atgaaccgcaatcaacgtcgcatggctgcttttaatgccaagaaagccgctgaaaagcgctttgaaaacaaaattggtgagattcttttggattgctcaccacgtgtagaccgcgcgacctctctgtgcagtctccgtgacaagccagaacaggaatcaactggaagcatgtgccttccagaagtcgccctcttcgcagcagggcatcgtaagagcaaacaggttacagctcgttaa

SEQ ID NO: 271808 - DNA, 636 bp, Klebsiella pneumoniae
atgattgcgcagcgcataagggacttaagaaaacgacacaaaatgagcggtgaatctcttggaaaagtgattggcgtcagcaaatccacaatttcacaatgggaaaatggaaatactcagcctagtggggtaaatttaactctgctctgcaaggttttaaaaacaacaccagaatggattctttacggaaagggtacacccgccgtagaaacttcaaattctgaaatggctcgtatcaggcattcaggtgttatcaacatttcgtgggaaatgctcatgggggacagtggttgtatattgtctaagacacctcatgatggttacgtaacctcatttggcgcaacagaaaagtcgtatgcagtaaagattcatggtgattcgctttggcccaggatcaacgatggagaggtcatagtcatttcaccagatatcgaagtggcagctggtgacgaggtttatgttttgcttgcggatggaagcgaaatgataaaaagaatctacagcatttctgcggacagggttcaactcattgagatagcaaaaagagagatttcaccttcaacctacaacaagtcacaaatcaccctggttagtaaaatcacagcaatcatatccccggatttaatcaccttttag

SEQ ID NO: 271809 - DNA, 177 bp, Klebsiella pneumoniae
atgacaatgcaagaagctgtcgaattgttcggcaataagcaaaaacttgctgatttctttggtatttctaaaagcgctgttagccaatggggtgacaagcttccgccgctgcgggaaatccagttagaaaccagcaaggacgtgaagcgcatgcttcgcaaaaaagtagctgcctga

SEQ ID NO: 271810 - DNA, 300 bp, Klebsiella pneumoniae
atggaagacactgcaaactacagcaaaccatcgcagcgcgacatcgacagagcagagacagacctgctaatcaatctctcagcgcttacacagcgacgcctggcaaagatgattggatgtcatgagacgaagataagccgcactgattggcgtttcatagcgtcgattctgtgcgcttttgggatggattcagacatcagtccgattagccgcgcatttcgttgtgcgcttgaggttgtcacaaaagaaaaagccccggcggcaaccgaggctttcgagaaacacaatttggaattttaa

SEQ ID NO: 271811 - DNA, 144 bp, Klebsiella pneumoniae
atgaaaaaactcagtcctgaccaggacaaacttcacaaacacatacttcgtgatcgccttttgtcagagttcaagcagcctggtcgatttcgggctgagttggagaaatggaaacaactgctgaagggtaagggtcatgagtaa

SEQ ID NO: 271812 - DNA, 906 bp, Klebsiella pneumoniae
atgagtaacatatcaaacctagccgaagccagagaggccagaaggctccagcaaccgcaaaacagtggcggtaaggggttcgccttgctgcatcgtaaaattatggatgtgccgttctacaaggacgcagaggcggcgcatttgtgggttcatctgatactcaaggccaagcatgcgcctgaggtggtactgacagaccttggagagaagttaattaaccgaggtcaactcctgagtggtcgaaactcactggcttctgagactggactgaaaccagaccgggttcaatatctgcttcgtaagttccaaaagctgggaatggttgactgggtttctcatgggaaattctcagttttcaccatcgttaaatacgacgattatcagtcaaattatgtaccagcagattaccagcagattaccatctcaaacgcaggcgtaccaacgcctgtagagcaacctgtaccagcagattaccagaaaattaccacagataaagaatatataaataataacttactacctaacggtagtaagtatgtcgcatcagtcgaagaaaaaccggctgaaaagaccccaagactttcctgcgaagaagtatggcaagcacttcgcgaaggcgtaccggatgccaggggttggaatgtactcacccctgatcgtagaaagcgaatccagaagttttggcgggaagccaagcctattgccaaacagttcggcgatgtcgagccattcggtatggaatccttcaggacgtacctcgcttatctgcataaatcctgtcgctggatgtttgagacgcggacggacaatgccaccggcaaaacctggcagaaacggaattacgaatacattttgagtgcagaaatatatgcacagacccgcgaaggagagcgagatgatcgatga

SEQ ID NO: 271813 - DNA, 1404 bp, Klebsiella pneumoniae
atgatcgatgagattattaccctgccacacaacctggaagctgagcaaagtgtgattggtggtcttttgcttgatgacgacagcagcgagcgagtccagaaagtgctggcgatgcttaagcctgagtcgttttacagcaaagttcatcaaatcctctttgcggaaatcaggcagatgatccgcgacaacaagccggttgatggcctgactttattcgacgctctagaaagcaaaggaatggttgagcaggtcggagggtttgcctacatcggccagattgcaaaaaataccccgagcgcagcaaacattgtggcctacgcagcatctgtgcgtgagtctgctatggagcgctatggtattcagcgcatgaccgaagcgacagagttgctctacgccaggaacggcatgagcgccactgaaaagtacgaggccatccagagcatcttcacccagctgacagaccactcaaagacgggtagtcgccgaggggcaagaactctcgcggatgttgctgacgactggatagccgaggtggaaaagcgcttcgatccaaaccagcgctcacgtggattatcgacaggcatcaaatctctggacgacatgcttgagccaaaagggcttgttcgcggttcgctgtttgtcattggcgcaaggccaaagatgggcaaaacaaccctctacagccagctggctctgaactgtgccatcaacgagagattgccgtcgatcatgtttagcctggaaatgcctgacaagcagattctggagcgcatgattggacaggcatctggcgtcaacacggatattttttatcgcggcgcaggtcgtgatgaggaatttgcgatcgccaacgctcgcctggcagaaatggttgagagccagaatctctacatcgacgacacaccaggagccagcctttcacacatcatcgctgagtgccgacgcattaagcgagagaggggtaaggtcgggatggtgcttgtcgattacctaacgcttatggcagcggaaaaagcggaccgaaatgacctggcatatggcctcatcacaaaaggcctcaaaaacctcgccaaggagcttgattgcgttgttgtcctgctgacccagcttaaccgtgagctggaaaagcgagccaacaagcgaccactcccaagcgactcaagggacaccggccagatagaacaggattgcgattactggctgggtatttaccgagagggagcctacgacgagaactacccacagggagatacagagcttctcctgcggctaaatcgtcatggcagcggcggcgtcgtgttctgtgagcaacgtaatggcgcaatttatgactgtgaccagatgcaggccgaaatgatgcgacgcgacagagagcaacaaccaaaatcaaaggggggattttga

SEQ ID NO: 271814 - DNA, 249 bp, Klebsiella pneumoniae
atgttctatgaagatgccattaagagagaggatgcctttgagttcctgatgaaaacctatgccgattttcctaaagaaattccttacggattaaatcggaatgtatcagaaaggatatttaaggactggcgatgggtaaggacgcttgatggtgaaatcgtttttgcaaactgcctgcagcaatgcatttcagaaagtgatttcactgaaaggaagtctgcttttgaggtggccgcatggactcattaa

SEQ ID NO: 271815 - DNA, 606 bp, Klebsiella pneumoniae
atggactcattaaaacaacgtatgctcgacttcatcagacaaaaccagccagtcaccgaacttcagcttaccgaagggctggggatatcccgcaacgcctgccgggagaatcggcggcaactgcgagctgttggactgatttatatcagctgcggctctggtgcttttctttccctcgaagacttccagaaatggcttgagcatggcggcggccacgaaaaaatcagcatgacggccaagaaaggaatccataacgccgttgataattcagccaggaagcgcgtcattgaatatctgtcagagcagacagaaccagttggcgcaggtgagatagccaaggcctgcaacctgataaacaagaccgcttaccgcgttctggcgacgctcgccgatgacggaacggtaattcacgacggccgtgttaaaggccggcagtaccttatcgcctcatccgatgttcaatggccggcaaatggagagaagtccagcgaaaggaaggtgaaggcattcgcgaagtacaacccgaagaaaaacggcgtagttcaggcatatctgaacagcccggcccgtcagaggctgatggctgtatatgggaggatgggatga

SEQ ID NO: 271816 - DNA, 261 bp, Klebsiella pneumoniae
atgaaagaagccacaacaattatgcacctcataatcgcctctataggcatgctctacatcatgttcaaagccggtgagtggattctctccatggtcgccaaagaatggtgtaagaggcgcaaggagtcggtaaagcagaaggcggttgacgatttatgcgaagcttttgagcttcaaaaaatcacacccggagaaacagtaaagctcgtaaccaaaggcagcctggtaatcatgatgtatcgggagaaaacagaggtgtga

SEQ ID NO: 271817 - DNA, 300 bp, Klebsiella pneumoniae
gtgagcgaaaaaataacccgccgagtggtctgcgcggcaaatcagtatcagtcgaaaattggtggaaatccattggtctttatcggcgtccgccattactgcccaataatgcggcaaaacatcagtcagagccttatgtacattgacagggcgacagaggttcagggttttgttgaccagtttggtgtctttatggaccggaaagaagcgctaaaagtggcaaaggaggcccggcagcttaacgtcgcaaggattaaaacctggccggatgatgagctgtttagcgaagacctgtattaa

SEQ ID NO: 271818 - DNA, 441 bp, Klebsiella pneumoniae
atgaatacaccaactatctacacagcaactcctgctgatttatcaccaccagttcaaacagattccttctgtgtcgatctggttctggcgactgactatcagaagctcaaggatgagtttaagcagctgactgcggagaatgtggcgctgaaaggtgttgtttcggaaattaacaacgagctttacggcaaggggtttgaggttgctggctggcatctgaatggagctcttgaaccactggataattggtttactgataacggatggggtgggcctgaaacccccgccaccgatcgcatcgtagccgggattaaggctgatggggtagatgagtttaagggatggatgctctcaactggatacccttgggaaggtgactggataggcattggacgaatgaccgataagttcgccaagcagctgcgcgagggggccaaatga

SEQ ID NO: 271819 - DNA, 165 bp, Klebsiella pneumoniae
atgcccagcaaactcaaaaagcgccgcattcgccgattacgtgacgatgtggcctggtacaaagcagaagccacggactggcagacgagggtctttgagctggctgatgaagttgcagcgctcagagagaagttacatgaactcaccggcaggggattaccatga

SEQ ID NO: 271820 - DNA, 180 bp, Klebsiella pneumoniae
atgagtaacgtcatcccgcttcatacagattatctcaggcaggctttcgagattatagagaacctcaacgacacctggctatccaaaaagcagcaagccatcgtagagcaggcattgtgctgtctggaaaagcagattgaactcaacgtgaggaaggaaagtgcaaatagacctggttaa

SEQ ID NO: 271821 - DNA, 324 bp, Klebsiella pneumoniae
atgtcaaatcgcaaagtcacaaccaaaactattcagtttgtaaggaagatgtccacaacaaaaacatgcagggaaatagcaaagcttctgcattacaagccagaaaccctctacaacattgcacaccgctttggcatcaagttcacatctaaacggtgcaaatattcatcggcagtaattaaaaggatttttatgctgaaggatgagcaaaagcttacctggtatgaagtttctttagccaccgggctaacagttaacgtctgcacttacctctacagaaagcaaaaacaatgcgacagacacccttcatctacgacccaatga

SEQ ID NO: 271822 - DNA, 624 bp, Klebsiella pneumoniae
atggctaagggcgcaatgcctaaaccaaagaaatgccccatgtgctccaccgaatacatcccgcgaagttctctccagaaggtctgtcacaactataaatgcgctatcgcttacaacaaaaagcgagatgaagaaaatgcagcccgcaacaagcgaaagcaagagcgtctgcaaaaatctgagctaaagcagcgaaaggataggcttaaaaccgcttcacagtggaatagagaggctcaggcagcagttaacaagttcatttactggcgtgattatggaaagccgtgcatcgcatgtggaagacctcttaattatggagttcgcggtggcgcggtcgactccagccattatcgctcaagaggcgctgctccatggcttcgatttaatgtcttcaacaaccactctggctgcgtgagatgcaatagggagctatcaggcaatctgattccataccgacttaacctcatagagaaaattggcctgcaacgggtcgagcgcattgagcatgacaatacagtaaggaagtttcctatcgaatacctgaagcgtgtgaaagcgatattcacgcggcgggcccggcattatgaaaaattgcgaaagagacaactggagagagttgcatga

SEQ ID NO: 271823 - DNA, 237 bp, Klebsiella pneumoniae
atgaacaaaatccaatatcctatgagtaccgctgccatttttgatgacattgtgtatccacttcactttgatagcgctgaaaaggttaaacaggaaatggaaggcgctgttaattggttctgtcgatggtgcaatgaagaaaaggtagttgttaaggcgcatgtgctagttagttgctggggacagtatttaacccatgcacagattattcaggaggtggaatgtttttcgtcataa

SEQ ID NO: 271824 - DNA, 180 bp, Klebsiella pneumoniae
atgaacacagtaaccagcattaaccaggtaaaaatgcagaagacccgcgaccacgcagaactcgccagcgttcagcagattaaaggtcagtgccagcggacgctcgaatatctgaatgcccgggaatcagaactcaaggagaaacttggcatcacagacgatgaccccgaggtggcatga

SEQ ID NO: 271825 - DNA, 186 bp, Klebsiella pneumoniae
atgtgctcgtacaccatcgaggaaatcaaagcgctcgctataagcagcggcagcgcaaaccagttctttatgcgaaccggaattaagccgaacgacgtaatcagcatcctttgcgatctgattcaggaaagcggcattgtccagccatcaaccccactcgttattaccccgtctaaatcaggatag

SEQ ID NO: 271826 - DNA, 162 bp, Klebsiella pneumoniae
atgacaacgtttgattattaccgcttagcaaggctgcgcgggaagcttcgccacgcccgagattatgagcggcgaattatggatgaaatcagagcagtggaagccggtaagaagggagtcattgatacggtgttaacccagttaatcaggtggtgcgcatga

SEQ ID NO: 271827 - DNA, 822 bp, Klebsiella pneumoniae
gtgaatcttgaaaactgcatcaaattccactcggctaaaacaacacaaatcagcgactctccacgcgccacagcatcagattctttaacagggacggatgttatggcagcaatgggcatggcgcagagcagggaagaaatgggctattcagcctttttggggaaaatgggcatcagcagcaatgaccgtgagaaagctattgaactgctgaccctctatgcatattcggcctgcgttaaggttccagccttacgcgaccttgatgatgatattaagccaaaggtgatgcaagttctcgcaatgtttgcatttgaggattactcacgcagcgcagccagcaccaggatgtgcgactgctgcaatggagcgaaatttattgaagcggaagtcttcacgacgaaagtcacttcgccaaaaacaccaatatccatagcggacaaggaagccagaaaggtcgtgccggaagagcattataaaaaacgccaggtgagggatgtggtgaaggtcatttgccaaaaatgcaaagggaaaggaacgctgtctaatgcgtgtcagtgccatgggaaagggttggtgttagacagggaaaaaacagaacagcagggaggcgtaccagcatataaaacatgttcaaaatgcaacggacgcggatatgcgagacttccggcagagaatgtccgcagagctttgtgcgcatcgggaatggaaataagccagccaacatggagtagaaactggaagccattttatgaatcactcattgaaaggcttttccagggtgagtctcacgccgatacggtacttaaaactgtgacgcggtga

SEQ ID NO: 271828 - DNA, 300 bp, Klebsiella pneumoniae
atgttatacggaatagaaattattccggctctattgctcgcattactgatgatagtcactggctcattagccaaattcgtttactcgaaagagagcaaggtaacgctccgtgaccatgtggttgtgagtctgtttgccggaatggtgatgttttttttcgggctggcaaatggttggtcacagccgtttattatcttaggctcaggaattggcggatggagtggtgcttccatcattcgtcggattcagctacctggtgtcggctctgatgacaatggtgacaacgatgaaaccaattaa

SEQ ID NO: 271829 - DNA, 633 bp, Klebsiella pneumoniae
atgaaccagatgcagtttaagcaagccgcacagattactgatgcgctggccgctaagtggttccctcacattcagaaaaccatggctgagtttggcatcgatactccgcttcggcaggcagcattcatcgcgcagatcggcaccgagtcgaacgggtttaaatctgtggtcgagtcgctcaattattcggttgaaggcctgaagattttcggttcacgactgacggctgagcagcggcaaagacttggcaggaaacccggcgagcttgcactttctccatcacgtcaggctgatatcgccaacatcgtttatggcggccgctacggtaacgtaaaccagggcgatggatggaagttcaggggtcgcgggctaaagcaggtcacattccacgacaactatctggcatgcggtaaagcgcttggcttagacctcatcgccaaccctgatttactccttctggatgaaaacgcagcccgcagcgctggttggttctggaaggctaacggctgcaaccagtttgcagacaaagaagacattgtcggactgacaaaacgtatcaacggcgggacaaacggcctggacgaccggaaagctcgttacatcatcgctaaaggcgttctggtgaaaaaatga

SEQ ID NO: 271830 - DNA, 216 bp, Klebsiella pneumoniae
atgaaatttattgataacctcccgcagctatggaaaatgtggtcagtccgcatcatggcgattctggctattgtcgcttcagtgtgggcacaaatccctgacgatgtgaaagccctaatcccgccgcaatatctcggctatgcagttggatttgtgtcggtatgcggcatcgttgcccgggccattaagcaattcaacaccgatgagcaaaaatga

SEQ ID NO: 271831 - DNA, 549 bp, Klebsiella pneumoniae
atgaacatcccatcgctgtttcagcctggctggaaatggtgcggaattgcattgctgtgtggtgccttgcttggcgcacttgccggttggtgggtgactgataacaagttcactgcggacatcgccacgataaagcagcagcacaccgaagacctcaaagccatcagtgacgaagcaagcactcagcgagacaaaaacgccgctcttgaacatactctggctaacgcaatagccaaaagtgaccagcaacacacgcaggagttaaacgatgcgctcgcaaaaaatcaggctcttcgtgatgctgttacctctggtgctcgccagctgcgcctcgcaaaagccggtcttgcaacctgtaacctgtccaaaagtgcaattgccggcactcccagcatgggcattggagccgaaatccaattcagtccagattttggacgaaacatttacgatatccgatccggtgcaatcaccgaccaagccaaattagaaatgcttcaggattacattcgcgcaggccagcaggccggtgtgattgcaggtggtaagtaa

SEQ ID NO: 271832 - DNA, 240 bp, Klebsiella pneumoniae
atgagtagtttctattttgactccatgagagaacgagttcgcagagaattcccctctttggatgaaaaacaacaaaggcatatttgcaatgtgatttcaaacgccttaaggaagtttgaggccgatatcaactgggttgaaatctcggcattacccctgatggatgagggtggctatgtggaatgcatgcaactttcagcctgtggtcgaaatgtttacctaagaataacggtcgactag

SEQ ID NO: 271833 - DNA, 267 bp, Klebsiella pneumoniae
atggatacgaaaagattcctgacaccattaaaagttgatgacgttgaatatatcgttatcggtggaaagcgtgatggcgagcgtggtgtgatcgacaagaaagttcatacccttaacggcgacggaatataccacaagaagcaaataacctgtggtggctatagcgcagtattttttgtttcatctgacatgggtgacgcaaccccaggtgaagtgatgtcagtcctttatcacgggtaccgaaaatccaaacttatatcgtggtag

SEQ ID NO: 271834 - DNA, 237 bp, Klebsiella pneumoniae
atgaaaattattatgattggcggcccatatgacaatcagttagcttgtgtggatggagatgaaataggtgggccaattcctttctttagcatgcctccgaagtttgaatcaataactacggcattatctgaagggatatctcctagcaagtcactcgatacctatttatataagcttgagatagtcaaaacttctcctaatacatggcattacgaatatcactatcaaggtcgctaa

SEQ ID NO: 271835 - DNA, 705 bp, Klebsiella pneumoniae
atgcaatatctgacaacagcttcaccggctgcggtaatgagcagctttgatttcctgaataacatcatcaacccggcaaggctggagtttgatcaacctgctgtagaaaaccgtcacttcttatccagggtcgaagatgaaatagacgatttgggggtcgcggaaactttttacgtgaccactgagcaaggggcgcagcgtgcggttaaaggttatatgctgaatcttgagcaaatgactttgatcggaatgcgcgagtccaaagccgtgcgacgcactgtgctggctaagctcaaagttatgcatgagccacaaataccgcaaacgctgccagaagcactgcgtctcgcggcagaccttgcagagcagaaagctcaacttgaaaaccagcttgcgatcgcagcgccaaaagtcgaattcgttgatagttatgtcgatgcgaaaggtgcatttggtttccgtgaggtcgcgaaaatactcggtgtaaaagaaacggttcttcgctcattcctcatcgacaaggaaatcgtttattaccttgccggtaagatgactgcccacgctcagcacctggatgccggccgctttgttgtgaagaccggagaaaaccatctcaacggcgcagcatacagccaactgaagttcacgccaaaaggcgttgagtggctggcgtcgctccttaattcttcccataaagccgcataa

SEQ ID NO: 271836 - DNA, 357 bp, Klebsiella pneumoniae
atgaacgaagtcacgaaaagtctttatgtcggatggcaagataagctagaagccgatagggtcgaatgtgtcatgttaagagcgcaaaagttctgtcatggttatgtatcagccaagcaagcattcaaaacctatgaggctgaatattccagcaacggtattgtccatcttcatgtcgataagtatcggttgtatggcatgtctgagcttaaaacatttaagcaaacaggctggaattcttacacccattatcttgagatgattggcatgtatatcggctcagccattggagacaagtcttacctgtccatgaatgtcagcagaatggctggcgtctcttcttcactcaacacataa

SEQ ID NO: 271837 - DNA, 213 bp, Klebsiella pneumoniae
atgactccagaacaattcgcttactggctacaaggctacgccgaaatctctggtaagcagcctacagaatctgagtggcaggtcataaaagaccacctccagatggtgtttaataaggtaacgcccgatcgacttggtgggccagccagaacccctattgggctgagtgattatttaaaatcttggccgcacgctattggtgtcacctgttga

SEQ ID NO: 271838 - DNA, 246 bp, Klebsiella pneumoniae
atgaataaatgcaaaaccggacaagtggagtgccctatttgcggggtaggtgagcttatgatgggaacaacaaatagtttcgtagaatataagggcgcgaagcactgtataccccttcacttttgcgtatgtagccattgcgaaaccgaacaagccaccgaacagcaattattagaaaacaagatggaaatgatcgcgttaaaggaaagatacgcggagcatctcgatgaacacccggatttttaa

SEQ ID NO: 271839 - DNA, 681 bp, Klebsiella pneumoniae
atgaacacccggatttttaattacctcatagccgctctcgtagcggctttttctttttctgcggcagccaaatctgattgccctggtaaattcctgaatgacaatcctcctgctatccagtacgaccaggagatttgcttcactcagttctctgtactttacagcgacaaacttaaagaccctgttatcagcgcccaacacctcacagcagatgacgttaaaggctctcttcagcttaagcgcaaggaagcgttccactctgagcctaaagtcacccgacaattcgagtccacgcagaaggactacgcaaagtctggttacgacatgggccatatgaccgcagcgggcgacgccgggagcgctcaggagcagtttgaaaccttcagcctggcaaacatgacccctcaactcccagacctcaacagaaaggcctggcgactgatggaagaatccgtgagaaagcaggttctcgctgaaggtgacgcctgggtagtcactggcatggttcccggcaaaacgacaatcggtaacggcgtaaacgtcccgagcgttatctggaaagctgttaaagccaaatcaggcgagtctgtttatgtcggcgacaatacgaccggcacagtaacaaagctcaccactgagcagtttaaagcgaagtacaacatctctccttttggtgattag

SEQ ID NO: 271840 - DNA, 282 bp, Klebsiella pneumoniae
atgtcaactgaaaatgaattcgcttttgaaaaggcgcggagattgcagattggccgccgccatgaacgcactttcataacgttctatcaggatgtgcagaagataatgcgtggcggacgattgttaaaggaaggggttgactctgtgtcatgtaatagccgcttccgtcaaggactcaaaattatcccattatacgacgtataccaaaagccaacgaagtcattcgtgatcacgcttggcgcgggaaccttgtcaatcgccctgaaagaaccgggtaaataa

SEQ ID NO: 271841 - DNA, 213 bp, Klebsiella pneumoniae
atggccggaacacatcgtgcgaattcatttttatcactcattatcgccaccctgtccctcaacctcagaaagataaagagcaataaacgctttcccgatagcctttgcagcatcctggtcttcaccagaaacgccgttgtttctgattacgtcagcaaggcattgggctgcgatgttctgaagtgcttcggggataaggttaaatggtactga

SEQ ID NO: 271842 - DNA, 186 bp, Klebsiella pneumoniae
atgccacacaggctctcgttaaccatccactgcaaggctaagtggtggctctctgcatacctctggctctggataaagaaagagcagattaaagcctgcatcgctcagcaggagattaccgctgaagagataaaagcaatggctgactggatggcaaagaaaggctttgcgctgaaggttggctga

SEQ ID NO: 271843 - DNA, 618 bp, Klebsiella pneumoniae
atggctaaacaggactggaaagctttacagcaacagttcctgtctgagcacgctaaatcaggtgtaacgcctaagcagtggtgcgaagcgcaggggctgaattatgcgactgcgaagcgccacattaaaatggtggacgacgattcgcaaactgcgaacaagattgcgaaagaagggaagccaaaaaattacgccggcacaggaaggccatctgattacatgccagaagtcgccgccgatatttgcgcacttcttgcgaatggcgagagtttgcgaaaagtttgcgaacgatccggaatgccaagcaaaacgtccgtcttccgttggctagccgagcaccaagagtttcgtgaccaatacgcaaaggcagctgagacccgagccgatgcaatcttcgaatccatgttcgacatagcggataacgccgttgaagaggctgcagctgtagcaaaggctcgcctgcgtattgatacgcgcaaatgggcgctggcacgaatgaacccgaagaagtatggcgacaaggtttctcaggacattgatgttaaatcatccgatgggagcatgacgccaaagccaaccgttattcagcttcttccagtagagccgaaaaatgagtag

SEQ ID NO: 271844 - DNA, 1293 bp, Klebsiella pneumoniae
atgagtagctcagttcaactcccgatccccgcgaagcttgctccattattcactgccgaaaataagcgatatcgctgctcgcatggcggccgcggtagcgcaaagacgagaacgttcgccctgatgacggcggtgaaggcctatcaggcaatgatgaacggagatagcggggtaatcctctgcgcccgcgagttcatgaactcactcgaagagtcgagcatggaggaagttaaacaggctatacgctctgtgccgtggcttgcggcaaactttgatattggcgaaaagtacattcgcaccatcgacaagagtgtgagttatgtcttttgtggcttgcgtcataacctcgacagcattaagtcaaaggctcgcattctcctgtgctgggtagatgaagcggaatcagtaagcgaaatcgcctggcaaaagctcagccctacagtccgtgaggatggatcggaaatttgggttacatggaacccagagcgcgatggtagccctaccgataagagattccgcaaagaagctggcgaagactgcattacggtagaaatgaattaccaggacaacccctggtttcctgatgttcttgagggagagaggcaaagcgatcgccgcagactggatgaccagacctatgcatggatatgggatggtgcctatcgtgagaacagcgatgctcaaatccttgccggcaagtaccgcattgaagaattcgaagccgcagaaggctgggatggcccatattacggaattgactggggcttctctcaagacccgactgctggcgttaaatgctgggttcatgaccgcaagctctggattgaatacgaggccgggaaggttggtcttgagaatgatgatatagcctcgttcatgattcagcggatacctggcattgaagagcacgtagttcgcgccgattctgcacgacctgaaaccatcagtcatgtaaaaaataccgggaatggactgagaaaaagccttccacgaatcaccggggtggagaagtggaaaggcagtgttgaggatggcatagcacaccttcgaagctatcaggaaatcataattcacccgcgctgcaccggatggattaatgaggcgaggatgtatagctacaaggtcgacagattaacaggtgatgtgctgacggatattgtcgatgcattcaaccactacattgatgccactcgttatgcgctggcgccaatgattaagcgcaaggggcagatcaacatgaaccctaacctggtgcgacaggcctcttcccgcaatcacttcccacgtcgatga

SEQ ID NO: 271845 - DNA, 1539 bp, Klebsiella pneumoniae
atggcaaattataataaacgccgtcaacgtcggcagggtggcccgcgcaagccgctaaccatttcagcggccatccgagagaaaatcgagaacggggaacttatcccgacattcgaccagataaagttgatgtatggcccggcaaaaacgctgggagcgcctaaagatgcacaactggcaatggaccatcagcttgaagtgtctggtgcttatacgctcttacagcacgctttcgacatgggccagtttccaaacctcggcccgagcttcatgggttatgccgcgctttcatctctgacgcagaacgggttaattcgagcctgcgtcgagacagtcgcagatgacatgactcgcgagtggatcgagattacggccacggactcaaatggcgatggcgacgattcagacgagaagacaatccttgaagaggcgatgattgactatcgcctgcaggcgctctgtcacaaggctgcagagtttgatggctacttcggcggctgccttatctttattgataccggggcatcagatagccaattgcttacgccgctcgatatcagcaataaatcagctgagctgaagaacttcaaacgcttcacgattatcgagccgatcaacgtcttcccgggcacctatgaatcactcaacccgcttagtgctcaatactatgtgcctgacacttggtgggtgctgggtaagcaggttcacaagagccggctgattcgcgtctgtggtaacgaagtcccggtcatcctcaaaccaacctacaactttctcggcatcccccgcgcacagattctctatgactacgtgctgcactttcaggatgcgagaatggctgaggcaaggttgcttgagaagttctccctgaaggtctttaagaccaacatgcaggacatcctgaccaaccctaacgctaccagcggcatcgatgcgcgaattaactacctaactgcctacatgagcaatgatggtgtgtttgcgctcgacaaagagatggaagacttcatcaacgtctccgtcccgctcaatggcgttaccgatatcgtccggcagcaactggagttcatcgttgcgattaaccgcactcccgccgtgaaacttatgggcatttcaccccagggtttcaacaccggcgacgcggatatcaaaaactacaacgaccacattaactcgcagcaggagaaagtgctccgcgaaccgctgcagaagatgctggacatcatccagattgtgaaacttggtacctatgacgaatcggtggccttcaagttcacctccctgaatgaagacgacgagaagtcgattgccgagacgcagttaatcaaggcgcagacccgccagatttacaaagaaagcggcgacgtggattcgtttgaggtgcggaaagctctctctgatgacccgcacagcggcttttacggcatagatgcagaacaggctccggaaggcgacgatggcgaagaagaaacagaaaacggcatcttcaacccgaccgaacgcgggactggaagtggagtacaggaagaagctgcttag

SEQ ID NO: 271846 - DNA, 741 bp, Klebsiella pneumoniae
gtggagtacaggaagaagctgcttagccttatcgacgaaatgtctcgctctgtagactggtggttaagcgccgagtatcgccggaatgaaagtgaaattgttggcgatgcttcaccggccaaagaagtcgggtcgaagctgataagcatcatggctacctggcgagagacattcgacaaaaaggcacaggatatcgccttgtggtttgtccgccgctctaatgcctgggcttccacctccgtaaagaacaaactcaaggcgcaggacatgaccattaacttccgggttactccggaggtgcagaacgtcctcgacagcctctacgagacgcaggttagcctcattaagtccattcctgagcaatacctcacgcaagtgcaaacgatggttcaggaaagcattgtacgcgggcgtgatgttagttatctgaaggatgagctaaaaaagcgatacggaatcactgaacgtcgggcaaaggttatcgcccgcgaccagaacgcaaaagcgacaaactcaatcgctcttgagcgctgcaggcaggccggaatcactcgcgggatatgggttcaccgtgcaggcggtagcaaaacattccgccatgctcacgtgaaaatgaacggcacagagtttgagctcgcaaaaggttgctgggatgaccacgaaaagcaattcgtgcagccaggtcagttaataaactgccggtgcgagtacagaccggttattcctaaaccaggtgaataa

SEQ ID NO: 271847 - DNA, 252 bp, Klebsiella pneumoniae
atgatgctcgccaccaaaatcatcgaacaggcagccacaaatgaagagtccgctctttatctggcatcaatgctaaacatcagcatcgatttcgatgaggatgaaggagttatcagtgtggtgtggtcatctcctgatggcatgctgcaaacagcatcggttgatcatgatttcgagaaagaggacatggcggcgaaaatgtcacttgtcagggcgctgattaccacggcagcgagctacatcattcagtaa

SEQ ID NO: 271848 - DNA, 1467 bp, Klebsiella pneumoniae
atgccagtacaaaaagttaaaggcggctggcgctggggtaatcacggtaaagtctaccccacaaaagaagaagccgaagagcaggaaagagcggcatacgccaacggatataccggcgacagagcgctcgcttttgatgaaggctcccgacgcaggattgacgaaaacggataccttcacgtcacacagacccaccttaccaaagagcaggtagccccatactacgggcgcgagattccgggatgggaagcgttagagcttgaccccgatcgcgtctactacggctaccgctccggcgaagagcttgagaaagccaaagacacatttaacggaatgcctctgctgattatccataagcaggattccgctcactcaccactcaaagagatacgagctggctcgattggcacaacgccagtctggtcgccaccttacctcgacaacgcactatcagtaactgaccagtccgccatcgacagtatcaatgatggcactttgaaggaaatcagttgcggatacttcttcgagccagacttcacgcccggggaattcaacggtattccgtatgactttgttatgcgaaatctccgtggcaaccatgttgctttagttaaagagggccgtgctggcccagatgtgtgtgttcacgacggtatgccgtcacaactcaaaaaggtgcaatcaatgcaacttaccaaaaaacaggcgcttgcaatgggcaatctggccgcatacctcaagccccgccttgcacaggatgccgcgccggcagacctggcaaaactggttacgtcttacaaaaagccagggaatctcgttaaagccgttgttcgccagtatggcaaccagctggcacaggatatggacatcgagccagaagaactggctgagctgatggaagctgctgaagccgttccggaaagcgtcgttgataacgaagcagaaccgatggaccaggaagatgacaccatcttcgacgaagagaacccgctggaaagcatcaaggccattctcggcggcaaagttccggatgacatcctggagaaagtagccgcggtatttgctcgtcctactggtgatgaagacccggaagacaagaaagaagagaaggctgaagaaaaagaagagaaaaaagaggccgcaatggacgccaacacgattatgcagaaggctcgcgtagaggctcagtctcacttccgcagcctgaacgaagctgggcgcgctgtgcgtgaactggtcggcgagctggatgtcatggcgtttgacagcgccgaggacatctacggccacgcgctgaaacagaaaggcgtgaatatcaaaaactacgacaaggccgcatacaaaggcatggtggacatcatggcggctagcaagccagctgcgaacccggcgcccgcttttgatagcgcgtctgctacatctttcgacggtcagtttgctggcctcaaaaacatcaaaatccgataa

SEQ ID NO: 271849 - DNA, 489 bp, Klebsiella pneumoniae
atgggacttcaaaaacaggttggcctgtactactccggtgcggttgagggcgataaagcctctcacaacccggttgtatatctgccgaaaaatccgctggctgaaggtgctgtcactgtcggccgcttcgtgtttcgtggcactgacccggaaacacaggtaaaagcttctggctccgtggttgccggctttgttcagcgcctgatcaactactacaactacaccatcacctccagcggtacgctgaccatcccgaccgaaaccccggtcacggttgcggtgaaaggtgagttctacgcggccatcaaccagtcagcgaccccgacctacggccagaaagcatttgcatctaccacagatggcagcatcgcttacgccaacgccggcgcaactgttgctggtcacgtagagactggctttgtcgtgaaagagattcgcgctgaagacggtctggtgctgatctccaactattcccctgcgctcgcataa

SEQ ID NO: 271850 - DNA, 366 bp, Klebsiella pneumoniae
atgtctggctctattcacgttcgcctgaaacacccacatggactcatctttgacctgaataacgataagaaagtctctctgaaaggttccgacttccatcttcgcggcctggaaaaaggcgtgctcacctgcggattcgggtccaccactgttgatgccgctgaatgggaagaggtgctggcgacatatccatcgctggtagccgacatggttcgaaaaggcacgctcattcatgagaaagatgccgcaagcgctgatgccaacgccagtgagaaaaaaggcgtgaagcacggtcgcgagccggtcgatgtcaaaaatgacaagaccatcaaaactcaggaagttccggccagcgaggcagcataa

SEQ ID NO: 271851 - DNA, 414 bp, Klebsiella pneumoniae
atggcgatcgtcactttcgacagtgacgagttcctttccatttacccgcgattctccggtgttctcgcgccagcgcaattacagaacgcatttgatgtggcctgccttgtgctggataacactgaatcgtctgttgttccctacgaccctacaaatggcatcaatgaccgcaagacattgctctatgcgctcacgtgccatatcgcctctatggcgctctgggggaatggtcaggctggccctgcatcaggagcgacagagggtagtgtgagtgtctcgtttgctgtccctgatgtaacaaacgcctcatggttcaagatgacgccgtgcggtcaattgttctggcaggcgaccaggaaatacgttgttggtggtcgatattacccgcggcgctacgttcacccatggggatga

SEQ ID NO: 271852 - DNA, 324 bp, Klebsiella pneumoniae
atgctcaatggtgtccttgatatcctgagcagcggtcatgccaagaatggtgaaggcgtttctgaaaccatcagcattctgcgcctgccccttcattgcctttgcggcaacatcagcccactcagaggttttgtctgcagccgtattgcgcatgaatggccttgccgggatagttttagtgccgaattcgttagctgcagcatatggcgctataggctcgccggtatcttcattggtcgagccagcaaggatgccaacattcatgcgaatttctgcacccttgagcatgtcagccagcacctggttgattttgtcgccacctga

SEQ ID NO: 271853 - DNA, 366 bp, Klebsiella pneumoniae
atgaacctgcataacctcgtatccggcctcatagctactgtaaacccgttcattgacgtacagatgaaggtctttgtcagtgagtcagaagatgacagcgggaagatggttaaggtttattccgagtctaccgttaacggtcagcttcaggctctgtccaatgacgatctgcgacacgtcgataatctcaacctaaccggcatcgtcaaaaagttctacgtcaacggctccttcaatggcattaaccgccctcggaaaacaggtggcgacttcctgataattggtggtgaaacatggatgatccgccaggtgctggaagagtggccagactggtgctcattcgtaatacaactgcaggtaacctaa

SEQ ID NO: 271854 - DNA, 567 bp, Klebsiella pneumoniae
atggcggcatccatcacgccgctgatggatggtttgtttctgtctctgcgggcattccttaaggctcacctgaccctttcggcctgcaggcaatcgcagcaaaacaacactgagatgccggatggtaattacgtcattatgacgcccatcggcattgacgggctatcaacaaactccatcagctaccagtacacaaccggcgcagattcaggaacagaaacgcataaacgaacggccatctggcgctgtcagctggatttctacggggatgccgctcaggactatgcaaacatcatctttacgctttctcgttccgattatgcctgccagtggtttcgtgatttttcggagagcacatcaagcgctccgccgttaatcacccctctttactgcaaagacccgatacagacaaccatggtgaatggtgaggaccagtgggaaaaccgctggacttgcgacttctacgcccaaatccccgtcgacgtgtcggtaactcagtatttcatgaccagcgcaaacgtccgcgctgattctgtagacgccaaatttcctcctgagagtgcgtaa

SEQ ID NO: 271855 - DNA, 1491 bp, Klebsiella pneumoniae
atggcaattagtttaagtaacatcatcaaaatcaacccgggcgtgctgtcagccacaggctcggcgcttgaccttaatgggttgattctgactgacagcgaatacgcgccaaagggtgcgctcctgtcattcactaattctgacgatgtctccacgtatttcggtagttcatctactgagttctcgatggcggacatttatttccagggattcaataacgccagccagacgccggggcagttgtttttctgtcgctataactcagatgcgatcggcgcgtttctccgctcggccagcctgggagcattgacccttgctgagctgaaattgctaagcggcacgctgacactgaccatcaatggtacatcggtcaccaccgctaatatcagcctgtcctctgttgcgagcttcaccgcggcagcaacgcagattgaagacgccattaatgccgttaactccggcgtgcaggtgactgtcgtatgggataccactaccaaggcatttatcatcaccaccgagactactggtgatgtggcaacgctgacatttgcctcaggtacgctggctccgagccttctgttaacctccgccactggcgcaaccctttcacagggcgctgatgctgatgttgtcagcgaactgatgacctcggttactgctctaacgcaggactgggctcagttcaccacgacctttgtgcctactgctgaccaggtgactgcattcgcgtcatgggtaagcggcgaagcttaccggtatgtgttcgtgttgctggatgactccaattactgcctgcagtcaggtagcacacagacactgttctacccggttaaaactgcaaattatgccggcgtgttccctgtatacggtgatgtcagtaaaaccgcctctgctcttgggtacggcgcaagcctgaactttaatcagcagaatggccgtctgccgatcgccttccgggtgctgaatggcctgctggctgacgtaaccaccaactctgattactctgcgctgattaccaacggctacagcttctacggcacgtatggcgcgaataactacacgcagaacatgtggtacaacggcgctatctcaggcgattacaaatggctggatgctcagttaggccagatttggcttaacgcaaacctccagaaagccattctgacgctgtttacgtccaacacgtacatcccatacaacgcgcaaggtaaggcgctcattgaaggctgcatgacagccacaattgagcaattcaagacttggggtggctgctcggtagggacagacctggatgcgtcgcagattctggcaatcaaaaacattgtcggctctgacatcagctcctctctgacctctgccggctactacatctacgtcgcgccgttcaacgcagcaatgcgcgctaaccgaactacgccaaccgtgtacctctggtattgcgatggcggcgtcattcagaaacttactgtgaattcagttgaggtgcaataa

SEQ ID NO: 271856 - DNA, 441 bp, Klebsiella pneumoniae
atggctaattcattaacttctgctgactgcacaatcattctgacggtcaccaacctgtataccagtggatttaacctggagcagttcgaagcgcagaacatctttgaaatgggtgatacggaaattgctgaaactatccgtaccgctgataacaagcttactggcggctatgtcaatggcgacttgccatggacgtttcacatcctgcctgactcaccaagtagaaattatattgatacctggtttcaaacccagaggacggcaaaggcgctattccgctgtaatgggacgatttaccttccttcgctcggtaaaaagtacacgatgactaatggaattttcaaaagctggaaagccattccctccgccggccgcattcttcagccaatggccggcctgattgagtgggaaaacatcgtcggctccgattacgccgcataa

SEQ ID NO: 271857 - DNA, 549 bp, Klebsiella pneumoniae
atgaccaaattacagacaactaacgaatttgattttcgccatcttgttactgcagcaaatggcgagccggtgacagatacattccagattgcgaaggcgtttggcaaacgtcatcagcatgtaatcagggcgattaaaaacctcaaatgctcacgggaattctcgacggcccatttttgggctgccgagaaaatcaatgacttaggtatttttgataagacgcaaacctattacaggatggattttagtgggtttgtcatgctggttatggggttcactggcgagaaggccgatgctgttaaagaagcctatatcaacgcatttaactggatgacagccgaactacgcaggtacagcgagagctacgaggcagagcgcaacgccgtaatgctggagtacatgaaagagaaggatgttgccagcatctcaggccgcctgctgcgtcgatggggaaaagagaagaggccgcagttgctttcccgtatcgaaaagctcgaccagcaaggccagattgctttgcccggattcgttaatgcgatcgcaaagtaa

SEQ ID NO: 271858 - DNA, 459 bp, Klebsiella pneumoniae
atgagccgcaagcatattgatttcaccattgatgcgaacaatcgcgacaaagggaagaccttccgcattactgaaatgtcagccactgatgcagagatgtgggcaacagacctcgcattcgccctgattggcagcggcgttgatgtgccgaataatgttaccaacttcctcgctaaagcgtcatctgacactgaaagcgaagaaattcgcgactcgattatggcatccggcatgattggcctggcgaagtatggcatcaccgctctatccaaggttgaccgcgacgagcgagtgcggctgtcgaatgagctcatgcgatgcgtgcagtttgtggccgcaccaaatgcagttatcccactgtcaccggaaatccacatcgaagaaccaagcacactattccgcctcaaggtcgaagctctgaaacttcacctgtctttcttgaacgccatcgcagactag

SEQ ID NO: 271859 - DNA, 1941 bp, Klebsiella pneumoniae
atggctcaagtaattgacgcgctgcttatcacctttggtatcgacaccagagagtttgataaggcccggcagaaaatcgacgacgggacgaaaaatcttcgcgagacatcaaagaaaaacgccgattacatggaatcccagggcaagcgagccgctgggttcttctcaagcataaagaacgagatgctggcgctggccggcgtaagtctgacgtttggtggaacgttaaagttcgtcgatggcatgacgcatagcttgcaggcgctttcgaaccaatcggcggtacttagggcatcggccagagagcttgatggctggggccgcgcggcagaggctgctggttctagtgcgcaagctatgctcggctcattatcaagcataaatgataaattaatgtctggtcgccagggtcggcccgacgctgggtttgtcaattccctgcaaatgctttctcaagatacagggatttactttgatacatataatccaaacctgacgtcgcaagatatagcgaagcaaattcttcttgcaatacaaaaagaccctaataaggaaagggcgagattagccggcaggcaggctggtttttctgatgaagttataaacagcgccatggctggtaagtttttgcctaatgtggacaggtttaccgccggatcaggaattagcgacaataacatacgggccgcaaaagagttcaatgagcaatggaccgtgctcgcccagaactttgatacgctgaaaaacaagctgtttaatgggttaatacccgttatccagcaggtgaatacgtcactaactgacctgtcacaaaatcgagggccaatatctgatttctttggtgagctgagcaaagacatcaaagggatcaccggcatagacctcgggaagtggtcgttaaagcaggaattagatagcttaatggagagctttaaggagctttccaacatgttcacccatctcggcaatgcgctgaacgcactgaataacggtgaattcagcaaggcagccgatgagtttaaaaaagcctggtacggaacggagaatggcaaggaaaacgggaaggattacctgccaggggtaacaaaatctgcagagcagaactctctcatcatcggcggtaaaaccatagccgggtggatgacagaagcctatgaaaaaattgcaggcaaaaaagcgccagaggaaaggaagcacgatcaggatgagaaatcatactgggacaccaccaaagagtatctcgggaagatttcagattattttgttgctgaagctggcgctgcggagagaagccctagcattgatggatatcagcctaatgtaccgctgaatgctacggcggccaagcttggtccaaagggtaaagcgctgcttaatgcgatgtctggcgagttcgggatgctggaagggaaatatggactccctgcaggcttgcttcgcggcgtggctgcgacagaatctggtggcgatccgtatgcagtatctaaggctggggcaaagggtttgtttcagtttatgcctggcaccgccaaagatatgggactgaatggcagcgatgtctatgacccaaaaaaatcagcagaagcagcggcaaaatatctgcactacctgattatggcaaccggggatacgcaatcagcgcttcaggcttacaattgggggcttggcaatctgcagaaaaaaggcatgcagaacgcaccaaaagaaacccaggaatattatgcgaaggttgttgccaacatgaaggcaggggctgggatggctgcagatagcgtcgcaccttatcgaatgccttctcagggcggtcagagcttccatattcagcaaatgcaggttgtgactccggcctcatctgttggcaaactgtctcaggacatgagtaaatcggcccaaaacagagccacgttaattggatatgacagcggccagtcaggaggctaa

SEQ ID NO: 271860 - DNA, 837 bp, Klebsiella pneumoniae
atgttctcactgaacgaaacaaccctgctgtcagccataaactctggcagcattttttccatcatcaactcaacgctatttccctcatggggcatcacctataacaaagtcgatgaaacgctaactggagttatcccggggatgaccgtatttgagcccacaggatgggtttctgcggagccggtaggtgatgctgccattgttaacgccccgatagaaaaaggctcttacacttcgtataacaaggtccggcggccggctgagttgcgagtggtttttgttctggaaggctggagtgcttacacgggagcgctgccaaacatcacgaacttctctaccctcagcagaaccggattgcttggcattctggatacgatgaaaaatacggcttgtacgtatgacatcgagaccccggatcgcgtttatgaaggttacgatctagcgcactacgactactcgataagcgccagaggtggattaacccttctgaaagttagtgcaactttccagcaggtaatggatatcgccgaggtatctttatcgagcaacactacaccaaacgctccatctgataacaattcagcaagcgtaaattctgcgattttgacgactaacggacaatcctcagtcaaagatgtaactctgacagatgttaagaatgcctggactagcgggaatgtatcgctttcaagtgccttgcaaacaacctcaagcgctatcgtatctggtgttaattcagctgcggatacggttggtaatgcatggacatcgggaactgaccaggtatcaacgcaaataaaaaacggaatcggtaaattcgtttcggtggtgacgtga

SEQ ID NO: 271861 - DNA, 306 bp, Klebsiella pneumoniae
atgcaggaaattacactcaacgcgataaagtcccagcgagttacggtatctctcaataacacctcctacacgataaggatccatcagcggtctactggcttattccttgacctctatctcggagacaatgccatagcgcagggggtgttatgtctgaactgcaactggattgtcagatacgcatatttagacttcccgggcgacctcgtttttgttgacacgaagggtacagcagacccttattgggatgagttgggtagccgttttaagctttacttcctcacatcttcagagatttcgtcgtga

SEQ ID NO: 271862 - DNA, 858 bp, Klebsiella pneumoniae
gtgacctataaaatcagaaaactgaaacttcaatttacgcttggagagggggagttcgaacagggaaagggaaatgttctcaccatggaaaacatgaagtgtgacctttccatatcggcttatggaggaaccgctgccacaagtatggagctgagcttatgggggctttctcttgattatatggccaagataagcggaaagtctcagaggcagaatcagaacaacaaaaacttcgttcgcgtttatgctgaaggggaactggtttttgatggcgtcatcaatagcgcaagaatcaatatgaaccaagcccctgatgccgctctggagattagtgcaaacgtcgcaacttttatcagagcgattcccttggctccaacctctataaagggacctgttaaagctcaggatctcgtttcctccatatgcaaacaagttgggttcaagttcgctaactatggtgtcgacattgccatgaacggcgctaactacagcggaaatgccgtagagcaaatcattaaaatatcgaaagattacaacttcagcgtagatgttaacttcgagacaatctccatttttcttgatggagtagccagggataacatcatcccctatgtggctccagatgccggacttattggttacccaattttttatgatgtaggcatatgctttagggcgatgttctcgccggcctttatagttggcaggttcctcaaccttaataccatcctcccaaatgcatatgggatgtatcagatcaaggaaggaacaacgcactatctttcttcaaatgttgatggaggactttgggaaacgtacattgtcgcatttcccgttgggccggggcaggagggatag

SEQ ID NO: 271863 - DNA, 672 bp, Klebsiella pneumoniae
atggaggactttgggaaacgtacattgtcgcatttcccgttgggccggggcaggagggatagattgaataagaaaagaacaataagccctgtcgatatgagctgtcagggaaacatgatggaatacgtcatcagcaaaatgatctcaggtatgtcatttatttcgatagtcagggtcatcgagattaatgaggacggcacgctagatctggagcacatgctgcatgaaactagcgctaacggggaaagtcttaacgatggtggtaagttctataacatcccatttctccggctccagcgtggaagtagtgccgttatcatggatccagtagttggcgacatagggcttatggcagtttgtgacagagataccacccttgttcgaaaaaataaatcgccatcgatacctggaagctcacggtttcacaactatgctgatggtgtttacttgacatccatctcgacacttaatgagcaaccaacacaattcattaaatttaatgaagatggcatcacagttaacgctcccttagggttgcatgttgtcggtaatgtaacaactgaaggttcaataacagcatcaggggatgttgttggaggaggtatttctcttgataaccacattcatggtggggtagcatcaggaggttcaaccacctcgggtccgcaatga

SEQ ID NO: 271864 - DNA, 975 bp, Klebsiella pneumoniae
atgacagagaagaagaagcccaacgggaaggctaatggcggcattgcgcgcgcaaaatccctttctaaagagcagcgatctgaaatagcaaagaaggcggcggctgcaagatgggagggaaggccatacaaggcaacccataagggtaatttcatggatgagtttggcattgatgctgagtgctacgtcctgaatgatgctgataagacggtggttgtttctaaagcaggtctatcccggctactaagccttggtgatcatggggtgcacgtagaccggttgcttagtgcgcaatacatggctgattacgtagatccaattttactggaaaaaatgcaaaaaccccttatttttcaatggaagcccgatggtacaaatttgggttttactggggctcaggggtatgacataaccgtaattggagacattgctagcgctatcattaaggcaaacatcgccgggtctctaccaaaatcaaagcgggaagcagcaaaacaggctcaagcattagctaatgcttcaatgaaggctgggctgaaaggtctagcatatgctattgcaggatatcgccccgaagttcaggaagtcattgatgctttcaaggcgttcgtgcgggaagaggctaggcagtatgaaaaagaattcccagatgagctgtatgaagagtggtatcgtctatacggcctgagtcgccctgaaaaaggccgccccatcagatttggtcaattaacgaacatgcagatttatactcctttagccaaaagcaaaggaagaatactagagcagattcgtgccagtcgtgatgaaaatggcagacagtcggataagcttcatcttttcctttctgaaattggtgtgaaagctttgcgtcagcacattggtaagctcctgggtgttgctgccatgagtgagaccaaggaagagtacgagaaagggatagagaaagtctttggtaaaatgaagccagaattataa

SEQ ID NO: 271865 - DNA, 1233 bp, Klebsiella pneumoniae
atgtccacaacaataaccacctcggtgccatcagtcacattttcaactaccggactggatgtccctgatgaggctgatatcctcgccggccggctgacagacctttccactgctctcggtacgtcgatgagcaaagaacttaccacgccgcagggtcagattgctgtcgccgacaccgctatcattgcggataaaaacgaccagtgcctcgccatcatgaacatggtcaacccggattactcaaccggcaggtggcaggatgctatcgggcgcatttacttcattgaccgcaaaggcgcttcaggaacgattgtgacggcgacttgctctggtcttgtaggtacgctcattcctgccggatccatagctcaggatgcgaatggatacctctatttctcgttatctgatgccaccatcggctctgatggttcggcatctgttgaatttcagaatcagaccactggtccgatcgcctgcccaatcggtgagttaaacacgatttacaaggcggtatctggatggtcaaccattaccaacgttgctgcaggagttctcgggtcagatgaggaggggcgtgcagcatttgagtatcgtcgcaggcagtcagttgctaagaatgccagcaacacgcttgcagcaatttatgcggccattcttgaggttgacggcgtcactgatgcttacgtcaccgataataagaccagcaccgctgtagagaaaggcgtaacaaattacagcatagcgccacactcgttttatgcggctgtatatggtggttcggacgcggatattgccaaggcgatctggagcgccgcccctcctggtgtcgatatgaatggtgacacttcttacaccgttcaggacacggaaaactacgtttatccctatccgtcgtatgacatcagatgggaaactccaacgccgacaagcatgtatgtcgaggttcagattgtgcaaagcaacctgctgccgagtgacgttacaaaccagattaaggccgccatccagaaggcatttaatggtgaggacggcggaacccgggcgcgcatagggtctaaagtttttgccggccgttattactctggcatccaggcaattgaccctaataacatggaaattctcggtatcacgctatccctggacggtatttcttatggcccatccgtggagtttggcatagatgaaattccgactctggatgatgtaaatattctggtgattatctcaagctaa

SEQ ID NO: 271866 - DNA, 552 bp, Klebsiella pneumoniae
atgaatacctgggtctgcgttgcctccgggccatcgctgacgcgcgaagactgcatccttgtcgaagagtcacaactccccgttatagcagttaactccagttgggaaatgatacccggttgtcagtacgtctatgccggcgatcatacctggtgggctgcgaactttaacgatgtgcctgccgacaagtgcagatttaccagcgttcatgccacggccactcaattctccatcaactacttcgagccacctgtcaggggttccttcaactcagggcagagagccattcttctcgcaaagcatctgggtgcgaaacggataatccttctcggttacgactgctctctaaaggccggcattcactggcatgggaagcatggaagagggttgcgtaatcctgatgcggatagccttaagcgctggcatggagagtttcgtcaggttctgcctgttgtaggcgagggaaacatcatcaactgctcaaggcataccgaactggatatgtttcaggttggaaatttagaagaagaactatgcaaaagttttttatag

SEQ ID NO: 271867 - DNA, 888 bp, Klebsiella pneumoniae
atgcaaaagttttttatagacgggatgctcggcattggtgacaacatcatgcagcggccatttgtcaaaaagatggtcgagaaagggaatgaggtctggattaaaacggccacccctgaaatctacatcgacatacccgggcttcatttcgtcaaatcaggcacatcactgcgaacacagcatcgcaacgaagaagcatctggagttgcgtgggaagcgcttcctgaagatcacctgattatccggaagaaaatattctacggcactgttgagctgagtcgagggagtgtttttgacgccggcagacggcagtttggcatcgagccaaccagattagacctgccatcatttacgcttcctgatatcggcattccgaccaataagaaggtagccctcatcaggccaaccacagagcgtcgagaatggcacaacgcggccagaggcccgttaaacggacatgttgaccaggtatccagatatcttgcccagctcggttatttctgtatcagcgtagcggatttacagccgggcgttgagtggatccccgataacgagccatttgctcacctgaagctccatggcggccagttgaagttaaccgaattaatggccctggtagaacgctccaatgttgttgtgacgggcagtgggctgatttcacagatggcttttgcatatcgcaggcacaccatttttctcggtggtggctgtggcggttgcaatcaccacacaaaaataactgacggccggcttatggatttatcccgttgcctgttcctttatcccgacgattactgcatgtgccagcagatgaagcacaactgcaacaagcacatttccgacctccctgaaaagctgtcccggtggatgcatgagaaaaatctctga

SEQ ID NO: 271868 - DNA, 612 bp, Klebsiella pneumoniae
atgagaaaaatctctgaaattattcagtcagaacttagcttctttcctgagctggggttcggatacttccctgtgccgaaaaatcgtccttatgacgagcggtactttgagaaatacaaagtaatggccgacacggaaatgggccgtcagttgacagacttcagggtgaactttgtccgtaagcatcaccagggcgatgtgtgcgacgttggcattggctgcggccagtttgttgaggcatgtgactgcagcggctttgatgttaaccaggccggcattgactggcttaaggctgaaggcagatatctggatttctacaaacaaggatgcgaagcgctgacgttctgggatgtgcttgagcatattgatgagccagacaaggcgatcgcctgcgccaataaatgggttttcgtctccataccagtcttcgacagtgcagaacacatcctcagaagccggcacttccgcaaggatgagcacatcttctattttaccaatgacggtctgatccgctggtttagggataacggctttgtgctcgccgaatcggtcaacacagaatcagaaataggccgcgatggcataacaacgtatgcattcagacgggagtaa

SEQ ID NO: 271869 - DNA, 600 bp, Klebsiella pneumoniae
atggaaagttacgctgctgcgataatgaggcagtacgtcaattcagaaaagctcctttccctcatcgaaacattcaaccagtccgtaggccctgacaaatttatcgaagacttctatgacctggtctggaacatacaaacagctaccacttatggcctgaatgtgtgggggaaaattgtcgtaatagacagaacgctgaccgtaactgaaaacaaagtctatctcggtttcaagcaggcccttagccaccctccggtagtagatgatccacagccattcaatcaggctccgttttacgtcagggactcgaacgttacttcaaccgtgacgttaaccgatgacgcctaccgaaaactcattatgtgtaaggcgatggcaaacatctctaactgcacaatcccggcaatgaacagaatgctgatgttcatgtttggtgaaagcggcgtctgctatgtgagaaacgatggcgatatgaccatgagctacgtgtttgagtttgagctcagcacggtagagctggcgattgttcagagctcaggtgccttgcctgcgccggcgggagttaccgtaaacattatacaggtatccagttcatcatga

SEQ ID NO: 271870 - DNA, 1299 bp, Klebsiella pneumoniae
atgaattcttctgatattccagatcgctataccaaagcgttcagcgttaatggcaataaaaactccatcccaacagactcatcaactacaacgcttgggaatggcgaagccacttttgattctggttttcctccgttaaccatgacggccatcagtgccggtggcattcctcccgacgggaaggacatgaacggcatcctgtattcggtcaccatcaagcagcagtggaatgatgccggcatgggatacccgttcaacagcacattcgctgcagccatttcaggttatccaaagggatcaattctgccgtccagcgattatggcgttctgtggttgaatcagaccaacgcgaataccacaaaccctgaaggcacgactggttcatctaccgggtggatcccagcatggggatgtggctcagccgccgtcagcattagctctgccaacgtcacggtctcaaatatctctgcagcaaatccacgcttgattctttccggcacgctgactggtaaccgttacctctaccttccgccatttgtgaaggactggacgattgagaacaactgcactggctcaaatttttacgtggtcatttctacgactgccagcggcgggacaacggtcatctcaaaacccggaacggtaatcggcgtgcatggtgatggcaccaatatcacatcactccaggatgtacacggaaaggctgttttcgcttcaaatggcacattctcattcaccgctccggcaggcgtaactttagtgaaagctacagtcactggcgcaggtggctcaggaagcggatgccaggcgtcgtcggccagcgaatctttcagcggcggtggcggtggcgctggagggactgccataggatgggtttctgtcgtaccgggagtgacttattcagttgttgttgggcgtggcggattgtcagtttctggcgcaatacctgggaatgatggcggcgattcatcatttgccggcctgctgtttgggcgaggcgggaaaggggccagtaaggccagcattaccaactcggctggcggtgatggcggtttagcttcaggtggcgacatcaacatcaagggcggaacagggctggacggacaatcaggtggttacatgctgaccggtgccggcggggcttcttactggggcggcggcggacgaaatggcgcggcaggtggcatcgctggaacatcaagtgggtctggaggcggtggcgcttatgacactggtttcagcagcactgcgtactcgtccggcggaggagcaaacggtatcgtcctgatcgaatactaa

SEQ ID NO: 271871 - DNA, 2142 bp, Klebsiella pneumoniae
atggcaaacacagatactgccaatgcgaagcaatatgcaacgctggcccaagtagcagctgcgcaggcaaaaatttatgctgatcagtctcaagatgcttctggttttgccgcgtctgctcaagagtcagctgaacagtcggcaactgcggcttcaagtgcctcagaggctgccaattcagcatcaatagcagcttccacagcgtcagtaagtgcaacagaagctgcaaatagtgcaacatcagcagagtcttctgcaatcagcgccgccgaatttggtgataacaaaaacacgttccagagtacttctgcaggtcttgcggcaacaacaaacgggcaatatttcagagtaagccaaggcgctggctcggttatagctttcaaatattaccaaaaccaatctggcgttgcggtagaggttgctgatattcccggccagggatcggtaactaacaacatcagagagtattcaacgttatctgcagcgcaaagtgatgttgcggctggaaatattttaaatggcgcaaaatgccgcgttctaagcacatcagatctaaatatttccgaggaatatgtaaatacgtcagggacgcttgttgctacaggcgtaaaaacaccatctcaaaaagcgattgataatctcaataacactatttataaaaacaacgaaagctatgtccttgttataaccgacaatgacaacaatgtgcgtgctgagatagactctggtggttttattgagactgatggagtaacgcttaagaatggtgagataagtagcggcgatctgtctgtatatgtcgacggaaatgtttctggtattttatgcgttgatgaagatggaaacgtactattcgattcttcagatattaaaacctcaggtggtggtagcgaccctggagaggttactgtcaaccttccgccacaaactgctgcatacaatgttctttctaaactaagggcggcacaggatgatgtatgcattattataaatagcgactctactggcattgatcatgatactgacccatcaacaggtgttttattttacaaatggacaaggaagcttgctaatttcttagcctcaaattatccagcatatactgttaattattatacctggtcaggaactgcatactcagctgccacacagatacaggtgggaacttcaggtaaaacattatatttttacaatgctgccgtggcaggtactcagcctttataccttatgggtaattacttccaaacagcttacgtaccaagacaggctgatttaattatcctaaatcacgggcataacactgacagtaacgcattagtttccacccaaatgggaatggatttggctgtaatgtttgcaatgctggagtggcatcccgcagcgggaggcatgatagtttctcagaacccactgcgagacactgaagatggcacgaaaagaagtgatggggcaaggcaggcggctacagcggctggatttagccttattgatgcttttcagctcttccaaaatgcaggaaaaccaagtggatggtatatggataacatccacccaaatgatgtcggcgattcacaaattttcgaaatagttaaagatctatttgtatggcccgcagccccggcctttaaattgcaggggtttgttaattcaggaaacctgctaaagaatggcgatttttctacatggacagacaccagccagcctcctgataattggtctgtgactggctgcacggcttcaaaagatacgacaaatttcgagaccggctcatgggggatgttattaacacaaacagggacaattgaaacatatgcaagccagaccctttcctctgatttagtaaaaagactaaaagggaaaaccgttgctctatcctgccgggtatttatacctacaacttctaccagaagtaactgtggtcaggttcaaatacctgaggtaacaaacacaagaacctatggtagctcatctggaggccgtggtggctttgtatggaaaacaacactcgtaacaataccggcgactgcgacaagtatttccgttagggccgttcttgatactgcgggtggagttgctggtaactggtgtacatttgacagaatgattcttactgctggatttattccgcaagattcatattaa

SEQ ID NO: 271872 - DNA, 759 bp, Klebsiella pneumoniae
atgggtacagtaataaaatcaccagcatcgggcggctgggcaacgacttctcggatagaagttcctttttctgctgcctgggaggggtatttttcttttggcgtagatgcaaaaacatccattagaaatcttatttctggtaagactgcgctgtctgttgttggatctcctacatatggaagcacttacgtagacttaaccggtgcacaaaccgcatattttgttacgggaacaccaaacactacagacatgacaattatggcaattgcaatgcctcttgaggagaaagggattgcggttgcctcaaactaccagtcaaccagatctgacgcaacaggactttgcattgggacaagtcttgcatttgatgttggcacaaactcgtctgatgggaacgttatcacgcgttttaaccatgcagttctggttagtggagtttcaacaggcgcagcagcggaaacttccgtcgccagtccgattaaccaatggtacctgattgccggcagatgccagaactcagcaagggttcggaatgtctataatcttaccgcaggaactaccggcacaaacacgccagcccttaacccagttgacataggcggggcaatgcggattggatctgcatacaacagccaattcccagggaaggttaggatttgtgaattggctatattcagcgaagcgctttcggatgcaaatctctctacgctaacccaatttatgaggcagagagcactcaccaagggactaacagtttaa

SEQ ID NO: 271873 - DNA, 774 bp, Klebsiella pneumoniae
gtggaaaaagcgataattccgacggaaaagaagccctatcaggagattggtgatgacctgcgcgcccagatcgcgcaggggcgctacccggtcgggtcgcgtttgccgccggaacgccatattgccgaaacctatggcgtcagccggaccattgtgcgcgaagcgctgctgatgctggagctgcaggggacggtggatatccgtcagggatccggcgtgtacgtcatgcgtatcccgcatgaaaacgacagcgaagaagagcagttgctcagcagcgacgtcggtccgtttgaaattctccaggcgcgccagctgctggagagcaatatcgccgcctttgccgcgaaaatggccacccgcgccgatatcgacaatctgaagcggattatcgagcaggagcagcgggctatcgccctcaacgacatcgcccaggataacgcccgcctgttccatctggtgctggccggggcgacgcagaaccagatgctgttggcgacggtggagcggatctggctgcagatggacagcagcccgctgtggcagcagttcaatgtgcatattgccagccgcgcctggcggctgaagtggctcggcgaccggcagacgctgctcgccgcgctgcggcgtcgcgatgtgatgggcgcctggcaggcgatgtggcagcatctggaaaacgtcaaaaacagtctgctggagctgtccgatgaagacgccccggactttgacggctatctgttcgattcggtgccgatttttcaggggaagctggtatga

SEQ ID NO: 271874 - DNA, 144 bp, Klebsiella pneumoniae
atgaaacgcatgcaaaattatccgctactgggtattgccctggtgataggccttatttttatcgtcatgccgctaaccctggatcttttccgtttaaacctgatcggtaaatacctgacttatgcatttgttgggctttgttga

SEQ ID NO: 271875 - DNA, 621 bp, Klebsiella pneumoniae
gtggcaaagcaaaagttcaaaatcaccaactggcccacctacaataaagccctcatcaaccgtggctccataactttctggctggatgatgaagctattcaggcctggtatgagtcagcaacaccttcttcacgaggcagacctcagcgctattctgaccttgccatcacgactgtgctggtcattaaacgcgtattcaggctgaccctgcgcgctgcgcagggttttattgattccatttttacactgatgaatgttccgttgcgctgcccggattacaccagtgtcagcaagcgcgcaaagtcggttaatgtcagtttcaaaacgttcacccgaggtgaaatcgcgcatctggtgattgattccaccgggctgaaggtctttggtgaaggcgaatggaaagtcaaaaaacacggcaaagaacgccgtcgtatatggcgaaagttgcatctggcagttgacagcaacacacatgaaatcatctgtgcagacctgtcgctgaacaatgtgacgaactgcggcgtaagaaaatcagcgcgcttatcccaccccgaaaaggtgcgggttactggcccggtgaatatgcagaccgtaaccgtgcagtggctaatcagcgaatga

SEQ ID NO: 271876 - DNA, 153 bp, Klebsiella pneumoniae
atgcctgaaatacgtcagcgtattctggagaatatgcaaaaattctcccgggccatgatcggcgccgtattgttcttgccggtcattggcttaattctggccctcagttcagtattaactaatccgacattggtaatgactccaacttattga

SEQ ID NO: 271877 - DNA, 672 bp, Klebsiella pneumoniae
atgctgccagccaacaccgccccgaccaacagcagcctcatcaccgtcccgacgccgctctattatggcctcggcatcgactggagtctgctgctgcccctgatgctggtgtttatgatcacctccctggaaaccatcggcgatatcaccgccacctccgacgtctccgaacagccggtctcgggtccgctgtatatgaagcgcctgaaaggcggcgtgctggctaacggcctgaactccttcgtttccgcggtcttcaacaccttcccgaactcctgcttcggccagaacaacggcgtgatccagctgaccggggtcgccagccgctacgtcggctttgtggtcgccctgatgctgatcgtcctcggcctgttcccggcggtgagcggctttgtccagcatatccctgagccagtgctcggcggcgccacgctggtgatgttcggcaccatcgccgcgtccggcgtgcgcatcgtctcccgtgaaccgctgaaccgtcgggcgatcctgattatcgctctgtcgctggcggtaggcctcggcgtgtcgcagcagccgctgatcctgcagttcgccccggactggctgaaaaacctgctttcctccgggattgccgccggcggtatcacggcgattgttctgaatttaattttcccgccagaaaaggcgtga

SEQ ID NO: 271878 - DNA, 510 bp, Klebsiella pneumoniae
atggcgctgaccgtggcggctgaacgctatccgcgatacggatataaaaggttttttcaggtccttcgcaggcagggcaacgcctggaaccataagcgcgttcaccggatttacttcctgctgaaactgaattttcgccgtaagggaaaacagcacctgccggtgcgcaatccggctccgctggcaacgccagaggcgatgaaccagagctggtccatcgattttatgcacgatgcgctggtgtgcggcagacgtttcagaaccttcaacgtggtggatggttataaccgggaagcgctggcgatcgaaattgacctgaatatcccggcgcagcgggttgtcagagtgctgggcaggatcgtggcaaaccgcggatatccgctgaagatgcggatggataacggtccggagctggtcttgctgacgctggcacaatgggcagaagagcatggtgtgatgctggaatttctcaggcccggcaagccaacacagaatgcctttatcgaatga

SEQ ID NO: 271879 - DNA, 351 bp, Klebsiella pneumoniae; identical to SEQ ID NO: 222423

SEQ ID NO: 271880 - DNA, 351 bp, Klebsiella pneumoniae; identical to SEQ ID NO: 216531

SEQ ID NO: 271881 - DNA, 351 bp, Klebsiella pneumoniae
gtgaaaaaagagatctcccgcaacccctctttcacaccttcgcctaagctgcgagcacatctgaactcccaccgggaaggggtgactgaacggctgaataatatctttgatcgctatgcgcatctggttcgcgcctgtgcccttcctctcgatgacgacgaaacacaggttctgcttaatgtgctgaatggctccgttgtcgaacccgcctttattgaatatctggctcaggaaattcgggactcggatgattatctggaagggatacccgcagctaaatcactgtacgaaaagtgtcagtcagcgacctatccgcaattgctggccaccgtcgaacgtctggaacgataa

SEQ ID NO: 271882 - DNA, 279 bp, Klebsiella pneumoniae
atgaagtatgtgaatctgggtcgtagcgggttgaaagtctcccgtctttgtctcggttgtatgagttatggcgaacctgaacgtttgcctcaaccctggtccctggatgaaaaggcgtcacgaccgctcattcgtcaggcgcttgaagccggcattaatttttttgataccgcgaatacctactcggacggtagttcagaagaaattacaggaaaagcgctgagagagatggccagacgcgacgagatcgttgtagcgacaaagaccttctttccgtag

SEQ ID NO: 271883 - DNA, 942 bp, Klebsiella pneumoniae
atgacgatgcggcgtgtgaaattagtttgttctgcgctgatgctgctcgccagccacggcgcgctggccgtcagctatccgctgccgccggaggggagccgtttggtgggcagcgcatttaccattgccgttccggacaataacacccagccgctggaaagttttgccgcccagtacggccaggggttaagcaatatgctggaagccaaccccggggtcgatgtctatttgccacgctccggttcgacgctgactattccgcaacagctgatcctgccagacaccgtgcgcgaagggatcgtgatcaacgttgccgaaatgcgtctctattattacccgccgctgggcaatagcgtcgaagtcctgccaatcggcattggtcaggcgggacgcgaaacgccgcgtaactgggtgacggcagtagagcgtaagcaggaaggccccacctgggtgccaaccgccaatacccgccgcgagtatgcgaaagagggcaaaacgctgccggcgatggtgccccccgggcccgataatccgatggggctgtatgcgatctacatcggcaggctctacgccatccacggcaccaatgccaactttggtatcgggctgcgcgtcagccagggatgcatccgcctgcgcaatgacgatattaaattcctgtttgataacgtgtcggttgggacgcgggttcagctgatcgatcagccggtgaagtacagcgtggagccggacggcagtcactggctggaggtgcacgagccgctgtcgcgcaaccgcgcggagtttgaatccgacagaaaagtccccttgccgatgacctcggcgctgcgcgactttacccaggggccgggagtgagccctgcccaggtcgagcagaccctgcagcgccgctccggcatgccggtgaatatcagcgccacagcggcgcagggaagtttgtag

SEQ ID NO: 271884 - DNA, 348 bp, Klebsiella pneumoniae
atgcgggttgagctcaattttgcgccgcaggcgcatgatcagcacatcgatggtccggtcgaatacctcggtgctttcattatgagtcagcgccagcagctgttcgcgattcaatacccggcgcgcgttctgcgccagcgccagcagcaggccatattctccctgggtcagcgggatcgcctgctgctgcgggttatacagttcacagcgcgtggtatccagccgccagccgttaaacgtcaggccagcaccggcgcccgacgcctcgccggccagcgccccactgcgtcgcagtacgctttcacccgggcgaccaccacccgcgagctgaacggtttggcgatgtaa

SEQ ID NO: 271885 - DNA, 357 bp, Klebsiella pneumoniae; identical to SEQ ID NO: 120046

SEQ ID NO: 271886 - DNA, 183 bp, Klebsiella pneumoniae
atgatgagtgaacctcgttgcattgctcaactactgcgtagagaaagccctaaccagattaacttcaccatcactcacggtcggggacgtaaaggcatcattatccgtacccgtaggtctggcattttggccgtcttagtcaagcgcattatcaaaatgagaagggtatccaaatggctgtga

SEQ ID NO: 271887 - DNA, 1797 bp, Klebsiella pneumoniae
atgcaaaatcatcttaacatccgtggcgaacctatacagagcgtatattccgaataccgaaaaggaaaatacattgttaataggagatatcaacgtaaattagtatggtctttaccagagaaacaaagatttatagactcattgattaaacaatatcccgttcctttatttttgggtgtagtgtttcagcacaaagaaaaaggttcatgttttgaaatacttgacggcatgcaacggttagaagcaattacttcttttattgatgggaaatttagtgtcgatgggaagttttttgatctatcagttgttgcagaaactaaccaactattaattaacaaagaattaattcaaaacgaacctaaactcgagtttgactcctgtaaagcattgcttaattatttattaccaatatcgacatcttcatatacatcaaatgagcatgtagatgaaacattcagaagaataaatactggcggcgtaagattatcaacacaggaagtaagacaagcaggcaaaacttgtgacttctcccagttagtccggaaatgctctatatatataagaggtgatgtatcacatacagatattgttgaattggggaaaatgagagcaatcagtttaacaaaaaacgaatctgattacggtataaaaatcagcgatactttttggaataaaaatcatattgtcactacagccaatgttttagcgtcacgtgatgaagaattggttgcgcacattctactgtctattttactaggaggtaaaagtcaaaccgcatcaaatttcctgaatgatgcatatcttgaaggtgcccctaccaatgtaaaagctaatgattcaatagctaagcacggaatagataccctatataaacagttttgctttgtatatgatgagataaagaaaacaataaacgaattcccttgcatttactccaagcatctatataagagcaagcctgtaggtgtttcagattcttttcaggtagttttccttgctttttatgaaaagatgtttaagcagaataaaaaaatacagaactataaatcactatccaaattaatgaaaggcttagccagtgagtgtatgtcaggattaagcaataatagaaaatggacatctgctgacaggacaagaatgataagggctgtatcaggtgtgctctcaccacagtttattgctagagagggaatggatccactatcacaatcttgggtagagaaccttgaaaatattttaaatcaatcccgaacagaaaatgtttgctatgattttaagattggtttttacccgctcaacgaatccaatgattttaattccgctttactttctaaagtcgtaaaaacattaaccgccatggcaaattctcatgcgggagaaaattatatagttgtaggtgttgctgataatcatcgtgatgcagaaaaatattgcgagaagtataaatccaaagctagaaaatgtggtgagttttatataacaggaataaaccacgaagctgatgcgaatataacgaacattgacaggtatcaacaaaaaataaagcaactaattgaaagggaaccaataaatgacacaacaaaaagattaatattacgaaatatcctactttgcaaatattatgacaaagatgttttaatcttaaagataatccgtggtaaagatccaattaaatatgatgggagtatttatattcgtaaaatggctaatacagaccctaccccaatcgctcaggacgatgagttcgaattttataaagaatttatcgagcaatcttcacgttatccatatttatag

SEQ ID NO: 271888 - DNA, 327 bp, Klebsiella pneumoniae; identical to SEQ ID NO: 183250

SEQ ID NO: 271889 - DNA, 186 bp, Klebsiella pneumoniae; identical to SEQ ID NO: 183251

SEQ ID NO: 271890 - DNA, 237 bp, Klebsiella pneumoniae; identical to SEQ ID NO: 183252

SEQ ID NO: 271891 - DNA, 1956 bp, Klebsiella pneumoniae
atgaagacggttatttccgtgctgaccgcgcattttttagtcctgagcgcctttatctggctggcatctcccgcctgcgctgacagtggaagtgactataaagctggttcggattttgcgaaacaggtgcagggaaatggtctgaactcactgaaaaatttcagtggtgagcaaaacctgccggggtataccgacaacccggatcagacaaaatactacggcggcgtcactgccagcggagacagctctctgaaaagcgattcagccctggagttcagccagggagataccggcaaaacgattacggagtcgttcacgaaccggccaccggatcagatatctcaggatgcgccgtttattcaggccgcaaaggatacagaatcccgtgccgacagcattgtcggcgataccggacagtcctgtaccgcccaggttgtgaaccgcagcgagttcacaaaccatacctgcgaacgtgatctgcaggtggaaaatttttgcacacgggaagcgaccctgaaggataacgccaccacacagaaagttaaccgaacctatcagcaggtggtgacgctgaattatgcccggagtacccggcaatggagtggcaacctgacgatcccgaccaatggtcgtctgctgaatgcctcggtggatggtgagcctctggtgatcccctggattgaagaatgcgattccgaagggaaggtgcgggatagctgcaagagtgcagtcagtgaaagcctgaccctctttgaacgaacgttccccatagatgtgatcagctggccacgttcagaatcgatatgttcaggcggtcagaacacgcattgtacgaaatatacctatgacgggaaggggaagattcatcagtcgtttggtgtggacaaagcggtcactgctgggcagaacttttcagtaagcaaaacatcacggaccgtatcatcggccagccagaaacccgtacaggtcacggtcaccctggtgatggaagaaaccgaaaccgtctacgcacctgaagtcgtctgggttgaaagctgtccgttcagtaaggatgaaggaaaaaaaacgggcgaggaatgtatcagcccgggaggaacgcgaaccatcaccctcggaggcagggattactcgttcacggaagcatgctggaaatataaggatacctggctcacgcaaccggcggacaacggctcctgtgaaagcctgatgaaaaatacggcctgtactctgtcatcccgccagtgcgccttctccagcgaggaaggcacgtgcctgcatgaatatgcaacgtattcctgcgaaaccaggacgagtggcaagcaaatgatctgcggcggtgatgtcttctgccttgatggtgaatgtgacaaagccacgtccgggaagagcaacgactttgggcaggcggtgtctgagctggcggcactggctgccgcggggaaggacgtcgcggcactgaacggggtggatgtccgggccttcaccggaaaagcgaagttctgtaagaagtttgctgccggcttcagtaactgctgcaaagacagcggctggggccaggatgtggggctggcacgctgcagcagcgaggaaaaggcgctggccaaagcgaaaaaagacaagctgacggtcagtatcggggaattctgctctaaaaaggttctggggatttgcctggagaaaaaaaggagctattgccagttcgactcaaaactggcgcagatcgttcagcagcagggaagaaatggtcagttgcatatcggttttggcggcgccagcagtcctgactgtcggggcattaccaccgcggaactccaggggattgattttaacaagctggatttcaccaactttatggacgacctgatgaaaaatcaaaaaataccggaaaacgatgttctcaccaataagaccaaggaacgaattaaggaaatcatgagtcagcaatccgcgcaataa

SEQ ID NO: 271892 - DNA, 639 bp, Klebsiella pneumoniae
atgaaattaatgaatctgtttatggtcatgcttttgctgaccggacgagcagtgttggctgaaacctcctctgttacagacagagaatggctgaagcagcaggagaacctcagcgaacagctgcgccagcatccggataaacagctgcagcaggagcttgaggcgcaaatcagccgtaatcctctgcccaaatctgaccgccagtttatcgataatctggtcagccagcagaaagcggcgaatcaggaaaagccagcagaaggggcgctgtactttgtctccttctcgatacctgaagaggggctgaagcggatgctgcacgaaacccggcagtacggcattccggcgacactgcgtgggctcgtcaataacgacatgaagaccaccactgacgcggtgctgcagctggtgaaggatggcgtgaccgacggcgtgcagatcgacccgacactatatacgcagtacagcatccggagtgtgccgtctctggtggtacggtgtcaggccgggtatgacgtggtacgcggtaacattcacgtcaaacaggcgctggagaaagtggcacaaaccggtgactgcgcacaggtggcccggcaaatacttgatgcgccctcgaaagccgccgggagccagccatga

SEQ ID NO: 271893 - DNA, 720 bp, Klebsiella pneumoniae
atgacggacgtcagccgttcgcctggctgtatggtcaatctgggggggttcagtatcaatctcggcaagaccggcatggggaccgcgagaaaggacgacaagcaggtgaacggcgctttttatcacgttcactggtacaagtacccgctgacctactggctgaacatcatcacctccgcaggctgtctggaaggcggagacatggatatagcctatctgtccgagattgacccgacctgggtggacagcagcctcaccaccattctgaatccggaagccatcctgtttgccaaccccatcgcacagggggcgtgcgcggctgacgctatggccagcgcgtttcatatgccactcgatattctgttctggtgtgccggctctcagggttcgatgtacccgtttagcggctgggtaagcaacgagtccagtccgctgcagtcctcgttacttgtcagcgagcgcatggcgtacaagcttcaccggcagggacaaattatggagagcatcgggaaggacaaggcggtctgctatgagtatccgtccccgatcatccccaaagagcgctggcgctatcagatggtgaacatgtacccggacagcggccagtgccatcccgtggggcgcagtgtgatgcgctgggaggccggcaaaaatccacccaacacccgtaagaactatggctatctgatgtggcgtaaacgcaattgtgtctttctctga

SEQ ID NO: 271894 - DNA, 534 bp, Klebsiella pneumoniae
atgacaggattaatcccgattgctgacaatctgggccaatcgctgggtgaactcacgactaacgttatcgcgtgggcctcgcaaattggtggagaactccagaaaggtgcgacattaccgaccgctatctataacaccaccgttgatgaaggcagcaatgccgcagcgcagtggattaaagataagacaggttttgatcctcgtgtcatcggtcagacccttaagaagatttacccgtggctggatagttctgcacagaataatatcggcagtggacaggcctggacaaatccggggttaacccgtggggttgcaggattcagtcaaccacaactcacctttactccgcctgagccattcggttctacgggatggagaccagacagctccaggtttaatctgactggtgaggcgacggttaaagtcgaggttgagcagactctgaatgctggcgttttagataatctcattgatacaaagatcaacgataacaacgtcagacagcagaatatgatactaggtatagccgattaa

SEQ ID NO: 271895 - DNA, 360 bp, Klebsiella pneumoniae
atggaagctgttgaaccttatcatagaaggtctattgaacggtggcttgataccaacgttgaatgttccgactcttctttttggttagatgttaaaggtgattccatgacctcgccagtcggtctgagtatccctgaaggaatggtgattctggttgatccggaagttgagccccgcaatgggaagctggttgtcgctaaactcgacaacgagaacgaagccaccttcaagaagttagttattgatgctggaagcaaattcctcaagccacttaatccgcagtatccaatgatacccatcaacggtaactgtcagatcataggcgttgttgttgacgctaaaataaccaaccttccttaa

SEQ ID NO: 271896 - DNA, 210 bp, Klebsiella pneumoniae
atgaacaaactacgcgacatccgagagaaaatcgggttgacgcagatagagcttgcgactgagttgcgcgtgacaaaaggagccatctgtcactatgaaaatggccgccgaaatttaagcgcccagcaatgtcgagaaattctctctgtatttaataagcacggagctgatgtagggtttgatgatctgttcccaccatcagcagcgtaa

SEQ ID NO: 271897 - DNA, 837 bp, Klebsiella pneumoniae
atgagtaatctcgcaacagtaacacagataaggccaatacagcggcctgtggagcgtcgcgtggcagaaatcgaagatggatatacccgtcttgctaacgccctgtatgacgagcttatcggcgcagatttaacgaagaaccagagcaaggttgctcatgccatttgccgtaagacatacggatttggaaagaaatttgatcgcatttctgacagccagttggctcaacttaccagactgccacggcagaaggttaacaaggccaaaaatgagctaatcgaaatgaaggttatcctgcgcgaaggtagtcaaatagggcctaacaagaacatctcagaatgggaaatagaagggtgtcactactctggtgataatgtcactaaattggtgacaaaaagtgtcaccaaaacggttactaccctgtcaccaaaacagagtcacacaaaagaaactattcaaaagaaagaaataaataatacccccttaccccctaacgggggcggcgatgggcaggaaaagattgaacgtcgaaaaccagagcgaattgactacgaatcattcctggaggcctacaacgcagaggtcggtgacaaacttccacacgctgttgcagtcaacgagaagcgcaaacgccgtctgaagaaaatcattccccaactcaagactccaaacgttgacggattcagggcttacgtccgggcgttcgtccatcaggccaagccgttttactttggcgataacaataccggctggacagctgacctggattacctgctgagagacgacacgctaaccggcgttcgtgaggctaagtttgctgacagggggatggcatga

SEQ ID NO: 271898 - DNA, 1242 bp, Klebsiella pneumoniae
atgagcaacgcagcaatgataattgtcccgactgacatcagcgaaaaaatccgcgagattcaaaccgcatatgctcgttatctgaaggagtttcgcattcctgacgaccataaaatcgttgttaactactcggctggtaaggatagcaccgcaacactcgcagtggctcatgcgctgttcggcgacagggtgaaggctgttatggccgacaccgacaacgagcacgagctcacagttcagtttgcgaaaaccattcatgagcaaatcggctgtgctcctgttcaggttgttaagcggatatataccgaagaagactttgagcgtcgccgcggctatatccagaagaactgggttaagcggcaggctattcgcatgggtgcctatcgcggagtggtaatgccgtcgcttggccgctcagatacagcattcggccgggcgtggcttcgcactgcagagcgttggggtattgagttcgataccgcactggaagctgcgctgtctgttatgcatccgagcggaaatagcttcctcgactgcgcgctgctgcatggaaagttcccgatgctgcgtgaccgtttctgtactgatgaactgaaaattcagatcgctttcgattgcgcgatgcggcccatgctcgacgatggcgacgttattgtacagtggtccggagttcgggcggatgagtcatcaaagcgcgcaggttacgagcggttttctgcagaccagcgcgaccctgagtttctgtataacttccttcccattcaccagtggactgccgcggatgtttttgcacttcacaagcactttggaatatcacccaaccccttgtacacggaaggagcgtcacgcgttggctgcatgaactgcgtattgtgcaacaaagaagaaatcgccgaaacggcggcgcggtggccggagcacattcaaaaacacaaagaatgggagctgaaggttcgccttacctctcgctgggtgcactggatgagtgtcggagagataagccagcggtggatgaaaaaattcgacttacctctcggtcgtagtgtccagctctatgggttagcgccggaagtgcagaacatcgactggtctgggttttacggtccgcgtggaaacctgaattcccttggagtagacgatgttgtcgaatgggccaagacaggaaggggggggcaaggtttacgacctggtgaaagcaagcatggacacctcagtgtgctcatcccgttacggtttatgtga

SEQ ID NO: 271899 - DNA, 396 bp, Klebsiella pneumoniae
atgacgcaatatcttctaaaactaccctggccgccatccaataaccggtactggcgacactcacgaggcgtccactacatcagcgattgggggaagagataccgaaaagaagtaatcgaaataatccagcaacagcaactggacatcaaaatcacacctcgcatcagaatcaccatccacgcagcacctcccgacaaccgcaaacgagatttggacaatctgcccaaagccgtttttgacgcactcaccagtgcgggcttctggctggatgacggtcagatagatgatatgcgcatcaagcgttgtcaggcgattaaaggcggaatgcttgtactggtagttactgagatgtgcgagaacttgccaatgattacagagctactggaggccgcatga

SEQ ID NO: 271900 - DNA, 1038 bp, Klebsiella pneumoniae
atggacgtaacgaatacagaaaataaagaaatttttgaccagtctgccacacggttaaaagggatcaaaaacctgatgacaccttccggggatgtaatgcgtgttactgataccgacctaaagtggttcaaccatttttacaccttcgaggtgcagggtaagaaatgttatcagagtatccccaccatcgcgaaagtgatggggcgggccaggtcaggagcacaggagaggatcgacaaactggagtcgctgggcctattgacggtaggtaaggagacttttaaggatggctggcgcaatacgtacacctgtacgccaattgatgtcatcgtttctcgcatgactgatgcgaaagttacacctcaagacaagaagctgaaaaagtctcagcttgactctctgcttagaaaatccgaggcagtagatgccctggctatcaatcatgggataaaggaaatggcgaaagctatcgcagacctggatctctcagattcggaagtgatgcaattcgcttttcagattacagcagagaaattagccgtgctgggctggaatatcgaaacaaccgctaaggaagatggcaaatccgatgagaaggttaaaccacaggcagaacaggcagcaaaacaggcagcacccgctgctacaccatcaactgatgcgaccgcaggccagcactctgatcaaagtgctaacatggcctctgagtctgccacgtctactgctggacagcgctatagcgtggaatctgacaataaccgtagcagcgatgatctcaccaatggtggtcatgagatgagccaggatgagcaggacgatgatccaccgtttcaacctaataaaccagagtcagatgatgccccctggcagggcatggcctttgagagtgacgggcgtttaaccgaagctgcctataaatgggcgctcactgctggcgcgactggctggcgtcatgcctgccgtttagtgtgggaaaaggtcggcgtgataccgccagatgaaattaacgaggatcgcaagcctaaatttttaatgtga

SEQ ID NO: 271901 - DNA, 189 bp, Klebsiella pneumoniae
atgaatatctcattcccggatgagacgtaccgaacgttactcacggaagcaaatcgccgcgatatgccgatggcgagattgtgtagtgaattgctgcaaacagcggcaaaaatcattgataaaacgaaagcagacaaccaaacagaaaaccagcgaggaaatgatggacgtaacgaatacagaaaataa

SEQ ID NO: 271902 - DNA, 441 bp, Klebsiella pneumoniae
atggatctcagcggctatagtttcaaacagcatctttccgatctacttctgccaaatagcgagttttactccactgtaaaccctgcatacctgaattctggcggtgtgtacgttctacgcagttttaacgatgcagggcaagcgctcactataccgcgagtgttggatgatgaccgggacgggattttgtacattggtatggctaaactgttctgccaccgtacaggcgatctggctcgctctttcagttctcagtatcagcagagtaagcaccagaccgggcagcgctactggagtgatgaacgatatcagcagcgttatccgtatgaacacctgaaaatgtttatgtggatcagcgatcatcccgcgacgctcgaacaatcattctttcaaagctaccttgcgagatttggcgagactccgccacttaataggatttga

SEQ ID NO: 271903 - DNA, 426 bp, Klebsiella pneumoniae
atggaagatgaaaaagctattacagaggtcctggctcactcaattggtcctaaagatgcggctctttgccatttagctctttgtgctaactatggcgtgggcaccgaggtaacgattgtcgttggtggtcagctaatcactggagagttggtgtccggtaaagaatatgctgaaactacagctaacgcttttaggaacgctaactgcgatgactctctcaaagaatcactggctggtttctttgaagaacttgcgaatgattatagtcaggaggaagggaacacaatccccctaaactatgtccacttgaaagacccagcttatcttcgcggcgatggggtttggctcaccattaaaggagcaatattaagagttcatttagaaaaggttctgggatttaccctagggcgaagctgcgaaaaataa

SEQ ID NO: 271904 - DNA, 597 bp, Klebsiella pneumoniae
atgaacaaagcatttgtggctctaggttttattgcattaataattacatgcgtttttgcaataagggagcctatttctctcgtatttataatcggcacaacccttattattggctgtgggtttgtaaaaataggtgagaaggctgaatttaatgcccgcctttccaatgcggagagaaaaggtactttgcggttttgcgctgttggatttttggttatgtctctaatttcaaatatcggattcctgctatgggttgactcaaaaaccccaatttttggcgatgattacgttgaaagaaagcattatgaagacttgaaaggggatttaagaaagcaggagatcgctgaggaagaggctagattcagccgcgcctacgatgcaaaagaatccgttaagtcaaccctgaaggactcatcatctgctgagttctctggagaaagagacggtgttggtggcgcggtttgtgggtatgtaaacgcaaaaaatagctttggagcatatgctggaaagtctaggtacatttcagtcggcggtcagtctgtaatagacgacggcagccagtcgtttggtgacttgtgggaaaagacctgcaactaa

SEQ ID NO: 271905 - DNA, 258 bp, Klebsiella pneumoniae
atgcctaaaaaaacatcaaaaccaaacgatttaagcaacactatcaacaacataaagaaagaaattaactcaggttttactgagttacttaatcgcgtagaagccttagaggctagtgacgcacaacacagcatggcgatacgtgatttacaaattcaggctagagccgctcgcggagacaaacgcatggatatagcaagagactttgacctcagcgagggacgaattagccagatcgttaatgcgggtcgtaactaa

SEQ ID NO: 271906 - DNA, 129 bp, Klebsiella pneumoniae; identical to SEQ ID NO: 27031

SEQ ID NO: 271907 - DNA, 711 bp, Klebsiella pneumoniae
atgctgtactggaaaagaatgccttcactatggataggtatcaaaatatctgaattcaacgatcttgatacagcaaaagccatcgccgcgttaaagatttatttaacattttgccttttctgcaaagagtcagattcaggacagagaactgttgagctaacttttagtaacctatgtgagatagcatcattaagccgatcgttagttaacgaagggcttaaaattctttatgcaaaagagttgataaaaaatttatcaacgacagtacgtaaaaaaatttataccgtagatgtattagagaagcatgatgatggttggtgtaagcttccctttaaaggaattgtaggtgaagatggaaaaataagtgcatttcaatccatgcacaacagatatccatttgagttgctagctttacaaacctacatgtaccttctttatgctcgtgataatagaaatgagtatactcttgctaggaaaaaaacaatatgtaaaaaactgaaatgcaaactacctgaactaaataaagctattacctatcttattcatattggtttacttgataggattgttaaaaaatcaatagaaaacaagccgttggaaatgtttcatgattcatgttacttctactttagagcgggaagtaacagcgctctcacttacaaaaggaaatcagaggtgcttaatctttcagaggaggacttgcctttttga

SEQ ID NO: 271908 - DNA, 516 bp, Klebsiella pneumoniae
atgaaattttacacaatatcaagcagttacataaaatacctgaaggactttgatgacaaagttcccaatagcgaagatcctacatacaacaatcctaaggctttcattggcatagtactagagattgaaggacataaatatttagcacctttaacgtcgccaaaagcatggcatgctaatgtaaaagagtcatcacccgccttcttcaaacttcatgaaaacggtgtccctgataatcagcttggattgattaatctgaaatttatgattccaataatcgaagctgaagtgtctttacttgatctggatagcatgcctgatacgccttacaaaagaatgctatataaacagttacaatttattcgtgtaaatgaagataaaatatctgaaaaatcaaaactattaagaaaccttgccttgcaaggcagaatgcaaggaacatgcgactttgccgtgttagaagaaaaatatcaacatttcggtaaaaaacctgaagacatggaaatagacgattaa

SEQ ID NO: 271909 - DNA, 1890 bp, Klebsiella pneumoniae
atgatcccggttcgcaagggtgacgttgtgcgcctcactgtttacaccacatcggcaaccgcaggtcacgcggctgcgctgtacgattcagccggagcatatgttggtccgctgggaattatgtgcgcgtcgtatgcggcgtatcaggcacgacattaccagtgtgaaattgctcaggacgggttcgttgttgcgaacacactggaccagagcgcttctgcctctgctgatgtgactggtgcggtacttactgtcgatcaccgccttcgcggccgggcggcagatgctgttcttaaactgtcaaagtccgatttaatccctgtccgtctcgataacggaaatatcaatgcgagttctatcacgcaggacggtatcgttaactactccaccggtctgtattcctgtactggcggaagactcctgttcagtggcctgcctgtagcctcggctccagggcagagcagtagcctgtataacgtggttttctacgatgcaaacaaggcgcttattgcgtatcgcccggtgttctccagttcgggttatgtggtcattcctgaaaatgccgcgtactgggcgcagcagataatcaccgacagaacgccggactggtctgctgtatcgattgtttattacaactatgtttacaaggacgagctgcataagttgctgtcgtcagagcgcgaccgccttgggcttgattatccgaatgaatattggctgcaggatttcagcggtactaccgatattgagtggattcagaacgcgatggactgggtgcatgacgcgggcggcggctggctaatcctgtcctctgactatgtgaaaaagcagttcatcatctccgaagccgtcatccaccgcagtaacgtatgggttgtactggatggcgttgaaatcaaattgcaggacggcgtgcatgacaatctgtttcgtgctgccggtgttattgtcaatcctgacgacccgtttggtctgtgcctggacctggaaataacggacaacgtccgcctgattggcacaggttacccgaaactcagtggcgctgacgtggcgtattatgccgatattccggcaggtgccgggccgcgctactggattggtgatgaatacggatggcgaggtacagggctgatttattacggtacgcagaattttgaaatcggcggattcaaactccagaacgtaaaaaactgggggactgattttgggtacggttctaaaaatggctatatccatgatattgacctgtggcagccgaacaaaaatggcgacggcatccacttcaccaacggtgccagtcatatgcgcgtccgtcagattttcggctatgcgcgcgatgactgcctagctatggtcaatagtgatgactccctggtttacggccctgacaaaatcccgacaccggggtcaattcgccagtggatctacccaacctgtcctttctggtacgggtgggcgggaaatgaggctgtgggaaccagcaacgatattcacgatatcgttgctacgaatatcgggttaaccggtaacgagcaggtcagcaccattctgaccacgcagtttaaaatctacaacgtgacaatcagcggtatcagcagcgtcaactatatgactccaggccggggctgggatgaagttaatgcgattctgaaatcgtatgcagggtttggggatgcttcccgctataaggcaggtaatgtcagcaatatcagcattaataacatcattgagtgtgcgtcgaaaaattacagtatcgatataacgctggaggggaggaatatccgcgtcaatcgttatatgaaactggacacccgcgcgaaaacaaaaggtgcgctgaacatcagcagttcagccgccccgtatgtaacgacctctaatattgtggaataa
